(19) United States
(12) Patent Application Publication
(10) Pub. No.: US 2024/0252682 A1
(43) Pub. Date: Aug. 1, 2024

(54) HBB-MODULATING COMPOSITIONS AND METHODS

(71) Applicant: Flagship Pioneering Innovations VI, LLC, Cambridge, MA (US)

(72) Inventors: Robert Charles Altshuler, Newton, MA (US); Anne Helen Bothmer, Cambridge, MA (US); Daniel Raymond Chee, Cambridge, MA (US); Cecilia Giovanna Silvia Cotta-Ramusino, Cambridge, MA (US); Kyusik Kim, Worcester, MA (US); Randi Michelle Kotlar, Arlington, MA (US); Gregory David McAllister, Canton, MA (US); Ananya Ray, Melrose, MA (US); Nathaniel Roquet, Philadelphia, PA (US); Carlos Sanchez, Boston, MA (US); Barrett Ethan Steinberg, Somerville, MA (US); William Edward Salomon, West Roxbury, MA (US); Robert James Citorik, Somerville, MA (US); William Querbes, Westwood, MA (US); Luciano Henrique Apponi, Lynn, MA (US); Zhan Wang, Somerville, MA (US); Yanfang Fu, Arlington, MA (US); Daniel Gene Abernathy, Cambridge, MA (US); Michael Christopher Holmes, Cambridge, MA (US)

(21) Appl. No.: 18/590,275

(22) Filed: Feb. 28, 2024

Related U.S. Application Data
(63) Continuation of application No. PCT/US22/76063, filed on Sep. 7, 2022.
(60) Provisional application No. 63/241,994, filed on Sep. 8, 2021.
(60) Provisional application No. 63/250,143, filed on Sep. 29, 2021.
(60) Provisional application No. 63/303,900, filed on Jan. 27, 2022.

(51) Int. Cl. A61K 48/00; A61P 7/06; C12N 9/22; C12N 15/11; C12N 15/85

(52) U.S. Cl. CPC A61K 48/005; A61P 7/06; C12N 9/22; C12N 15/111; C12N 15/85; C12N 2310/20

(57) ABSTRACT

The disclosure provides, e.g., compositions, systems, and methods for targeting, editing, modifying, or manipulating a host cell's genome at one or more locations in a DNA sequence in a cell, tissue, or subject. Gene modifying systems for treating sickle cell disease (SCD) are described.

### SEQUENCE LISTING

[0001] The instant application contains a Sequence Listing which has been submitted electronically in XML format compliant with WIPO Standard ST.26 and is hereby incorporated by reference in its entirety. Said XML copy, created on Feb. 27, 2024, is named V2065-702720FT_SL.XML and is 30,054,845 bytes in size.

### CROSS REFERENCE TO RELATED APPLICATIONS

[0002] This application is a continuation of International Application No. PCT/US2022/076063, filed Sep. 7, 2022, which claims the benefit of U.S. Provisional Application No. 63/241,994, filed Sep. 8, 2021, U.S. Provisional Application No. 63/250,143, filed Sep. 29, 2021, and U.S. Provisional Application No. 63/303,900, filed Jan. 27, 2022. The contents of the aforementioned applications are hereby incorporated by reference in their entirety.

### BACKGROUND

[0003] Integration of a nucleic acid of interest into a genome occurs at low frequency and with little site specificity, in the absence of a specialized protein to promote the insertion event. Some existing approaches, like CRISPR/Cas9, are more suited for small edits that rely on host repair pathways and are less effective at integrating longer sequences. Other existing approaches, like Cre/loxP, require a first step of inserting a loxP site into the genome and then a second step of inserting a sequence of interest into the loxP site. There is a need in the art for improved compositions (e.g., proteins and nucleic acids) and methods for inserting, altering, or deleting sequences of interest in a genome.

[0004] Sickle cell disease is an inherited blood disorder that affects red blood cells. There are several types of sickle cell disease (e.g., hemoglobin SS disease, hemoglobin SC disease; sickle beta-plus thalassemia; sickle beta-zero thalassemia). People with sickle cell disease have red blood cells that contain mostly hemoglobin S, an abnormal type of hemoglobin. Sickle-shaped cells die prematurely, which can lead to a shortage of red blood cells (anemia). Sickle-shaped cells are rigid and can block small blood vessels, causing severe pain and organ damage. Tissue that does not receive a normal blood flow eventually becomes damaged. This is what causes the complications of sickle cell disease.

[0005] The HBB gene provides instructions for making a protein, beta-globin. Beta-globin is a component (subunit) of a larger protein called hemoglobin, which is located inside red blood cells. In adults, hemoglobin normally consists of four protein subunits: two subunits of beta-globin and two subunits of another protein called alpha-globin, which is produced from another gene called HBA. Each of these protein subunits is bound to an iron-containing molecule called heme; each heme contains an iron molecule in its center that can bind to one oxygen molecule. Hemoglobin within red blood cells binds to oxygen molecules in the lungs. These cells then travel through the bloodstream and deliver oxygen to tissues throughout the body.

[0006] Sickle cell anemia, a common form of sickle cell disease, is caused by a particular mutation in the HBB gene. This mutation results in the production of an abnormal version of beta-globin called hemoglobin S or HbS. In this condition, hemoglobin S replaces both betaglobin subunits in hemoglobin. The mutation changes a single amino acid in beta-globin. Specifically, the amino acid glutamic acid is replaced with the amino acid valine at position 6 in beta-globin, written as Glu6Val or E6V. Replacing glutamic acid with valine causes the abnormal hemoglobin S subunits to stick together and form long, rigid molecules that bend red blood cells into a sickle or crescent shape. Mutations in the HBB gene can also cause other abnormalities in beta-globin, leading to other types of sickle cell disease. In these other types of sickle cell disease, just one beta-globin subunit is replaced with hemoglobin S. The other beta-globin subunit is replaced with a different abnormal variant, such as hemoglobin C or hemoglobin E.

[0007] There is currently no universal cure for sickle cell disease. The available options for treating sickle cell disease are limited to a bone marrow or stem cell transplant. Accordingly, there is a need for new and more effective treatments for sickle cell disease utilizing the HBB E6V mutation.

### SUMMARY OF THE INVENTION

[0008] This disclosure relates to novel compositions, systems, and methods for altering a genome at one or more locations in a host cell, tissue, or subject, in vivo or in vitro. In particular, the invention features compositions, systems, and methods for inserting, altering, or deleting sequences of interest in a host genome. For example, the disclosure provides systems that are capable of modulating (e.g., inserting, altering, or deleting sequences of interest) the HBB gene activity and methods of treating sickle cell disease (SCD) disease by administering one or more such systems to alter a genomic sequence at a HBB nucleotide to correct a pathogenic mutation causing SCD.

[0009] In one aspect, the disclosure relates to a system for modifying DNA to correct a human HBB gene mutation causing SCD comprising (a) a nucleic acid encoding a gene modifying polypeptide capable of target primed reverse transcription, the polypeptide comprising (i) a reverse transcriptase domain and (ii) a Cas9 nickase that binds DNA and has endonuclease activity, and (b) a template RNA comprising (i) a gRNA spacer that is complementary to a first portion of the human HBB gene, (ii) a gRNA scaffold that binds the polypeptide, (iii) a heterologous object sequence comprising a mutation region to correct the mutation, and (iv) a primer binding site (PBS) sequence comprising at least 3, 4, 5, 6, 7, or 8 bases of 100% homology to a target DNA strand at the 3′ end of the template RNA. The HBB gene may comprise an E6V mutation. The template RNA sequence may comprise a sequence described herein, e.g., in Table 1, 3, 4, A. AA. B. B1, 5A-5D. X4. or X4A.

[0010] The gRNA spacer may comprise at least 15 bases of 100% homology to the target DNA at the 5′ end of the template RNA. The template RNA may further comprise a PBS sequence comprising at least 5 bases of at least 80% homology to the target DNA strand. The template RNA may comprise one or more chemical modifications.

[0011] The domains of the gene modifying polypeptide may be joined by a peptide linker. The polypeptide may comprise one or more peptide linkers. The gene modifying polypeptide may further comprise a nuclear localization signal. The polypeptide may comprise more than one nuclear localization signal, e.g., multiple adjacent nuclear localization signals or one or more nuclear localization signals in different regions of the polypeptide, e.g., one or more nuclear localization signals in the N-terminus of the polypeptide and one or more nuclear localization signals in the C-terminus of the polypeptide. The nucleic acid encoding the gene modifying polypeptide may encode one or more intein domains.

[0012] Introduction of the system into a target cell may result in insertion of at least 1, 2, 3, 4, 5, 10, 15, 20, 25, 30, 35, 40, 45, 50, 60, 70, 80, 90, 100, 150, 200, 250, 300, 350, 400, 500, or 1000 base pairs of exogenous DNA. Introduction of the system into a target cell may result in deletion, wherein the deletion is less than 2, 3, 4, 5, 10, 50, or 100 base pairs of genomic DNA upstream or downstream of the insertion. Introduction of the system into a target cell may result in substitution, e.g., substitution of 1, 2, or 3 nucleotides, e.g., consecutive nucleotides.

[0013] The heterologous object sequence may be at least 5, 10, 25, 50, 100, 150, 200, 250, 300, 400, 500, 600, or 700 base pairs.

[0014] In one aspect, the disclosure relates to a pharmaceutical composition comprising the system described above and a pharmaceutically acceptable excipient or carrier, wherein the pharmaceutically acceptable excipient or carrier is selected from the group consisting of a plasmid vector, a viral vector, a vesicle, and a lipid nanoparticle. In one aspect, the disclosure relates to a pharmaceutical composition comprising the system described above and multiple pharmaceutically acceptable excipients or carriers, wherein the pharmaceutically acceptable excipients or carriers are selected from the group consisting of a plasmid vector, a viral vector, a vesicle, and a lipid nanoparticle, e.g., where the system described above is delivered by two distinct excipients or carriers, e.g., two lipid nanoparticles, two viral vectors, or one lipid nanoparticle and one viral vector. The viral vector may be an adeno-associated virus (AAV).

[0015] In one aspect, the disclosure relates to a host cell (e.g., a mammalian cell, e.g., a human cell) comprising the system described above.

[0016] In one aspect, the disclosure relates to a method of correcting a mutation in the human HBB gene in a cell, tissue or subject, the method comprising administering the system described above to the cell, tissue or subject, wherein optionally the correction of the mutant HBB gene comprises an amino acid substitution of V6E (reversing the pathogenic substitution which is E6V. The system may be introduced in vivo, in vitro, ex vivo, or in situ. The nucleic acid of (a) may be integrated into the genome of the host cell. In some embodiments, the nucleic acid of (a) is not integrated into the genome of the host cell. In some embodiments, the heterologous object sequence is inserted at only one target site in the host cell genome. The heterologous object sequence may be inserted at two or more target sites in the host cell genome, e.g., at the same corresponding site in two homologous chromosomes or at two different sites on the same or different chromosomes. The heterologous object sequence may encode a mammalian polypeptide, or a fragment or a variant thereof. The components of the system may be delivered on 1, 2, 3, 4, or more distinct nucleic acid molecules. The system may be introduced into a host cell by electroporation or by using at least one vehicle selected from a plasmid vector, a viral vector, a vesicle, and a lipid nanoparticle.

[0017] Features of the compositions or methods can include one or more of the following enumerated embodiments.

### Enumerated Embodiments

[0018] 1. A template RNA comprising, e.g., from 5′ to 3′:
   [0019] (i) a gRNA spacer that is complementary to a first portion of the human HBB gene, wherein the gRNA spacer has a sequence comprising the core nucleotides of a gRNA spacer sequence of Table 1, or a sequence having 1, 2, or 3 substitutions thereto, and optionally comprises one or more consecutive nucleotides starting with the 3′ end of the flanking nucleotides of the gRNA spacer (e.g., comprises one or more flanking nucleotides that are adjacent to the core nucleotides), or wherein the gRNA spacer has a sequence of a spacer chosen from Table A, Table AA, Table B, Table B1, Tables 5A-5D, Table X4, or Table X4A;
   [0020] (ii) a gRNA scaffold that binds a gene modifying polypeptide (e.g., binds the Cas domain of the gene modifying polypeptide),
   [0021] (iii) a heterologous object sequence comprising a mutation region to introduce a mutation into (e.g., to correct a mutation in) a second portion of the human HBB gene (wherein optionally the heterologous object sequence comprises, from 5′ to 3′, a post-edit homology region, a mutation region, and a pre-edit homology region), and
   [0022] (iv) a primer binding site (PBS) sequence comprising at least 3, 4, 5, 6, 7, or 8 bases with 100% identity to a third portion of the human HBB gene.
[0023] 2. The template RNA of embodiment 1, wherein the heterologous object sequence comprises the core nucleotides of an RT template sequence from Table 3, or a sequence having 1, 2, or 3 substitutions thereto, and optionally comprises one or more consecutive nucleotides starting with the 3′ end of the flanking nucleotides of the RT template sequence, or wherein the heterologous object sequence comprises a sequence of an RT template sequence from Table A, Table AA, Table B, Table B1, Tables 5A-5D, Table X4, or Table X4A.
[0024] 3. The template RNA of embodiment 1, wherein the heterologous object sequence comprises the core nucleotides of the RT template sequence of Table 3 that corresponds to the gRNA spacer sequence, or a sequence having 1, 2, or 3 substitutions thereto, and optionally comprises one or more consecutive nucleotides starting with the 3′ end of the flanking nucleotides of the RT template sequence (e.g., comprises one or more flanking nucleotides that are adjacent to the core nucleotides), or wherein the heterologous object sequence comprises a sequence of an RT template sequence from Table A, Table AA, Table B, Table B1, Tables 5A-5D, Table X4, or Table X4A that corresponds to the gRNA spacer sequence.
[0025] 4. The template RNA according to any one of embodiments 1-3 wherein the PBS sequence has a sequence comprising the core nucleotides of the PBS sequence from the same row of Table 3 as the RT template sequence, or a sequence having 1, 2, or 3 substitutions thereto, and optionally comprises one or more consecutive nucleotides starting with the 5′ end of the flanking nucleotides of the PBS sequence (e.g., comprises one or more flanking nucleotides that are adjacent to the core nucleotides).
[0026] 5. The template RNA according to any one of embodiments 1-3, wherein the PBS sequence has a sequence comprising the core nucleotides of a PBS sequence of Table 3 that corresponds to the RT template sequence, or a sequence having 1, 2, or 3 substitutions thereto, the gRNA spacer sequence, or both, and optionally comprises one or more consecutive nucleotides starting with the 5′ end of the flanking nucleotides of the PBS sequence, or wherein the PBS sequence has a sequence comprising a sequence of a PBS from Table A, Table AA, Table B, Table B1, Tables 5A-5D, Table X4, or Table X4A that corresponds to the RT template sequence, or a sequence having 1, 2, or 3 substitutions thereto, the gRNA spacer sequence, or both.
[0027] 6. The template RNA according to any of embodiments 1-5, wherein the gRNA scaffold comprises a sequence of a gRNA scaffold of Table 12, or a sequence having at least 70%, 75%, 80%, 85%, 90%, 95%, 96%, 97%, 98%, or 99% identity thereto.
[0028] 7. The template RNA according to any of embodiments 1-5, wherein the gRNA scaffold comprises a sequence of a gRNA scaffold of Table 12 that corresponds to the RT template sequence, the gRNA spacer sequence, or both, or a sequence having at least 70%, 75%, 80%, 85%, 90%, 95%, 96%, 97%, 98%, or 99% identity thereto.
[0029] 8. A template RNA comprising, e.g., from 5′ to 3′:
   [0030] (i) a gRNA spacer that is complementary to a first portion of the human HBB gene,
   [0031] (ii) a gRNA scaffold that binds a gene modifying polypeptide (e.g., binds the Cas domain of the gene modifying polypeptide),
   [0032] (iii) a heterologous object sequence comprising a mutation region to introduce a mutation into (e.g., to correct a mutation in) a second portion of the human HBB gene, wherein the heterologous object sequence comprises the core nucleotides of an RT template sequence of Table 3, or a sequence having 1, 2, or 3 substitutions thereto, and optionally comprises one or more consecutive nucleotides starting with the 3′ end of the flanking nucleotides of the RT template sequence, or wherein the heterologous object sequence comprises an RT template sequence of Table A, Table AA, Table B, Table B1, Tables 5A-5D, Table X4, or Table X4A; and
   [0033] (iv) a PBS sequence comprising at least 3, 4, 5, 6, 7, or 8 bases of 100% identity to a third portion of the human HBB gene.
[0034] 9. The template RNA of embodiment 8, wherein the gRNA spacer comprises the core nucleotides of a gRNA spacer sequence of Table 1, or a sequence having 1, 2, or 3 substitutions thereto, and optionally comprises one or more consecutive nucleotides starting with the 3′ end of the flanking nucleotides of the gRNA spacer sequence, or wherein the gRNA spacer comprises a gRNA spacer sequence of Table A, Table AA, Table B, Table B1, Tables 5A-5D, Table X4, or Table X4A.
[0035] 10. The template RNA of any one of embodiments 1-9, wherein the gRNA spacer comprises CATGGTGCATCTGACTCCTG (SEQ ID NO: 21668) or CATGGTGCACCTGACTCCTG (SEQ ID NO: 19249), or a sequence having 1, 2, or 3 substitutions thereto.
[0036] 11. The template RNA of any one of embodiments 1-9, wherein the gRNA spacer comprises GTAACGGCAGACTTCTCCAC (SEQ ID NO: 19971), or a sequence having 1, 2, or 3 substitutions thereto.
[0037] 12. The template RNA of embodiment 8, wherein the heterologous object sequence comprises the core nucleotides of the gRNA spacer sequence of Table 1 that corresponds to the RT template sequence, or a sequence having 1, 2, or 3 substitutions thereto, and optionally comprises one or more consecutive nucleotides starting with the 3′ end of the flanking nucleotides of the gRNA spacer sequence, or wherein the heterologous object sequence comprises the nucleotides of the gRNA spacer sequence of Table A, Table AA, Table B, Table B1, Tables 5A-5D, Table X4, or Table X4A that corresponds to the RT template sequence, or a sequence having 1, 2, or 3 substitutions thereto.
[0038] 13. The template RNA according to any one of embodiments 8-12, wherein the PBS sequence has a sequence comprising the core nucleotides of the PBS sequence from the same row of Table 3 as the RT template sequence, or a sequence having 1, 2, or 3 substitutions thereto, and optionally comprises one or more consecutive nucleotides starting with the 5′ end of the flanking nucleotides of the PBS sequence.
[0039] 14. The template RNA according to any one of embodiments 8-12, wherein the PBS sequence has a sequence comprising the core nucleotides of a PBS sequence of Table 3 that corresponds to the RT template sequence, or a sequence having 1, 2, or 3 substitutions thereto, the gRNA spacer sequence, or both, and optionally comprises one or more consecutive nucleotides starting with the 5′ end of the flanking nucleotides of the PBS sequence, or wherein the PBS sequence has a sequence comprising the core nucleotides of a PBS sequence of Table A, Table AA, Table B, Table B1, Tables 5A-5D, Table X4, or Table X4A that corresponds to the RT template sequence, the gRNA spacer sequence, or both.
[0040] 15. The template RNA according to any of embodiments 8-14, wherein the gRNA scaffold comprises a sequence of a gRNA scaffold of Table 12, or a sequence having at least 70%, 75%, 80%, 85%, 90%, 95%, 96%, 97%, 98%, or 99% identity thereto.
[0041] 16. The template RNA according to any of embodiments 8-14, wherein the gRNA scaffold comprises a sequence of a gRNA scaffold of Table 12 that corresponds to the RT template sequence, the gRNA spacer sequence, or both, or a sequence having at least 70%, 75%, 80%, 85%, 90%, 95%, 96%, 97%, 98%, or 99% identity thereto.
[0042] 17. The template RNA according to any of the preceding embodiments, wherein the gRNA spacer has a sequence of a gRNA spacer sequence of Table A, or Table B, or a sequence having 1, 2, or 3 substitutions thereto.
[0043] 18. The template RNA according to embodiment 17, wherein the gRNA spacer has a sequence of SEQ ID NO: 21668.
[0044] 19. The template RNA of embodiment 17 or 18, wherein the PBS sequence has a sequence of a PBS sequence from the same row as Table A or B as the gRNA spacer sequence, or a sequence having 1, 2, or 3 substitutions thereto.
[0045] 20. The template RNA of any of embodiments 17-19, wherein the PBS sequence has a sequence comprising the core nucleotides of the PBS sequence of SEQ ID NO:21669, and optionally comprises one or more consecutive nucleotides starting with the 5′ end of the flanking nucleotides of the PBS sequence.
[0046] 21. The template RNA of any of embodiments 17-19, wherein the gRNA scaffold has a sequence of a gRNA scaffold from the same row as Table A or B as the gRNA spacer sequence, or a sequence having 1, 2, or 3 substitutions thereto.
[0047] 22. The template RNA of any of embodiments 17-20, wherein the heterologous object sequence has a sequence of the RT template sequence from the same row as Table A or B as the gRNA spacer sequence, or a sequence having 1, 2, or 3 substitutions thereto, wherein optionally the bolded T shown in the RT template sequence of Table A is replaced with a G (e.g., a sequence without a PAM-kill mutation), or wherein further optionally the bolded C shown in the RT template of Table B is replaced with a T or U (e.g., a sequence without a SNP that is present in HEK293T cells but absent in the hg38 human reference genome).
[0048] 23. The template RNA of any of embodiments 17-22, wherein the heterologous object sequence has a sequence comprising the core nucleotides of the RT template sequence of SEQ ID NO:21670, and optionally comprises one or more consecutive nucleotides starting with the 3′ end of the flanking nucleotides of the RT template sequence.
[0049] 24. The template RNA of any of embodiments 17-23, wherein the heterologous object sequence has a sequence comprising the core nucleotides of the RT template sequence of SEQ ID NO:21671, and optionally comprises one or more consecutive nucleotides starting with the 3′ end of the flanking nucleotides of the RT template sequence.
[0050] 25. The template RNA of any of embodiments 17-24, wherein the template RNA has a sequence of a template RNA of Table A or Table B, or a sequence having at least 70%, 75%, 80%, 85%, 90%, 95%, 96%, 97%, 98%, or 99% identity thereto, wherein optionally the template RNA comprises one or more (e.g., all) chemical modifications shown in the sequence of Table A or Table B.
[0051] 26. A gene modifying system for modifying DNA, comprising:
   [0052] (a) a first RNA comprising, from 5′ to 3, (i) a guide RNA sequence that is complementary to a first portion of the human HBB gene, wherein the guide RNA sequence has a sequence comprising the core nucleotides of a spacer sequence of Table 1, or a sequence having 1, 2, or 3 substitutions thereto, and optionally comprises one or more consecutive nucleotides starting with the 3′ end of the flanking nucleotides of the guide RNA sequence, or wherein the guide RNA sequence has a sequence comprising a spacer from Table A, Table AA, Table B, Table B1, Tables 5A-5D, Table X4, or Table X4A; and (ii) a sequence (e.g., a scaffold region) that binds a gene modifying polypeptide (e.g., binds the Cas domain of the gene modifying polypeptide), and
   [0053] (b) a second RNA comprising (iii) a heterologous object sequence comprising a nucleotide substitution to introduce a mutation into a second portion of the human HBB gene (wherein optionally the heterologous object sequence comprises, from 5′ to 3′, a post-edit homology region, a mutation region, and a pre-edit homology region), (iv) a primer region comprising at least 5, 6, 7, or 8 bases of 100% identity to a third portion of the human HBB gene, and (v) an RRS (RNA binding protein recognition sequence) that binds a gene modifying protein.
[0054] 27. The gene modifying system of embodiment 26, wherein the heterologous object sequence comprises the core nucleotides of an RT template sequence from Table 3, or a sequence having 1, 2, or 3 substitutions thereto, and optionally comprises one or more consecutive nucleotides starting with the 3′ end of the flanking nucleotides of the RT template sequence, or wherein the heterologous object sequence comprises a sequence of an RT template sequence from Table A, Table AA, Table B, Table B1, Tables 5A-5D, Table X4, or Table X4A, or a sequence having 1, 2, or 3 substitutions thereto.
[0055] 28. The gene modifying system of embodiment 26, wherein the heterologous object sequence comprises the core nucleotides of the RT template sequence of Table 3 that corresponds to the gRNA spacer sequence, or a sequence having 1, 2, or 3 substitutions thereto, and optionally comprises one or more consecutive nucleotides starting with the 3′ end of the flanking nucleotides of the RT template sequence, or wherein the heterologous object sequence comprises a sequence of an RT template sequence from Table A, Table AA, Table B, Table B1, Tables 5A-5D, Table X4, or Table X4A that corresponds to the gRNA spacer sequence, or a sequence having 1, 2, or 3 substitutions thereto.
[0056] 29. The gene modifying system of any one of embodiments 26-28, wherein the PBS sequence has a sequence comprising the core nucleotides of the PBS sequence from the same row of Table 3 as the RT template sequence, or a sequence having 1, 2, or 3 substitutions thereto, and optionally comprises one or more consecutive nucleotides starting with the 5′ end of the flanking nucleotides of the PBS sequence.
[0057] 30. The gene modifying system of one of embodiments 26-28, wherein the PBS sequence has a sequence comprising the core nucleotides of a PBS sequence of Table 3 that corresponds to the RT template sequence, or a sequence having 1, 2, or 3 substitutions thereto, the gRNA spacer sequence, or both, and optionally comprises one or more consecutive nucleotides starting with the 5′ end of the flanking nucleotides of the PBS sequence, or wherein the PBS sequence comprises a PBS sequence from Table A, Table AA, Table B, Table B1, Tables 5A-5D, Table X4, or Table X4A that corresponds to the RT template sequence, or a sequence having 1, 2, or 3 substitutions thereto, the gRNA spacer sequence, or both.
[0058] 31. The gene modifying system of any one of embodiments 26-30, wherein the gRNA scaffold comprises a sequence of a gRNA scaffold of Table 12, or a sequence having at least 70%, 75%, 80%, 85%, 90%, 95%, 96%, 97%, 98%, or 99% identity thereto.
[0059] 32. The gene modifying system of any one of embodiments 26-30, wherein the gRNA scaffold comprises a sequence of a gRNA scaffold of Table 12 that corresponds to the RT template sequence, the gRNA spacer sequence, or both, or a sequence having at least 70%, 75%, 80%, 85%, 90%, 95%, 96%, 97%, 98%, or 99% identity thereto.
[0060] 33. A gene modifying system for modifying DNA, comprising:
   [0061] (a) a first RNA comprising, from 5′ to 3, (i) a guide RNA sequence that is complementary to a first portion of the human HBB gene, and (ii) a sequence (e.g., a scaffold region) that binds a gene modifying polypeptide (e.g., binds the Cas domain of the gene modifying polypeptide), and
   [0062] (b) a second RNA comprising (iii) a heterologous object sequence comprising a nucleotide substitution to introduce a mutation into a second portion of the human HBB gene, wherein the heterologous object sequence comprises the core nucleotides of an RT template sequence of Table 3, or a sequence having 1, 2, or 3 substitutions thereto, and optionally comprises one or more consecutive nucleotides starting with the 3′ end of the flanking nucleotides of the RT template sequence, or wherein the heterologous object sequence comprises an RT sequence from Table A, Table AA, Table B, Table B1, Tables 5A-5D, Table X4, or Table X4A, or a sequence having 1, 2, or 3 substitutions thereto, and (iv) a primer region comprising at least 5, 6, 7, or 8 bases of 100% homology to a third portion of the human HBB gene, and (v) an RRS (RNA binding protein recognition sequence) that binds a gene modifying protein.
[0063] 34. The gene modifying system of embodiment 33, wherein the gRNA spacer comprises the core nucleotides of a gRNA spacer sequence of Table 1, or a sequence having 1, 2, or 3 substitutions thereto, and optionally comprises one or more consecutive nucleotides starting with the 3′ end of the flanking nucleotides of the gRNA spacer sequence, or wherein the gRNA spacer comprises a gRNA spacer sequence of Table A, Table AA, Table B, Table B1, Tables 5A-5D, Table X4, or Table X4A.
[0064] 35. The gene modifying system of embodiment 33, wherein the heterologous object sequence comprises the core nucleotides of the gRNA spacer sequence of Table 1 that corresponds to the RT template sequence, or a sequence having 1, 2, or 3 substitutions thereto, and optionally comprises one or more consecutive nucleotides starting with the 3′ end of the flanking nucleotides of the gRNA spacer sequence, or wherein the gRNA spacer comprises a gRNA spacer sequence from Table A, Table AA, Table B, Table B1, Tables 5A-5D, Table X4, or Table X4A that corresponds to the RT template sequence, or a sequence having 1, 2, or 3 substitutions thereto.
[0065] 36. The gene modifying system of any one of embodiments 33-35, wherein the PBS sequence has a sequence comprising the core nucleotides of the PBS sequence from the same row of Table 3 as the RT template sequence, or a sequence having 1, 2, or 3 substitutions thereto, and optionally comprises one or more consecutive nucleotides starting with the 5′ end of the flanking nucleotides of the PBS sequence.
[0066] 37. The gene modifying system of any one of embodiments 33-35, wherein the PBS sequence has a sequence comprising the core nucleotides of a PBS sequence of Table 3 that corresponds to the RT template sequence, the gRNA spacer sequence, or both, or a sequence having 1, 2, or 3 substitutions thereto, and optionally comprises one or more consecutive nucleotides starting with the 5′ end of the flanking nucleotides of the PBS sequence, or wherein the PBS sequence comprises a PBS sequence from Table A, Table AA, Table B, Table B1, Tables 5A-5D, Table X4, or Table X4A that corresponds to the the RT template sequence, the gRNA spacer sequence, or both, or a sequence having 1, 2, or 3 substitutions thereto.
[0067] 38. The gene modifying system of any one of embodiments 33-37, wherein the gRNA scaffold comprises a sequence of a gRNA scaffold of Table 12, or a sequence having at least 70%, 75%, 80%, 85%, 90%, 95%, 96%, 97%, 98%, or 99% identity thereto.
[0068] 39. The gene modifying system of any one of embodiments 33-37, wherein the gRNA scaffold comprises a sequence of a gRNA scaffold of Table 12 that corresponds to the RT template sequence, the gRNA spacer sequence, or both, or a sequence having at least 70%, 75%, 80%, 85%, 90%, 95%, 96%, 97%, 98%, or 99% identity thereto.
[0069] 40. A gRNA comprising (i) a gRNA spacer sequence that is complementary to a first portion of the human HBB gene, wherein the gRNA spacer has a sequence comprising the core nucleotides of a gRNA spacer sequence of Table 1, Table 2, or Table 4, or a sequence having 1, 2, or 3 substitutions thereto and optionally comprises one or more consecutive nucleotides starting with the 3′ end of the flanking nucleotides of the gRNA spacer sequence; and (ii) a gRNA scaffold, or wherein the gRNA spacer has a sequence of a gRNA spacer sequence from Table A, Table AA, Table B, Table B1, Tables 5A-5D, Table X4, or Table X4A, or a sequence having 1, 2, or 3 substitutions thereto.
[0070] 41. The gRNA of embodiment 40, wherein the gRNA scaffold comprises a sequence of a gRNA scaffold of Table 12, or a sequence having at least 70%, 75%, 80%, 85%, 90%, 95%, 96%, 97%, 98%, or 99% identity thereto.
[0071] 42. The gRNA of embodiment 40, wherein the gRNA scaffold comprises a sequence of a gRNA scaffold of Table 12 that corresponds to the gRNA spacer sequence, or a sequence having at least 70%, 75%, 80%, 85%, 90%, 95%, 96%, 97%, 98%, or 99% identity thereto.
[0072] 43. A template RNA comprising: (iii) a heterologous object sequence comprising a mutation region to introduce a mutation into a second portion of the human HBB gene, wherein the heterologous object sequence comprises the core nucleotides of an RT template sequence of Table 3, or a sequence having 1, 2, or 3 substitutions thereto, and optionally comprises one or more consecutive nucleotides starting with the 3′ end of the flanking nucleotides of the RT template sequence, or wherein the heterologous object sequence comprises an RT sequence from Table A, Table AA, Table B, Table B1, Tables 5A-5D, Table X4, or Table X4A, or a sequence having 1, 2, or 3 substitutions thereto, and (iv) a PBS sequence comprising at least 5, 6, 7, or 8 bases of 100% homology to a third portion of the human HBB gene.
[0073] 44. The template RNA according to embodiment 43, wherein the PBS sequence has a sequence comprising the core nucleotides of the PBS sequence from the same row of Table 3 as the RT template sequence, or a sequence having 1, 2, or 3 substitutions thereto, and optionally comprises one or more consecutive nucleotides starting with the 5′ end of the flanking nucleotides of the PBS sequence.
[0074] 45. The template RNA according to embodiment 43, wherein the PBS sequence has a sequence comprising the core nucleotides of a PBS sequence of Table 3 that corresponds to the RT template sequence, or a sequence having 1, 2, or 3 substitutions thereto, and optionally comprises one or more consecutive nucleotides starting with the 5′ end of the flanking nucleotides of the PBS sequence, or wherein the PBS sequence has a sequence comprising a PBS sequence from Table A, Table AA, Table B, Table B1, Tables 5A-5D, Table X4, or Table X4A, or a sequence having 1, 2, or 3 substitutions thereto.
[0075] 46. The template RNA according to any one of embodiments 1-16 or 43-45, the gene modifying system of any one of embodiments 26-39, or the gRNA of any one of embodiments 31-33, wherein the mutation introduced by the system is a V6E mutation (e.g., to correct a pathogenic E6V mutation) of the HBB gene.
[0076] 47. The template RNA according to any one of embodiments 1-16 or 43-46 or the gene modifying system of any one of embodiments 36-39 or 46, wherein the pre-edit sequence comprises between about 1 nucleotide to about 35 nucleotides (e.g., comprises about 1-5, 5-10, 10-15, 15-20, 20-25, 25-30, or 30-35 nucleotides) in length.
[0077] 48. The template RNA according to any one of embodiments 1-16 or 43-47 or the gene modifying system of any one of embodiments 36-39, 46, or 47, wherein the mutation region comprises a single nucleotide.
[0078] 49. The template RNA according to any one of embodiments 1-16 or 43-47 or the gene modifying system of any one of embodiments 26-39, 46, or 47, wherein the mutation region is at least two nucleotides in length.
[0079] 50. The template RNA according to any one of embodiments 1-14, 41-45, or 47 or the gene modifying system of any one of embodiments 24-37, 44-45 or 47, wherein the mutation region is up to 32 (e.g., up to 5, 10, 15, 20, 25, 30, or 32) nucleotides in length and comprises one, two, or three sequence differences relative to a second portion of the human HBB gene.
[0080] 51. The template RNA according to any one of embodiments 1-16, 43-47, 49, or 50 or the gene modifying system of any one of embodiments 26-39, 46, 47, 49, or 50, wherein the mutation region comprises two sequences differences relative to a second portion of the human HBB gene.
[0081] 52. The template RNA according to any one of embodiments 1-16, 43-47, or 49-51 or the gene modifying system of any one of embodiments 26-39, 46, 47, or 49-51, wherein the mutation region comprises a first region (e.g., a first nucleotide) designed to correct a pathogenic mutation in the HBB gene and a second region (e.g., a second nucleotide) designed to inactivate a PAM sequence (e.g., a “PAM-kill” mutation exemplified in Table A, AA, B, or B1).
[0082] 53. The template RNA according to any one of embodiments 1-16, 43-51 or the gene modifying system of any one of embodiments 26-39 or 46-51, wherein the mutation region comprises less than 80%, 70%, 60%, 50%, 40%, or 30% identity to corresponding portion of the human HBB gene.
[0083] 54. The template RNA of any one of the preceding embodiments, wherein the template RNA comprises one or more silent mutations (e.g., silent substitutions), e.g., as exemplified in Table 7A, X4, or X4A.
[0084] 55. The template RNA of embodiment 54, wherein the one or more silent mutaitons comprises a silent substitution at the codon encoding the 6th amino acid, counting the initial methionine, of the HBB gene (proline), e.g., to CCC or CCG.
[0085] 56. The template RNA of any of the preceding embodiments, wherein the mutation region comprises a first region designed to correct a pathogenic mutation in the HBB gene and a second region designed to introduce a silent substitution.
[0086] 57. The template RNA of any one of the preceding embodiments, which comprises one or more chemically modified nucleotides.
[0087] 58. A gene modifying system comprising:
   [0088] a template RNA of any of embodiments 1-16, 43-57, or a system of any of embodiments 26-39 or 46-57, and
   [0089] a gene modifying polypeptide, or a nucleic acid (e.g., RNA) encoding the gene modifying polypeptide.
[0090] 59. The gene modifying system of embodiment 58, wherein the gene modifying polypeptide comprises:
   [0091] a reverse transcriptase (RT) domain (e.g., an RT domain from a retrovirus, or a polypeptide domain having at least 75%, 80%, 85%, 90%, 95%, 96%, 97%, 98%, or 99% amino acids sequence identity thereto); and
   [0092] a Cas domain that binds to the target DNA molecule and is heterologous to the RT domain (e.g., a Cas9 domain); and
   [0093] optionally, a linker disposed between the RT domain and the Cas domain.
[0094] 60. The gene modifying system of embodiment 59, wherein:
   [0095] (a) the RT domain comprises:
      [0096] (i) an RT domain of Table 6, or
      [0097] (ii) an RT domain from a murine leukemia virus (MMLV), a porcine endogenous retrovirus (PERV); Avian reticuloendotheliosis virus (AVIRE), a feline leukemia virus (FLV), simian foamy virus (SFV) (e.g., SFV3L), bovine leukemia virus (BLV), Mason-Pfizer monkey virus (MPMV), human foamy virus (HFV), or bovine foamy/syncytial virus (BFV/BSV); or
   [0098] (b) the gene modifying polypeptide comprises an amino acid sequence according to Table C, or a sequence having at least 70%, 75%, 80%, 85%, 90%, 95%, 96%, 97%, 98%, or 99% identity thereto.
[0099] 61. The gene modifying system of embodiment 59 or 60, wherein the Cas domain comprises a Cas domain of Table 7 or Table 8.
[0100] 62. The gene modifying system of any one of embodiments 59-61, wherein the Cas domain:
   [0101] (a) is a Cas9 domain;
   [0102] (b) is a SpCas9 domain, a BlatCas9 domain, a Nme2Cas9 domain, a PnpCas9 domain, a SauCas9 domain, a SauCas9-KKH domain, a SauriCas9 domain, a SauriCas9-KKH domain, a ScaCas9-Sc++domain, a SpyCas9 domain, a SpyCas9-NG domain, a SpyCas9-SpRY domain, or a St1Cas9 domain; and/or
   [0103] (c) is a Cas9 domain comprising an N670A mutation, an N611A mutation, an N605A mutation, an N580A mutation, an N588A mutation, an N872A mutation, an N863 mutation, an N622A mutation, or an H840A mutation.
[0104] 63. The gene modifying system of embodiment 62, wherein the Cas9 domain binds a PAM sequence listed in Table 7 or Table 12.
[0105] 64. The gene modifying system of embodiment 63, wherein a second portion of the human HBB gene overlaps with a PAM recognized by the Cas domain, e.g., wherein the second portion of the human HBB gene is within the PAM or wherein the PAM is within the second portion of the human HBB gene).
[0106] 65. The gene modifying system any one of embodiments 58-64, wherein the gRNA spacer is a gRNA spacer according to Table 1, and the Cas domain comprises a Cas domain listed in the same row of Table 1, or a sequence having at least 70%, 75%, 80%, 85%, 90%, 95%, 96%, 97%, 98%, or 99% identity thereto.
[0107] 66. The gene modifying system of any one of embodiments 58-64, wherein the template RNA comprises a sequence of a template RNA sequence of Table 3, Table A, Table AA, Table B, Table B1, Tables 5A-5D, Table X4, or Table X4A or a sequence having at least 70%, 75%, 80%, 85%, 90%, 95%, 96%, 97%, 98%, or 99% identity thereto.
[0108] 67. The gene modifying system of any one of embodiments 58-66, wherein:
   [0109] (a) the template RNA comprises a sequence of a template RNA sequence of Table 3, Table A, Table AA, Table B, Table B1, Tables 5A-5D, Table X4, or Table X4A;
   [0110] (b) the Cas domain comprises a Cas domain of Table 7 or Table 8;
   [0111] (c) the linker comprises a linker sequence of Table 10 (e.g., of any of SEQ ID NOs: 5217, 5106, 5190, and 5218); and
   [0112] (d) the gene modifying polypeptide comprises one or two NLS sequences from Table 11 (e.g., of any of SEQ ID NOs: 5245, 5290, 5323, 5330, 5349, 5350, 5351, and 4001).
[0113] 68. The gene modifying system of any of embodiments 58-67, which produces a first nick in a first strand of the human HBB gene.
[0114] 69. The gene modifying system of embodiment 68, which further comprises a second strand-targeting gRNA that directs a second nick to the second strand of the human HBB gene.
[0115] 70. The gene modifying system of embodiment 69, wherein the second strand-targeting gRNA comprises:
   [0116] (i) a sequence comprising the core nucleotides of a left gRNA spacer sequence or a right gRNA spacer sequence from Table 2, and optionally comprises one or more consecutive nucleotides starting with the 3′ end of the flanking nucleotides of the left gRNA spacer sequence or right gRNA spacer sequence; or
   [0117] (ii) a second-strand-targeting gRNA comprising a spacer sequence of Table 6A, or a spacer sequence having 1, 2, or 3 substitutions thereto.
[0118] 71. The gene modifying system of embodiment 69, wherein the second strand-targeting gRNA comprises a sequence comprising the core nucleotides of a left gRNA spacer sequence or a right gRNA spacer sequence from Table 2 that corresponds to the gRNA spacer sequence of (i), and optionally comprises one or more consecutive nucleotides starting with the 3′ end of the flanking nucleotides of the left gRNA spacer sequence or right gRNA spacer sequence.
[0119] 72. The gene modifying system of embodiment 69, wherein the second strand-targeting gRNA comprises:
   [0120] (i) a sequence comprising the core nucleotides of a second nick gRNA sequence from Table 4, or a sequence having at least 70%, 75%, 80%, 85%, 90%, 95%, 96%, 97%, 98%, or 99% identity thereto, and optionally comprises one or more consecutive nucleotides starting with the 3′ end of the flanking nucleotides of the second nick gRNA sequence; or
   [0121] (ii) a second-strand-targeting gRNA comprising a spacer sequence from Table 6A or a sequence having at least 70%, 75%, 80%, 85%, 90%, 95%, 96%, 97%, 98%, or 99% identity thereto.
[0122] 73. The gene modifying system of embodiment 69, wherein the second strand-targeting gRNA comprises a sequence comprising the core nucleotides of the second nick gRNA sequence from Table 4 that corresponds to the gRNA spacer sequence of (i), or a sequence having at least 70%, 75%, 80%, 85%, 90%, 95%, 96%, 97%, 98%, or 99% identity thereto, and optionally comprises one or more consecutive nucleotides starting with the 3′ end of the flanking nucleotides of the second nick gRNA sequence.
[0123] 74. The gene modifying system of any one of embodiments 58-73, wherein the second strand-targeting gRNA has a “PAM-in orientation” with the template RNA of the gene modifying system, e.g., as exemplified in Table 4, 6A, X4, or X4A.
[0124] 75. The gene modifying system of any one of embodiments 58-63, the second strand-targeting gRNA targets a sequence overlapping the target mutation of the template RNA.
[0125] 76. The gene modifying system of embodiment 75, wherein second strand-targeting gRNA comprises:
   [0126] (i) a sequence (e.g., a spacer sequence) complementary to the sickle cell mutation;
   [0127] (ii) a sequence (e.g., a spacer sequence) complementary to the wild-type sequence at the sickle cell locus;
   [0128] (iii) a sequence (e.g., a spacer sequence) complementary to the Makassar sequence at the sickle cell locus;
   [0129] (iv) a sequence (e.g., a spacer sequence) complementary to a SNP proximal to the sickle cell locus, e.g., a SNP contained in the genomic DNA of a subject (e.g., a patient);
   [0130] (v) a sequence (e.g., spacer sequence) complementary to or comprising one or more silent substitutions proximal to the sickle cell locus.
[0131] 77. The template RNA, gene modifying system, or gRNA, of any one of the preceding embodiments, wherein the gRNA spacer comprises about 1, 2, 3, or more flanking nucleotides of the gRNA spacer.
[0132] 78. The template RNA or gene modifying system of any one of the preceding embodiments, wherein the heterologous object sequence comprises about 2, 3, 4, 5, 10, 20, 30, 40, or more flanking nucleotides of the RT template sequence.
[0133] 79. The template RNA or gene modifying system, of any one of the preceding embodiments, wherein the heterologous object sequence comprises between about 8-30, 9-25, 10-20, 11-16, or 12-15 (e.g., about 11-16) nucleotides.
[0134] 80. The template RNA or gene modifying system, of any one of the preceding embodiments, wherein the mutation region comprises 1, 2, or 3 nucleotide positions of sequence differences relative to the corresponding portion of the human HBB gene.
[0135] 81. The template RNA or gene modifying system of any one of the preceding embodiments, wherein the mutation region comprises at least 2 nucleotide positions of sequence difference relative to the corresponding portion of the human HBB gene.
[0136] 82. The template RNA or gene modifying system, of any one of the preceding embodiments, wherein the post-edit homology region and/or pre-edit homology region comprises 100% identity to the HBB gene.
[0137] 83. The template RNA or gene modifying system of any one of the preceding embodiments, wherein the PBS sequence additionally comprises about 1, 2, 3, 4, 5, 6, 7, or more flanking nucleotides.
[0138] 84. The template RNA or gene modifying system of any one of the preceding embodiments, wherein the PBS sequence comprises about 5-20, 8-16, 8-14, 8-13, 9-13, 9-12, or 10-12 (e.g., about 9-12) nucleotides.
[0139] 85. The template RNA or gene modifying system of any one of the preceding embodiments, wherein the PBS sequence binds within 1, 2, 3, 4, 5, 6, 7, 8, 9, or 10 nucleotides of a nick site in the HBB gene.
[0140] 86. The gene modifying system of any one of the preceding embodiments, wherein the domains of the gene modifying polypeptide are joined by a peptide linker.
[0141] 87. The gene modifying system of embodiment 86, wherein the linker comprises a sequence of a linker of Table 10 (e.g., of any of SEQ ID NOs: 5217, 5106, 5190, and 5218).
[0142] 88. The gene modifying system of any one of the preceding embodiments, wherein the gene modifying polypeptide further comprise one or more nuclear localization sequences (NLS).
[0143] 89. The gene modifying system of embodiment 88, wherein the gene modifying polypeptide comprises a first NLS and a second NLS.
[0144] 90. The gene modifying system of embodiment 88 or 89, wherein the NLS comprises a sequence of a NLS of Table 11 (e.g., of any of SEQ ID NOs: 5245, 5290, 5323, 5330, 5349, 5350, 5351, and 4001).
[0145] 91. A template RNA comprising a sequence of a template RNA of Table A, Table AA, Table B, Table B1, Tables 5A-5D, Table X4, or Table X4A, or a sequence having at least 70%, 75%, 80%, 85%, 90%, 95%, 96%, 97%, 98%, or 99% identity thereto.
[0146] 92. A template RNA comprising a sequence of a template RNA of Table A, Table AA, Table B, Table B1, Tables 5A-5D, Table X4, or Table X4A.
[0147] 93. A gene modifying system comprising:
   [0148] (i) a template RNA comprising a sequence of a template RNA of Table 4, or a sequence having at least 70%, 75%, 80%, 85%, 90%, 95%, 96%, 97%, 98%, or 99% identity thereto; and
   [0149] (ii) a second-nick gRNA sequence from the same row of Table 4 as (i), a sequence having at least 70%, 75%, 80%, 85%, 90%, 95%, 96%, 97%, 98%, or 99% identity thereto.
[0150] 94 A gene modifying system comprising:
   [0151] (i) a template RNA comprising a sequence of a template RNA of Table 4; and
   [0152] (ii) a second-nick gRNA sequence from the same row of Table 4 as (i).
[0153] 95. A DNA encoding the template RNA of any one of embodiments 1-16, 43-53, 77-85, 91, or 92, or the gRNA of any one of embodiments 40-42.
[0154] 96. A pharmaceutical composition, comprising the system of any one of embodiments 58-90, 93, or 94, or one or more nucleic acids encoding the same, and a pharmaceutically acceptable excipient or carrier.
[0155] 97. The pharmaceutical composition of embodiment 96, wherein the pharmaceutically acceptable excipient or carrier is selected from the group consisting of a plasmid vector, a viral vector, a vesicle, and a lipid nanoparticle.
[0156] 98. The pharmaceutical composition of embodiment 97, wherein the viral vector is an adeno-associated virus.
[0157] 99. A host cell (e.g., a mammalian cell, e.g., a human cell) comprising the template RNA or gene modifying system of any one of the preceding embodiments.
[0158] 100. A method of making the template RNA of any one of embodiments 1-16, 43-53, 77-85, 91, or 92, the method comprising synthesizing the template RNA by in vitro transcription (e.g., solid state synthesis) or by introducing a DNA encoding the template RNA into a host cell under conditions that allow for production of the template RNA.
[0159] 101. A method for modifying a target site in the human HBB gene in a cell, the method comprising contacting the cell with the gene modifying system of any one of embodiments 58-90, 93, or 94, or DNA encoding the same, thereby modifying the target site in the human HBB gene in a cell.
[0160] 102. A method for modifying a target site in the human HBB gene in a cell, the method comprising contacting the cell with: (i) the template RNA of any one of embodiments 58-90, 93, or 94, or DNA encoding the same; and (ii) a gene modifying polypeptide or a nucleic acid encoding a gene modifying polypeptide, thereby modifying the target site in the human HBB gene in a cell.
[0161] 103. A method for treating a subject having a disease or condition associated with a mutation in the human HBB gene, the method comprising administering to the subject the gene modifying system of any one of embodiments 58-90, 93, or 94, or DNA encoding the same, thereby treating the subject having a disease or condition associated with a mutation in the human HBB gene.
[0162] 104. A method for treating a subject having a disease or condition associated with a mutation in the human HBB gene, the method comprising administering to the subject the template RNA of any one of embodiments 58-90, 93, or 94, or DNA encoding the same; and (ii) a gene modifying polypeptide or a nucleic acid encoding a gene modifying polypeptide, thereby treating the subject having a disease or condition associated with a mutation in the human HBB gene.
[0163] 105. The method of embodiment 103 or 104, wherein the disease or condition is sickle cell disease (SCD) (e.g., sickle cell anemia).
[0164] 106. The method of any one of embodiments 103-105, wherein the subject has a pathogenic EV6 mutation.
[0165] 107. A method for treating a subject having SCD the method comprising administering to the subject the gene modifying system of any one of embodiments 58-90, 93, or 94, or DNA encoding the same, thereby treating the subject having SCD.
[0166] 108. A method for treating a subject having SCD the method comprising administering to the subject (i) the template RNA of any one of embodiments 58-90, 93, or 94, or DNA encoding the same, and (ii) a gene modifying polypeptide or a nucleic acid encoding a gene modifying polypeptide, thereby treating the subject having SCD.
[0167] 109. The gene modifying system or method of any one of the preceding embodiments, wherein introduction of the system into a target cell results in a correction of a pathogenic mutation in the HBB gene.
[0168] 110. The gene modifying system or method of any one of the preceding embodiments, wherein the pathogenic mutation is a E6V mutation, and wherein the correction comprises an amino acid substitution of V6E.
[0169] 111. The gene modifying system or method of any of the preceding embodiments, wherein correction of the mutation occurs in at least 30% (e.g., 30%, 40%, 50%, 60%, 70%, or more) of target nucleic acids.
[0170] 112. The gene modifying system or method of any of the preceding embodiments, wherein correction of the mutation occurs in at least 30% (e.g., 30%, 40%, 50%, 60%, 70%, or more) of target cells.
[0171] 113. The gene modifying system or method of any of the preceding embodiments, wherein the gene modifying system comprises a second strand-targeting gRNA, and wherein correction of the mutation in a population of target cells is increased relative to a population of target cells treated with a gene modifying system comprising a template RNA without a second strand-targeting gRNA.
[0172] 114. The gene modifying system or method of any of the preceding embodiments, wherein the template RNA comprises one or more silent substitutions (e.g., as exemplified in Tables 7A, X4, and X4A), and wherein correction of the mutation in a population of target cells is increased relative to a population of target cells treated with a gene modifying system comprising a template RNA that does not comprise one or more silent substitutions.
[0173] 115. The method of any of the preceding embodiments, wherein the cell is a mammalian cell, such as a human cell.
[0174] 116. The method of any one of the preceding embodiments, wherein the subject is a human.
[0175] 117. The method of any of the preceding embodiments, wherein the contacting occurs ex vivo, e.g., wherein the cell's or subject's DNA is modified ex vivo.
[0176] 118. The method of any of the preceding embodiments, wherein the contacting occurs in vivo, e.g., wherein the cell's or subject's DNA is modified in vivo.
[0177] 119. The method of any of the preceding embodiments, wherein contacting the cell or the subject with the system comprises contacting the cell or a cell within the subject with a nucleic acid (e.g., DNA or RNA) encoding the gene modifying polypeptide under conditions that allow for production of the gene modifying polypeptide.
[0178] 120. The method of any of the preceding embodiments, wherein the gRNA spacer is perfectly complementary at all nucleotide positions to the first portion of the human HBB gene in the cell, wherein the first portion is situated on the second strand of the HBB gene.
[0179] 121. The method of any of the preceding embodiments, wherein the heterologous object sequence is perfectly complementary to the second portion of the human HBB gene in the cell, at all nucleotide positions except the mutation region, wherein the second portion is situated on the first strand of the HBB gene.
[0180] 122. The method any of the preceding embodiments, wherein the PBS sequence is perfectly complementary to the third portion of the human HBB gene, wherein the third portion is situated on the first strand of the HBB gene.

### Further Enumerated Embodiments

[0181] A1. A template RNA comprising, from 5′ to 3′:
   [0182] (i) a gRNA spacer that is complementary to a first portion of the human HBB gene, wherein the gRNA spacer has a nucleotide sequence comprising CATGGTGCATCTGACTCCTG (SEQ ID NO: 21668), or a nucleotide sequence having 1 substitution thereto;
   [0183] (ii) a gRNA scaffold that binds a Cas domain of a gene modifying polypeptide,
   [0184] (iii) a heterologous object sequence comprising a mutation region to correct a mutation in a second portion of the human HBB gene, and
   [0185] (iv) a primer binding site (PBS) sequence comprising at least 5 bases with 100% identity to a third portion of the human HBB gene.
[0186] A2. The template RNA of embodiment A1, wherein the gRNA spacer has a nucleotide sequence comprising CATGGTGCATCTGACTCCTG (SEQ ID NO: 21668) or CATGGTGCACCTGACTCCTG (SEQ ID NO: 19249).
[0187] A3. The template RNA of embodiment A1 or A2, wherein the gRNA spacer has a nucleotide sequence consisting of CATGGTGCATCTGACTCCTG (SEQ ID NO: 21668) or CATGGTGCACCTGACTCCTG (SEQ ID NO: 19249).
[0188] A4. The template RNA of any of the preceding embodiments, wherein the gRNA spacer has a length of 20 nucleotides.
[0189] A5. The template RNA of embodiment A1, wherein the gRNA scaffold has a sequence according to GTTTTAGAGCTAGAAATAGCAAGTTAAAATAAGGCTAGTCCGTTATCAACTT GAAAAAGTGGCACCGAGTCGGTGC (SEQ ID NO: 11,012), or a sequence having at least 90% identity thereto.
[0190] A6. The template RNA of embodiment A1, wherein the gRNA scaffold has a sequence according to

(SEQ ID NO: 11,012)
GTTTTAGAGCTAGAAATAGCAAGTTAAAATAAGGCTAGTCCGTTATCAAC
TTGAAAAAGTGGCACCGAGTCGGTGC.

[0191] A7. The template RNA of embodiment A1, wherein the heterologous object sequence comprises a sequence of at least 8 nucleotides from the 3′ end of a sequence according to AGTAACGGCAGACTTCTCTTCAG (SEQ ID NO: 20954), or a sequence having 1, 2, or 3 substitutions thereto.
[0192] A8. The template RNA of embodiment A1, wherein the heterologous object sequence comprises a sequence of 9, 10, 11, 12, 13, 14, 15, 16, 17, 18, 19, 20, 21, 22, or 23 nucleotides from the 3′ end of a sequence according to AGTAACGGCAGACTTCTCTTCAG (SEQ ID NO: 20954), or a sequence having 1, 2, or 3 substitutions thereto.
[0193] A9. The template RNA of embodiment A1, wherein the heterologous object sequence comprises a sequence of at least 8 nucleotides from the 3′ end of a sequence according to AGTAACGGCAGACTTCTCTTCAG (SEQ ID NO: 20954).
[0194] A10. The template RNA of embodiment A1, wherein the heterologous object sequence comprises a sequence of at least 8 nucleotides from the 3′ end of a sequence according to AGTAACGGCAGACTTCTCTGCAG (SEQ ID NO: 20955).
[0195] A11. The template RNA of embodiment A1, wherein the PBS sequence comprises a sequence of at least 8 nucleotides from the 5′ end of a sequence according to GAGTCAGGTGCACCATG (SEQ ID NO: 19431), or a sequence having 1 substitution thereto.
[0196] A12. The template RNA of embodiment A1, wherein the PBS sequence comprises a sequence of at least 8 nucleotides from the 5′ end of a sequence according to GAGTCAGGTGCACCATG (SEQ ID NO: 19431).
[0197] A13. The template RNA of embodiment A1, wherein the PBS sequence comprises a sequence of 9, 10, 11, 12, 13, 14, 15, 16, or 17 nucleotides from the 5′ end of a sequence according to GAGTCAGGTGCACCATG (SEQ ID NO: 19431), or a sequence having 1 substitution thereto.
[0198] A14. The template RNA of embodiment A1, wherein:
   [0199] the gRNA scaffold has a sequence according to GTTTTAGAGCTAGAAATAGCAAGTTAAAATAAGGCTAGTCCGTTATCA ACTTGAAAAAGTGGCACCGAGTCGGTGC (SEQ ID NO: 11,012), or a
   [0200] sequence having at least 90% identity thereto;
   [0201] the heterologous object sequence comprises a sequence of at least 8 nucleotides from the 3′ end of a sequence according to AGTAACGGCAGACTTCTCTTCAG (SEQ ID NO: 20954), or a sequence having 1, 2, or 3 substitutions thereto; and the PBS sequence comprises a sequence of at least 8 nucleotides from the 5′ end of a sequence according to GAGTCAGGTGCACCATG (SEQ ID NO: 19431), or a sequence having 1 substitution thereto.
[0202] A15. The template RNA of embodiment A1, wherein:
   [0203] the gRNA scaffold has a sequence according to

(SEQ ID NO: 11,012)
GTTTTAGAGCTAGAAATAGCAAGTTAAAATAAGGCTAGTCCGTTATCA
ACTTGAAAAAGTGGCACCGAGTCGGTGC.

[0204] wherein the heterologous object sequence comprises a sequence of at least 8 nucleotides from the 3′ end of a sequence according to AGTAACGGCAGACTTCTCTTCAG (SEQ ID NO: 20954); and the PBS sequence comprises a sequence of at least 8 nucleotides from the 5′ end of a sequence according to GAGTCAGGTGCACCATG (SEQ ID NO: 19431).
[0205] A16. The template RNA of any of the preceding embodiments, which does not comprise a sequence according to

(SEQ ID NO: 21997)
GCATGGTGCACCTGACTCCTGGTTTTAGAGCTAGAAATAGCAAGTTAAAA
TAAGGCTAGTCCGTTATCAACTTGAAAAAGTGGCACCGAGTCGGTGCAGA
CTTCTCCACAGGAGTCAGGTGCAC.

[0206] A17. A template RNA comprising, from 5′ to 3′:
   [0207] (i) a gRNA spacer that is complementary to a first portion of the human HBB gene, wherein the gRNA spacer has a nucleotide sequence comprising GTAACGGCAGACTTCTCCAC (SEQ ID NO: 19971), or a nucleotide sequence having 1 substitution thereto;
   [0208] (ii) a gRNA scaffold that binds a Cas domain of a gene modifying polypeptide,
   [0209] (iii) a heterologous object sequence comprising a mutation region to introduce a mutation into a second portion of the human HBB gene, and
   [0210] (iv) a primer binding site (PBS) sequence comprising at least 5 bases with 100% identity to a third portion of the human HBB gene.
[0211] A18. The template RNA of embodiment A17, wherein the gRNA spacer has a nucleotide sequence comprising GTAACGGCAGACTTCTCCAC (SEQ ID NO: 19971).
[0212] A19. The template RNA of embodiment A17 or A18, wherein the gRNA scaffold has a sequence according to GTTTTAGAGCTAGAAATAGCAAGTTAAAATAAGGCTAGTCCGTTATCAACTT GAAAAAGTGGCACCGAGTCGGTGC (SEQ ID NO: 11,012), or a sequence having at least 90% identity thereto.
[0213] A20. The template RNA of any of embodiments A17-19, wherein the gRNA scaffold has a sequence according to

(SEQ ID NO: 11,012)
GTTTTAGAGCTAGAAATAGCAAGTTAAAATAAGGCTAGTCCGTTATCAA
CTTGAAAAAGTGGCACCGAGTCGGTGC.

[0214] A21. The template RNA of any of embodiments A17-20, wherein the heterologous object sequence comprises a sequence of at least 8 nucleotides from the 3′ end of a sequence according to CCATGGTGCACCTGACTCCTGAG (SEQ ID NO: 20956) or CCATGGTGCACCTGACTCCTGCG (SEQ ID NO: 21906), or a sequence having 1, 2, or 3 substitutions thereto.
[0215] A22. The template RNA of any of embodiments A17-21, wherein the heterologous object sequence comprises a sequence of 9, 10, 11, 12, 13, 14, 15, 16, 17, 18, 19, 20, 21, 22, or 23 nucleotides from the 3′ end of a sequence according to CCATGGTGCACCTGACTCCTGAG (SEQ ID NO: 20956) or CCATGGTGCACCTGACTCCTGCG (SEQ ID NO: 21906), or a sequence having 1, 2, or 3 substitutions thereto.
[0216] A23. The template RNA of any of embodiments A17-22, wherein the heterologous object sequence comprises a sequence of at least 8 nucleotides from the 3′ end of a sequence according to CCATGGTGCACCTGACTCCTGAG (SEQ ID NO: 20956) or CCATGGTGCACCTGACTCCTGCG (SEQ ID NO: 21906).
[0217] A24. The template RNA of any of embodiments A17-23, wherein the heterologous object sequence comprises a sequence of 9, 10, 11, 12, 13, 14, 15, 16, 17, 18, 19, 20, 21, 22, or 23 nucleotides from the 3′ end of a sequence according to

(SEQ ID NO: 20956)
CCATGGTGCACCTGACTCCTGAG
or
(SEQ ID NO: 21906)
CCATGGTGCACCTGACTCCTGCG.

[0218] A25. The template RNA of any of embodiments A17-24, wherein the PBS sequence comprises a sequence of at least 8 nucleotides from the 5′ end of a sequence according to GAGAAGTCTGCCGTTAC (SEQ ID NO: 20957), or a sequence having 1 substitution thereto.
[0219] A26. The template RNA of any of embodiments A17-25, wherein the PBS sequence comprises a sequence of at least 8 nucleotides from the 5′ end of a sequence according to GAGAAGTCTGCCGTTAC (SEQ ID NO: 20957).
[0220] A27. The template RNA of any of embodiments A17-26, wherein the PBS sequence comprises a sequence of 9, 10, 11, 12, 13, 14, 15, 16, or 17 nucleotides from the 5′ end of a sequence according to GAGAAGTCTGCCGTTAC (SEQ ID NO: 20957), or a sequence having 1 substitution thereto.
[0221] A28. The template RNA of any of embodiments A17-27, wherein the PBS sequence comprises a sequence of 9, 10, 11, 12, 13, 14, 15, 16, or 17 nucleotides from the 5′ end of a sequence according to GAGAAGTCTGCCGTTAC (SEQ ID NO: 20957).
[0222] A29. The template RNA of any of embodiments A17-28, which does not comprise a sequence according to

(SEQ ID NO: 21998)
GTAACGGCAGACTTCTCCACGTTTTAGAGCTAGAAATAGCAAGTTAAAAT
AAGGCTAGTCCGTTATCAACTTGAAAAAGTGGGACCGAGTCGGTCCGACT
CCTGaGGAGAAGTCTGCC.

[0223] A30. The template RNA of any of the preceding embodiments, wherein the mutation region comprises a single nucleotide.
[0224] A31. The template RNA of any of the preceding embodiments, wherein the mutation region is at least two nucleotides in length.
[0225] A32. The template RNA of any of the preceding embodiments, wherein the mutation region is up to 20 nucleotides in length and comprises one, two, or three sequence differences relative to the second portion of the human HBB gene.
[0226] A33. The template RNA of any of the preceding embodiments, wherein the mutation region comprises a first region designed to correct a pathogenic mutation in the HBB gene and a second region designed to inactivate a PAM sequence.
[0227] A34. The template RNA of any of the preceding embodiments, wherein the mutation region comprises a first region designed to correct a pathogenic mutation in the HBB gene and a second region designed to introduce a silent substitution.
[0228] A35. The template RNA of any of the preceding embodiments, which is configured to edit an E6V mutation in the human HBB gene.
[0229] A36. The template RNA of embodiment A35, which is configured to convert an E6V mutation to glutamine or alanine.
[0230] A37. The template RNA of any of the preceding embodiments, which comprises one or more chemically modified nucleotides.
[0231] A38. A gene modifying system comprising:
   [0232] a template RNA of any of the preceding embodiments, and
   [0233] a gene modifying polypeptide, or a nucleic acid encoding the gene modifying polypeptide.
[0234] A39. The gene modifying system of embodiment A38, wherein the gene modifying polypeptide comprises an RT domain having a sequence according to SEQ ID NO: 8,003, or a sequence having at least 70%, 80%, 85%, 90%, 95%, 98%, or 99% identity thereto.
[0235] A40. The gene modifying system of embodiment A38, wherein the gene modifying polypeptide comprises an RT domain having a sequence according to SEQ ID NO: 8,020, or a sequence having at least 70%, 80%, 85%, 90%, 95%, 98%, or 99% identity thereto.
[0236] A41. The gene modifying system of embodiment A38, wherein the gene modifying polypeptide comprises an RT domain having a sequence according to SEQ ID NO: 8,074, or a sequence having at least 70%, 80%, 85%, 90%, 95%, 98%, or 99% identity thereto.
[0237] A42. The gene modifying system of embodiment A38, wherein the gene modifying polypeptide comprises an RT domain having a sequence according to SEQ ID NO: 8,113, or a sequence having at least 70%, 80%, 85%, 90%, 95%, 98%, or 99% identity thereto.
[0238] A43. The gene modifying system of embodiment A38, wherein the gene modifying polypeptide comprises DNA binding domain having a sequence of a Cas9 nickase comprising an N863A mutation, e.g., a sequence according to SEQ ID NO: 11,096, or a sequence having at least 70%, 80%, 85%, 90%, 95%, 98%, or 99% identity thereto.
[0239] A44. The gene modifying system of embodiment A38, which produces a first nick in a first strand of the human HBB gene.
[0240] A45. The gene modifying system of embodiment A44, which further comprises a second strand-targeting gRNA that directs a second nick to the second strand of the human HBB gene.
[0241] A46. The gene modifying system of embodiment A45, wherein the first nick and the second nick are 80-120 nucleotides apart.
[0242] A47. The gene modifying system of embodiment A45, wherein the template RNA and the second strand-targeting gRNA are configured to produce an outward nick orientation.
[0243] A48. The gene modifying system of embodiment A45, wherein the second strand-targeting gRNA comprises a spacer sequence that is complementary to a human HBB gene having a sickle cell disease mutation, a wild-type sequence, or a Makassar variant.
[0244] A49. A method for modifying a target site in the human HBB gene in a cell, the method comprising contacting the cell with the gene modifying system of embodiment 38, thereby modifying the target site in the human HBB gene in a cell.
[0245] A50. The method of embodiment A49, wherein correction of the mutation occurs in at least 30% of target nucleic acids.
[0246] A51. A method for treating a subject having a disease or condition associated with a mutation in the human HBB gene, wherein the disease or condition is sickle cell disease (SCD), the method comprising administering to the subject the gene modifying system of embodiment 38, thereby treating the subject having a disease or condition associated with a mutation in the human HBB gene.
[0247] A52. A template RNA comprising, from 5′ to 3′:
   [0248] (i) a gRNA spacer that is complementary to a first portion of the human HBB gene, wherein the gRNA spacer has a nucleotide sequence comprising the core nucleotides of a gRNA spacer sequence of Table 1, and optionally comprises one or more consecutive nucleotides starting with the 3′ end of the flanking nucleotides of the gRNA spacer, or a nucleotide sequence having 1, 2, or 3 substitutions thereto;
   [0249] (ii) a gRNA scaffold that binds a Cas domain of a gene modifying polypeptide,
   [0250] (iii) a heterologous object sequence comprising a mutation region to correct a mutation in a second portion of the human HBB gene, and
   [0251] (iv) a primer binding site (PBS) sequence comprising at least 5 bases with 100% identity to a third portion of the human HBB gene.

### BRIEF DESCRIPTION OF THE DRAWINGS

[0252] The patent or application file contains at least one drawing executed in color. Copies of this patent or patent application publication with color drawing(s) will be provided by the Office upon request and payment of the necessary fee.

[0253] FIG. 1 depicts a gene modifying system as described herein. The left hand diagram shows the gene modifying polypeptide, which comprises a Cas nickase domain (e.g., spCas9 N863A) and a reverse transcriptase domain (RT domain) which are linked by a linker. The right hand diagram shows the template RNA which comprises, from 5′ to 3′, a gRNA spacer, a gRNA scaffold, a heterologous object sequence, and a primer binding site sequence (PBS sequence). The heterologous object sequence can comprise a mutation region that comprises one or more sequence differences relative to the target site. The heterologous object sequence can also comprise a pre-edit homology region and a post-edit homology region, which flank the mutation region. Without wishing to be bound by theory, it is thought that the gRNA spacer of the template RNA binds to the second strand of a target site in the genome, and the gRNA scaffold of the template RNA binds to the gene modifying polypeptide, e.g., localizing the gene modifying polypeptide to the target site in the genome. It is thought that the Cas domain of the gene modifying polypeptide nicks the target site (e.g., the first strand of the target site), e.g., allowing the PBS sequence to bind to a sequence adjacent to the site to be altered on the first strand of the target site. It is thought that the RT domain of the gene modifying polypeptide uses the first strand of the target site that is bound to the complementary sequence comprising the PBS sequence of the template RNA as a primer and the heterologous object sequence of the template RNA as a template to, e.g., polymerize a sequence complementary to the heterologous object sequence. Without wishing to be bound by theory, it is thought that reverse transcription can then proceed through the pre-edit homology region, then through the mutation region, and then through the post-edit homology region, thereby producing a DNA strand comprising a mutation specified by the heterologous object sequence.

[0254] FIG. 2 is a pair of graphs showing rewrite levels in 293T cells (left panel) and CD34+primary human HSCs following transfection of gene modifying systems comprising a gene modifying polypeptides various template RNAs.

[0255] FIG. 3 is a pair of graphs showing rewrite levels in 293T cells (left panel) and CD34+primary human HSCs following transfection of gene modifying systems comprising a gene modifying polypeptides various template RNAs.

[0256] FIG. 4 is a graph showing the percent editing in primary human fibroblasts following electroporation with a gene modifying system comprising tgRNA14 with or without a second nick.

[0257] FIG. 5 is a graph showing percent editing in wild type human primary fibroblasts (to install the Makassar mutation) and sickle human primary fibroblasts (to install the wild-type sequence) following electroporation with a gene modifying system comprising tgRNA14 with or without a second nick.

[0258] FIG. 6 is a graph showing the percent rewriting achieved using the RNAV209-013 or RNAV214-040 gene modifying polypeptides with the indicated template RNAs.

[0259] FIG. 7 is a graph showing the amount of Fah mRNA relative to wild type when template RNAs are used with the RNAV209-013 or RNAV214-040 gene modifying polypeptides.

[0260] FIG. 8 is a graph showing the percentage of Cas9-positive hepatocytes 6 hours following dosing with LNPs containing various gene modifying polypeptides and template RNAs.

[0261] FIG. 9 is a graph showing the rewrite levels in liver samples 6 days following dosing with LNPs containing various gene modifying polypeptides and template RNAs.

[0262] FIG. 10 is a graph showing wild type Fah mRNA restoration compared to littermate heterozygous mice in liver samples following dosing with LNPs containing various gene modifying polypeptides and template RNAs.

[0263] FIG. 11 is a graph showing Fah protein distribution in liver samples following dosing with LNPs containing various gene modifying polypeptides and template RNAs.

[0264] FIG. 12 is a series of western blots showing Cas9-RT Expression 6 hours after infusion of Cas9-RT mRNA+TTR guide LNP. Each lane represents an individual animal where 20 ug of tissue homogenate was added per lane. Positive control was from an in vitro cell experiment where Cas9-RT was expressed (described previously). GAPDH was used as a loading control for each sample. n-4 per group, vehicle or treated.

[0265] FIG. 13 is a graph showing gene editing of TTR locus after treatment with Cas9-RT mRNA+TTR guide LNP. Level of indels detected at the TTR locus measured by TIDE analysis of Sanger sequencing of the TTR locus where the protospacer targets.

[0266] FIG. 14 is a graph showing that TTR Serum levels decrease after treatment with Cas9-RT mRNA+TTR guide LNP. Measurement of circulating TTR levels 5 days after mice were treated with LNPs encapsulating Cas9-RT+TTR guide RNA.

[0267] FIG. 15 is a graph showing Cas9-RT Expression after infusion of Cas9-RT mRNA+TTR guide LNP. Relative expression quantified by ProteinSimple Jess capillary electrophoresis Western blot. Numbers in the symbols are animal number in group. Vehicle n=2, Cas9-RT+TTR guide n=3.

[0268] FIG. 16 is a graph showing gene editing of TTR locus after infusion of Cas9-RT mRNA+TTR guide LNP. Level of indels detected at the TTR locus were measured by amplicon sequencing of the TTR locus where the protospacer targets. Each animal had 8 different biopsies taken across the liver where amplicon sequencing measured the percentage of reads showing an indel.

[0269] FIG. 17 is a graph showing average perfect rewrite levels in primary human HSCs following transfection with various gene modifying polypeptides and template RNAs.

[0270] FIGS. 18A and 18B are graphs showing average perfect rewrite levels in primary human HSCs following transfection with various gene modifying polypeptides and template RNAs comprising an HBB5 spacer (FIG. 18A) or an HBB8 spacer (FIG. 18B).

[0271] FIGS. 19A and 19B are a heatmap (FIG. 19A) and graph (FIG. 19B) showing average perfect rewrite levels in primary human HSCs following transfection with various gene modifying polypeptides and template RNAs comprising an HBB5 spacer (FIG. 19A) or an HBB8 spacer (FIG. 19B).

[0272] FIGS. 20A-20C are graphs showing average perfect rewrite levels in primary human HSCs following transfection with various gene modifying polypeptides and template RNAs comprising an HBB5 spacer (FIGS. 20A and 20C) or an HBB8 spacer (FIG. 20B).

[0273] FIGS. 21A and 21B are a pair of graphs showing perfect rewrite levels in primary human HSCs (FIG. 21A) and HSC subpopulation percentages (FIG. 21B) following transfection with various gene modifying polypeptides and template RNAs.

[0274] FIGS. 22A and 22B are graphs showing perfect rewrite levels in primary human HSCs subpopulations following transfection with various gene modifying polypeptides and template RNAs.

[0275] FIGS. 23A-23C are graphs showing total colony number (FIG. 23A), colony number (FIG. 23B), and percent enucleated CD235+ cells (FIG. 23C) following transfection with various gene modifying polypeptides and template RNAs.

### DETAILED DESCRIPTION

### Definitions

[0276] The term “expression cassette,” as used herein, refers to a nucleic acid construct comprising nucleic acid elements sufficient for the expression of the nucleic acid molecule of the instant invention.

[0277] A “gRNA spacer”, as used herein, refers to a portion of a nucleic acid that has complementarity to a target nucleic acid and can, together with a gRNA scaffold, target a Cas protein to the target nucleic acid.

[0278] A “gRNA scaffold”, as used herein, refers to a portion of a nucleic acid that can bind a Cas protein and can, together with a gRNA spacer, target the Cas protein to the target nucleic acid. In some embodiments, the gRNA scaffold comprises a crRNA sequence, tetraloop, and tracrRNA sequence.

[0279] A “gene modifying polypeptide”, as used herein, refers to a polypeptide comprising a retroviral reverse transcriptase, or a polypeptide comprising an amino acid sequence having at least 75%, 80%, 85%, 90%, 95%, 96%, 97%, 98%, or 99% amino acid sequence identity to a retroviral reverse transcriptase, which is capable of integrating a nucleic acid sequence (e.g., a sequence provided on a template nucleic acid) into a target DNA molecule (e.g., in a mammalian host cell, such as a genomic DNA molecule in the host cell). In some embodiments, the gene modifying polypeptide is capable of integrating the sequence substantially without relying on host machinery. In some embodiments, the gene modifying polypeptide integrates a sequence into a random position in a genome, and in some embodiments, the gene modifying polypeptide integrates a sequence into a specific target site. In some embodiments, a gene modifying polypeptide includes one or more domains that, collectively, facilitate 1) binding the template nucleic acid, 2) binding the target DNA molecule, and 3) facilitate integration of the at least a portion of the template nucleic acid into the target DNA. Gene modifying polypeptides include both naturally occurring polypeptides as well as engineered variants of the foregoing, e.g., having one or more amino acid substitutions to the naturally occurring sequence. Gene modifying polypeptides also include heterologous constructs, e.g., where one or more of the domains recited above are heterologous to each other, whether through a heterologous fusion (or other conjugate) of otherwise wild-type domains, as well as fusions of modified domains, e.g., by way of replacement or fusion of a heterologous sub-domain or other substituted domain. Exemplary gene modifying polypeptides, and systems comprising them and methods of using them, that can be used in the methods provided herein are described, e.g., in

[0280] PCT/US2021/020948, which is incorporated herein by reference with respect to gene modifying polypeptides that comprise a retroviral reverse transcriptase domain. In some embodiments, a gene modifying polypeptide integrates a sequence into a gene. In some embodiments, a gene modifying polypeptide integrates a sequence into a sequence outside of a gene. A “gene modifying system,” as used herein, refers to a system comprising a gene modifying polypeptide and a template nucleic acid.

[0281] The term “domain” as used herein refers to a structure of a biomolecule that contributes to a specified function of the biomolecule. A domain may comprise a contiguous region (e.g., a contiguous sequence) or distinct, non-contiguous regions (e.g., non-contiguous sequences) of a biomolecule. Examples of protein domains include, but are not limited to, an endonuclease domain, a DNA binding domain, a reverse transcription domain; an example of a domain of a nucleic acid is a regulatory domain, such as a transcription factor binding domain. In some embodiments, a domain (e.g., a Cas domain) can comprise two or more smaller domains (e.g., a DNA binding domain and an endonuclease domain).

[0282] As used herein, the term “exogenous”, when used with reference to a biomolecule (such as a nucleic acid sequence or polypeptide) means that the biomolecule was introduced into a host genome, cell or organism by the hand of man. For example, a nucleic acid that is as added into an existing genome, cell, tissue or subject using recombinant DNA techniques or other methods is exogenous to the existing nucleic acid sequence, cell, tissue or subject.

[0283] As used herein, “first strand” and “second strand”, as used to describe the individual DNA strands of target DNA, distinguish the two DNA strands based upon which strand the reverse transcriptase domain initiates polymerization, e.g., based upon where target primed synthesis initiates. The first strand refers to the strand of the target DNA upon which the reverse transcriptase domain initiates polymerization, e.g., where target primed synthesis initiates. The second strand refers to the other strand of the target DNA. First and second strand designations do not describe the target site DNA strands in other respects; for example, in some embodiments the first and second strands are nicked by a polypeptide described herein, but the designations ‘first’ and ‘second’ strand have no bearing on the order in which such nicks occur.

[0284] The term “heterologous,” as used herein to describe a first element in reference to a second element means that the first element and second element do not exist in nature disposed as described. For example, a heterologous polypeptide, nucleic acid molecule, construct or sequence refers to (a) a polypeptide, nucleic acid molecule or portion of a polypeptide or nucleic acid molecule sequence that is not native to a cell in which it is expressed, (b) a polypeptide or nucleic acid molecule or portion of a polypeptide or nucleic acid molecule that has been altered or mutated relative to its native state, or (c) a polypeptide or nucleic acid molecule with an altered expression as compared to the native expression levels under similar conditions. For example, a heterologous regulatory sequence (e.g., promoter, enhancer) may be used to regulate expression of a gene or a nucleic acid molecule in a way that is different than the gene or a nucleic acid molecule is normally expressed in nature. In another example, a heterologous domain of a polypeptide or nucleic acid sequence (e.g., a DNA binding domain of a polypeptide or nucleic acid encoding a DNA binding domain of a polypeptide) may be disposed relative to other domains or may be a different sequence or from a different source, relative to other domains or portions of a polypeptide or its encoding nucleic acid. In certain embodiments, a heterologous nucleic acid molecule may exist in a native host cell genome, but may have an altered expression level or have a different sequence or both. In other embodiments, heterologous nucleic acid molecules may not be endogenous to a host cell or host genome but instead may have been introduced into a host cell by transformation (e.g., transfection, electroporation), wherein the added molecule may integrate into the host genome or can exist as extra-chromosomal genetic material either transiently (e.g., mRNA) or semi-stably for more than one generation (e.g., episomal viral vector, plasmid or other self-replicating vector).

[0285] As used herein, “insertion” of a sequence into a target site refers to the net addition of DNA sequence at the target site, e.g., where there are new nucleotides in the heterologous object sequence with no cognate positions in the unedited target site. In some embodiments, a nucleotide alignment of the PBS sequence and heterologous object sequence to the target nucleic acid sequence would result in an alignment gap in the target nucleic acid sequence.

[0286] As used herein, a “deletion” generated by a heterologous object sequence in a target site refers to the net deletion of DNA sequence at the target site, e.g., where there are nucleotides in the unedited target site with no cognate positions in the heterologous object sequence. In some embodiments, a nucleotide alignment of the PBS sequence and heterologous object sequence to the target nucleic acid sequence would result in an alignment gap in the molecule comprising the PBS sequence and heterologous object sequence.

[0287] The term “inverted terminal repeats” or “ITRs” as used herein refers to AAV viral cis-elements named so because of their symmetry. These elements promote efficient multiplication of an AAV genome. It is hypothesized that the minimal elements for ITR function are a Rep-binding site (RBS; 5′-GCGCGCTCGCTCGCTC-3′ for AAV2; SEQ ID NO: 4601) and a terminal resolution site (TRS; 5′-AGTTGG-3′ for AAV2) plus a variable palindromic sequence allowing for hairpin formation. According to the present invention, an ITR comprises at least these three elements (RBS, TRS, and sequences allowing the formation of an hairpin). In addition, in the present invention, the term “ITR” refers to ITRs of known natural AAV serotypes (e.g. ITR of a serotype 1, 2, 3, 4, 5, 6, 7, 8, 9, 10 or 11 AAV), to chimeric ITRs formed by the fusion of ITR elements derived from different serotypes, and to functional variants thereof. “Functional variant” refers to a sequence presenting a sequence identity of at least 80%, 85%, 90%, preferably of at least 95% with a known ITR and allowing multiplication of the sequence that includes said ITR in the presence of Rep proteins.

[0288] The term “mutation region,” as used herein, refers to a region in a template RNA having one or more sequence difference relative to the corresponding sequence in a target nucleic acid. The sequence difference may comprise, for example, a substitution, insertion, frameshift, or deletion.

[0289] The term “mutated” when applied to nucleic acid sequences means that nucleotides in a nucleic acid sequence are inserted, deleted, or changed compared to a reference (e.g., native) nucleic acid sequence. A single alteration may be made at a locus (a point mutation), or multiple nucleotides may be inserted, deleted, or changed at a single locus. In addition, one or more alterations may be made at any number of loci within a nucleic acid sequence. A nucleic acid sequence may be mutated by any method known in the art.

[0290] “Nucleic acid molecule” refers to both RNA and DNA molecules including, without limitation, complementary DNA (“cDNA”), genomic DNA (“gDNA”), and messenger RNA (“mRNA”), and also includes synthetic nucleic acid molecules, such as those that are chemically synthesized or recombinantly produced, such as RNA templates, as described herein. The nucleic acid molecule can be double-stranded or single-stranded, circular, or linear. If single-stranded, the nucleic acid molecule can be the sense strand or the antisense strand. Unless otherwise indicated, and as an example for all sequences described herein under the general format “SEQ ID NO:,” or “nucleic acid comprising SEQ ID NO: 1” refers to a nucleic acid, at least a portion which has either (i) the sequence of SEQ ID NO:1, or (ii) a sequence complimentary to SEQ ID NO:1. The choice between the two is dictated by the context in which SEQ ID NO: 1 is used. For instance, if the nucleic acid is used as a probe, the choice between the two is dictated by the requirement that the probe be complementary to the desired target. Nucleic acid sequences of the present disclosure may be modified chemically or biochemically or may contain non-natural or derivatized nucleotide bases, as will be readily appreciated by those of skill in the art. Such modifications include, for example, labels, methylation, substitution of one or more naturally occurring nucleotides with an analog, inter-nucleotide modifications such as uncharged linkages (for example, methyl phosphonates, phosphotriesters, phosphoramidates, carbamates, etc.), charged linkages (for example, phosphorothioates, phosphorodithioates, etc.), pendant moieties, (for example, polypeptides), intercalators (for example, acridine, psoralen, etc.), chelators, alkylators, and modified linkages (for example, alpha anomeric nucleic acids, etc.). Also included are chemically modified bases (see, for example, Table 13), backbones (see, for example, Table 14), and modified caps (see, for example, Table 15). Also included are synthetic molecules that mimic polynucleotides in their ability to bind to a designated sequence via hydrogen bonding and other chemical interactions.

[0291] Such molecules are known in the art and include, for example, those in which peptide linkages substitute for phosphate linkages in the backbone of a molecule, e.g., peptide nucleic acids (PNAs). Other modifications can include, for example, analogs in which the ribose ring contains a bridging moiety or other structure such as modifications found in “locked” nucleic acids (LNAs). In various embodiments, the nucleic acids are in operative association with additional genetic elements, such as tissue-specific expression-control sequence(s) (e.g., tissue-specific promoters and tissue-specific microRNA recognition sequences), as well as additional elements, such as inverted repeats (e.g., inverted terminal repeats, such as elements from or derived from viruses, e.g., AAV ITRs) and tandem repeats, inverted repeats/direct repeats, homology regions (segments with various degrees of homology to a target DNA), untranslated regions (UTRs) (5′, 3′, or both 5′ and 3′ UTRs), and various combinations of the foregoing. The nucleic acid elements of the systems provided by the invention can be provided in a variety of topologies, including single-stranded, double-stranded, circular, linear, linear with open ends, linear with closed ends, and particular versions of these, such as doggybone DNA (dbDNA), closed-ended DNA (ceDNA).

[0292] As used herein, a “gene expression unit” is a nucleic acid sequence comprising at least one regulatory nucleic acid sequence operably linked to at least one effector sequence. A first nucleic acid sequence is operably linked with a second nucleic acid sequence when the first nucleic acid sequence is placed in a functional relationship with the second nucleic acid sequence. For instance, a promoter or enhancer is operably linked to a coding sequence if the promoter or enhancer affects the transcription or expression of the coding sequence. Operably linked DNA sequences may be contiguous or non-contiguous. Where necessary to join two protein-coding regions, operably linked sequences may be in the same reading frame.

[0293] The terms “host genome” or “host cell”, as used herein, refer to a cell and/or its genome into which protein and/or genetic material has been introduced. It should be understood that such terms are intended to refer not only to the particular subject cell and/or genome, but to the progeny of such a cell and/or the genome of the progeny of such a cell. Because certain modifications may occur in succeeding generations due to either mutation or environmental influences, such progeny may not, in fact, be identical to the parent cell, but are still included within the scope of the term “host cell” as used herein. A host genome or host cell may be an isolated cell or cell line grown in culture, or genomic material isolated from such a cell or cell line, or may be a host cell or host genome which composing living tissue or an organism. In some instances, a host cell may be an animal cell or a plant cell, e.g., as described herein. In certain instances, a host cell may be a mammalian cell, a human cell, avian cell, reptilian cell, bovine cell, horse cell, pig cell, goat cell, sheep cell, chicken cell, or turkey cell. In certain instances, a host cell may be a corn cell, soy cell, wheat cell, or rice cell.

[0294] As used herein, “operative association” describes a functional relationship between two nucleic acid sequences, such as a 1) promoter and 2) a heterologous object sequence, and means, in such example, the promoter and heterologous object sequence (e.g., a gene of interest) are oriented such that, under suitable conditions, the promoter drives expression of the heterologous object sequence. For instance, a template nucleic acid carrying a promoter and a heterologous object sequence may be single-stranded, e.g., either the (+) or (−) orientation. An “operative association” between the promoter and the heterologous object sequence in this template means that, regardless of whether the template nucleic acid will be transcribed in a particular state, when it is in the suitable state (e.g., is in the (+) orientation, in the presence of required catalytic factors, and NTPs, etc.), it is accurately transcribed. Operative association applies analogously to other pairs of nucleic acids, including other tissue-specific expression control sequences (such as enhancers, repressors and microRNA recognition sequences), IR/DR, ITRs, UTRs, or homology regions and heterologous object sequences or sequences encoding a retroviral RT domain.

[0295] The term “primer binding site sequence” or “PBS sequence,” as used herein, refers to a portion of a template RNA capable of binding to a region comprised in a target nucleic acid sequence. In some instances, a PBS sequence is a nucleic acid sequence comprising at least 3, 4, 5, 6, 7, or 8 bases with 100% identity to the region comprised in the target nucleic acid sequence. In some embodiments the primer region comprises at least 5, 6, 7, 8 bases with 100% identity to the region comprised in the target nucleic acid sequence. Without wishing to be bound by theory, in some embodiments when a template RNA comprises a PBS sequence and a heterologous object sequence, the PBS sequence binds to a region comprised in a target nucleic acid sequence, allowing a reverse transcriptase domain to use that region as a primer for reverse transcription, and to use the heterologous object sequence as a template for reverse transcription.

[0296] As used herein, a “stem-loop sequence” refers to a nucleic acid sequence (e.g., RNA sequence) with sufficient self-complementarity to form a stem-loop, e.g., having a stem comprising at least two (e.g., 3, 4, 5, 6, 7, 8, 9, or 10) base pairs, and a loop with at least three (e.g., four) base pairs. The stem may comprise mismatches or bulges.

[0297] As used herein, a “tissue-specific expression-control sequence” means nucleic acid elements that increase or decrease the level of a transcript comprising the heterologous object sequence in a target tissue in a tissue-specific manner, e.g., preferentially in on-target tissue(s), relative to off-target tissue(s). In some embodiments, a tissue-specific expression-control sequence preferentially drives or represses transcription, activity, or the half-life of a transcript comprising the heterologous object sequence in the target tissue in a tissue-specific manner, e.g., preferentially in an on-target tissue(s), relative to an off-target tissue(s). Exemplary tissue-specific expression-control sequences include tissue-specific promoters, repressors, enhancers, or combinations thereof, as well as tissue-specific microRNA recognition sequences. Tissue specificity refers to on-target (tissue(s) where expression or activity of the template nucleic acid is desired or tolerable) and off-target (tissue(s) where expression or activity of the template nucleic acid is not desired or is not tolerable). For example, a tissue-specific promoter drives expression preferentially in on-target tissues, relative to off-target tissues. In contrast, a microRNA that binds the tissue-specific microRNA recognition sequences is preferentially expressed in off-target tissues, relative to on-target tissues, thereby reducing expression of a template nucleic acid in off-target tissues. Accordingly, a promoter and a microRNA recognition sequence that are specific for the same tissue, such as the target tissue, have contrasting functions (promote and repress, respectively, with concordant expression levels, i.e., high levels of the microRNA in off-target tissues and low levels in on-target tissues, while promoters drive high expression in on-target tissues and low expression in off-target tissues) with regard to the transcription, activity, or half-life of an associated sequence in that tissue.

### Table of Contents

[0298] 1) Introduction

[0299] 2) Gene modifying systems
[0300] a) Polypeptide components of gene modifying systems
   [0301] i) Writing domain
   [0302] ii) Endonuclease domains and DNA binding domains
      [0303] (1) Gene modifying polypeptides comprising Cas domains
      [0304] (2) TAL Effectors and Zinc Finger Nucleases
   [0305] iii) Linkers
   [0306] iv) Localization sequences for gene modifying systems
   [0307] v) Evolved Variants of Gene Modifying Polypeptides and Systems
   [0308] vi) Inteins
   [0309] vii) Additional domains
[0310] b) Template nucleic acids
   [0311] i) gRNA spacer and gRNA scaffold
   [0312] ii) Heterologous object sequence
   [0313] iii) PBS sequence
   [0314] iv) Exemplary Template Sequences
[0315] c) gRNAs with inducible activity
[0316] d) Circular RNAs and Ribozymes in Gene Modifying Systems
[0317] e) Target Nucleic Acid Site
[0318] f) Second strand nicking

[0319] 3) Production of Compositions and Systems

[0320] 4) Therapeutic Applications

[0321] 5) Administration and Delivery
[0322] a) Tissue Specific Activity/Administration
   [0323] i) Promoters
   [0324] ii) microRNAs
[0325] b) Viral vectors and components thereof
[0326] c) AAV Administration
[0327] d) Lipid Nanoparticles

[0328] 6) Kits, Articles of Manufacture, and Pharmaceutical Compositions

[0329] 7) Chemistry, Manufacturing, and Controls (CMC)

### Introduction

[0330] This disclosure relates to methods for treating sickle cell disease (SCD) and compositions for targeting, editing, modifying or manipulating a DNA sequence (e.g., inserting a heterologous object sequence into a target site of a mammalian genome) at one or more locations in a DNA sequence in a cell, tissue or subject, e.g., in vivo or in vitro. The heterologous object DNA sequence may include, e.g., a substitution.

[0331] More specifically, the disclosure provides methods for treating SCD using reverse transcriptase-based systems for altering a genomic DNA sequence of interest, e.g., by inserting, deleting, or substituting one or more nucleotides into/from the sequence of interest.

[0332] The disclosure provides, in part, methods for treating SCD using a gene modifying system comprising a gene modifying polypeptide component and a template nucleic acid (e.g., template RNA) component. In some embodiments, a gene modifying system can be used to introduce an alteration into a target site in a genome. In some embodiments, the gene modifying polypeptide component comprises a writing domain (e.g., a reverse transcriptase domain), a DNA-binding domain, and an endonuclease domain (e.g., nickase domain). In some embodiments, the template nucleic acid (e.g., template RNA) comprises a sequence (e.g., a gRNA spacer) that binds a target site in the genome (e.g., that binds to a second strand of the target site), a sequence (e.g., a gRNA scaffold) that binds the gene modifying polypeptide component, a heterologous object sequence, and a PBS sequence. Without wishing to be bound by theory, it is thought that the template nucleic acid (e.g., template RNA) binds to the second strand of a target site in the genome, and binds to the gene modifying polypeptide component (e.g., localizing the polypeptide component to the target site in the genome). It is thought that the endonuclease (e.g., nickase) of the gene modifying polypeptide component cuts the target site (e.g., the first strand of the target site), e.g., allowing the PBS sequence to bind to a sequence adjacent to the site to be altered on the first strand of the target site. It is thought that the writing domain (e.g., reverse transcriptase domain) of the polypeptide component uses the first strand of the target site that is bound to the complementary sequence comprising the PBS sequence of the template nucleic acid as a primer and the heterologous object sequence of the template nucleic acid as a template to, e.g., polymerize a sequence complementary to the heterologous object sequence. Without wishing to be bound by theory, it is thought that selection of an appropriate heterologous object sequence can result in substitution, deletion, and/or insertion of one or more nucleotides at the target site.

### Gene Modifying Systems

[0333] In some embodiments, a gene modifying system described herein comprises: (A) a gene modifying polypeptide or a nucleic acid encoding the gene modifying polypeptide, wherein the gene modifying polypeptide comprises (i) a reverse transcriptase domain, and either (x) an endonuclease domain that contains DNA binding functionality or (y) an endonuclease domain and separate DNA binding domain; and (B) a template RNA. A gene modifying polypeptide, in some embodiments, acts as a substantially autonomous protein machine capable of integrating a template nucleic acid sequence into a target DNA molecule (e.g., in a mammalian host cell, such as a genomic DNA molecule in the host cell), substantially without relying on host machinery. For example, the gene modifying protein may comprise a DNA-binding domain, a reverse transcriptase domain, and an endonuclease domain. In some embodiments, the DNA-binding function may involve an RNA component that directs the protein to a DNA sequence, e.g., a gRNA spacer. In other embodiments, the gene modifying polypeptide may comprise a reverse transcriptase domain and an endonuclease domain. The RNA template element of a gene modifying system is typically heterologous to the gene modifying polypeptide element and provides an object sequence to be inserted (reverse transcribed) into the host genome. In some embodiments, the gene modifying polypeptide is capable of target primed reverse transcription. In some embodiments, the gene modifying polypeptide is capable of second-strand synthesis.

[0334] In some embodiments the gene modifying system is combined with a second polypeptide. In some embodiments, the second polypeptide may comprise an endonuclease domain. In some embodiments, the second polypeptide may comprise a polymerase domain, e.g., a reverse transcriptase domain. In some embodiments, the second polypeptide may comprise a DNA-dependent DNA polymerase domain. In some embodiments, the second polypeptide aids in completion of the genome edit, e.g., by contributing to second-strand synthesis or DNA repair resolution.

[0335] A functional gene modifying polypeptide can be made up of unrelated DNA binding, reverse transcription, and endonuclease domains. This modular structure allows combining of functional domains, e.g., dCas9 (DNA binding), MMLV reverse transcriptase (reverse transcription), FokI (endonuclease). In some embodiments, multiple functional domains may arise from a single protein, e.g., Cas9 or Cas9 nickase (DNA binding, endonuclease).

[0336] In some embodiments, a gene modifying polypeptide includes one or more domains that, collectively, facilitate 1) binding the template nucleic acid, 2) binding the target DNA molecule, and 3) facilitate integration of the at least a portion of the template nucleic acid into the target DNA. In some embodiments, the gene modifying polypeptide is an engineered polypeptide that comprises one or more amino acid substitutions to a corresponding naturally occurring sequence. In some embodiments, the gene modifying polypeptide comprises two or more domains that are heterologous relative to each other, e.g., through a heterologous fusion (or other conjugate) of otherwise wild-type domains, or well as fusions of modified domains, e.g., by way of replacement or fusion of a heterologous sub-domain or other substituted domain. For instance, in some embodiments, one or more of: the RT domain is heterologous to the DBD; the DBD is heterologous to the endonuclease domain; or the RT domain is heterologous to the endonuclease domain.

[0337] In some embodiments, a template RNA molecule for use in the system comprises, from 5′ to 3′ (1) a gRNA spacer; (2) a gRNA scaffold; (3) heterologous object sequence (4) a primer binding site (PBS) sequence. In some embodiments:
[0338] (1) Is a gRNA spacer of ˜18-22 nt, e.g., is 20 nt
[0339] (2) Is a gRNA scaffold comprising one or more hairpin loops, e.g., 1, 2, of 3 loops for associating the template with a Cas domain, e.g., a nickase Cas9 domain. In some embodiments, the gRNA scaffold comprises the sequence, from 5′ to 3′,

(SEQ ID NO: 5008)
GTTTTAGAGCTAGAAATAGCAAGTTAAAATAAGGCTAGTCCGTTATCAAC
TTGAAAAAGTGGGACCGAGTCGGTCC.

[0340] (3) In some embodiments, the heterologous object sequence is, e.g., 7-74, e.g., 10-20, 20-30, 30-40, 40-50, 50-60, 60-70, or 70-80 nt or, 80-90 nt in length. In some embodiments, the first (most 5′) base of the sequence is not C.
[0341] (4) In some embodiments, the PBS sequence that binds the target priming sequence after nicking occurs is e.g., 3-20 nt, e.g., 7-15 nt, e.g., 12-14 nt. In some embodiments, the PBS sequence has 40-60% GC content.

[0342] In some embodiments, a second gRNA associated with the system may help drive complete integration. In some embodiments, the second gRNA may target a location that is 0-200 nt away from the first-strand nick, e.g., 0-50, 50-100, 100-200 nt away from the first-strand nick. In some embodiments, the second gRNA can only bind its target sequence after the edit is made, e.g., the gRNA binds a sequence present in the heterologous object sequence, but not in the initial target sequence.

[0343] In some embodiments, a gene modifying system described herein is used to make an edit in HEK293, K562, U2OS, or HeLa cells. In some embodiment, a gene modifying system is used to make an edit in primary cells, e.g., primary cortical neurons from E18.5 mice.

[0344] In some embodiments, a gene modifying polypeptide as described herein comprises a reverse transcriptase or RT domain (e.g., as described herein) that comprises a MoML V RT sequence or variant thereof. In embodiments, the MoMLV RT sequence comprises one or more mutations selected from D200N, L603W, T330P, T306K, W313F, D524G, E562Q, D583N, P51L, S67R, E67K, T197A, H204R, E302K, F309N, L435G, N454K, H594Q, D653N, R110S, and K103L. In embodiments, the MoMLV RT sequence comprises a combination of mutations, such as D200N, L603W, and T330P, optionally further including T306K and/or W313F.

[0345] In some embodiments, an endonuclease domain (e.g., as described herein) nCas9, e.g., comprising an N863A mutation (e.g., in spCas9) or a H840A mutation.

[0346] In some embodiments, the heterologous object sequence (e.g., of a system as described herein) is about 1-50, 50-100, 100-200, 200-300, 300-400, 400-500, 500-600, 600-700, 700-800, 800-900, 900-1000, or more, nucleotides in length.

[0347] In some embodiments, the RT and endonuclease domains are joined by a flexible linker, e.g., comprising the amino acid sequence SGGSSGGSSGSETPGTSESATPESSGGSSGGSS (SEQ ID NO: 5006).

[0348] In some embodiments, the endonuclease domain is N-terminal relative to the RT domain. In some embodiments, the endonuclease domain is C-terminal relative to the RT domain.

[0349] In some embodiments, the system incorporates a heterologous object sequence into a target site by TPRT, e.g., as described herein.

[0350] In some embodiments, a gene modifying polypeptide comprises a DNA binding domain. In some embodiments, a gene modifying polypeptide comprises an RNA binding domain. In some embodiments, the RNA binding domain comprises an RNA binding domain of B-box protein, MS2 coat protein, dCas, or an element of a sequence of a table herein. In some embodiments, the RNA binding domain is capable of binding to a template RNA with greater affinity than a reference RNA binding domain.

[0351] In some embodiments, a gene modifying system is capable of producing an insertion into the target site of at least 45, 50, 55, 60, 65, 70, 75, 80, 85, 90, 95, or 100 nucleotides (and optionally no more than 500, 400, 300, 200, or 100 nucleotides). In some embodiments, a gene modifying system is capable of producing an insertion into the target site of at least 1, 2, 3, 4, 5, 6, 7, 8, 9, 10, 15, 20, 25, 30, 35, 40, 45, 50, 55, 60, 65, 70, 75, 80, 85, 90, 95, or 100 nucleotides (and optionally no more than 500, 400, 300, 200, or 100 nucleotides). In some embodiments, a gene modifying system is capable of producing an insertion into the target site of at least 0.2, 0.3, 0.4, 0.5, 0.6, 0.7, 0.8, 0.9, 1, 1.5, 2, 2.5, 3, 3.5, 4, 4.5, 5, 5.5, 6, 6.5, 7, 7.5, 8, 8.5, 9, 9.5 or 10 kilobases (and optionally no more than 1, 5, 10, or 20 kilobases). In some embodiments, a gene modifying system is capable of producing a deletion of at least 81, 85, 90, 95, 100, 110, 120, 130, 140, 150, 160, 170, 180, 190, or 200 nucleotides (and optionally no more than 500, 400, 300, or 200 nucleotides). In some embodiments, a gene modifying system is capable of producing a deletion of at least 81, 85, 90, 95, 100, 110, 120, 130, 140, 150, 160, 170, 180, 190, or 200 nucleotides (and optionally no more than 500, 400, 300, or 200 nucleotides). In some embodiments, a gene modifying system is capable of producing a deletion of at least 1, 2, 3, 4, 5, 6, 7, 8, 9, 10, 15, 20, 25, 30, 35, 40, 45, 50, 55, 60, 65, 70, 75, 80, 85, 90, 95, 100, 110, 120, 130, 140, 150, 160, 170, 180, 190, or 200 nucleotides (and optionally no more than 500, 400, 300, or 200 nucleotides). In some embodiments, a gene modifying system is capable of producing a deletion of at least 0.2, 0.3, 0.4, 0.5, 0.6, 0.7, 0.8, 0.9, 1, 1.5, 2, 2.5, 3, 3.5, 4, 4.5, 5, 5.5, 6, 6.5, 7, 7.5, 8, 8.5, 9, 9.5 or 10 kilobases (and optionally no more than 1, 5, 10, or 20 kilobases). In some embodiments, a gene modifying system is capable of producing a substitution into the target site of at least 1, 2, 3, 4, 5, 6, 7, 8, 9, 10, 15, 20, 25, 30, 35, 40, 45, 50, 60, 70, 80, 90, or 100 or more nucleotides. In some embodiments, a gene modifying system is capable of producing a substitution in the target site of 1-2, 2-3, 3-4, 4-5, 5-10, 10-15, 15-20, 20-30, 30-40, 40-50, 50-60, 60-70, 70-80, 80-90, or 90-100 nucleotides.

[0352] In some embodiments, the substitution is a transition mutation. In some embodiments, the substitution is a transversion mutation. In some embodiments, the substitution converts an adenine to a thymine, an adenine to a guanine, an adenine to a cytosine, a guanine to a thymine, a guanine to a cytosine, a guanine to an adenine, a thymine to a cytosine, a thymine to an adenine, a thymine to a guanine, a cytosine to an adenine, a cytosine to a guanine, or a cytosine to a thymine.

[0353] In some embodiments, an insertion, deletion, substitution, or combination thereof, increases or decreases expression (e.g. transcription or translation) of a gene. In some embodiments, an insertion, deletion, substitution, or combination thereof, increases or decreases expression (e.g. transcription or translation) of a gene by altering, adding, or deleting sequences in a promoter or enhancer, e.g. sequences that bind transcription factors. In some embodiments, an insertion, deletion, substitution, or combination thereof alters translation of a gene (e.g. alters an amino acid sequence), inserts or deletes a start or stop codon, alters or fixes the translation frame of a gene. In some embodiments, an insertion, deletion, substitution, or combination thereof alters splicing of a gene, e.g. by inserting, deleting, or altering a splice acceptor or donor site. In some embodiments, an insertion, deletion, substitution, or combination thereof alters transcript or protein half-life. In some embodiments, an insertion, deletion, substitution, or combination thereof alters protein localization in the cell (e.g. from the cytoplasm to a mitochondria, from the cytoplasm into the extracellular space (e.g. adds a secretion tag)). In some embodiments, an insertion, deletion, substitution, or combination thereof alters (e.g. improves) protein folding (e.g. to prevent accumulation of misfolded proteins). In some embodiments, an insertion, deletion, substitution, or combination thereof, alters, increases, decreases the activity of a gene, e.g. a protein encoded by the gene.

[0354] Exemplary gene modifying polypeptides, and systems comprising them and methods of using them are described, e.g., in PCT/US2021/020948, which is incorporated herein by reference with respect to retroviral RT domains, including the amino acid and nucleic acid sequences therein.

[0355] Exemplary gene modifying polypeptides and retroviral RT domain sequences are also described, e.g., in International Application No. PCT/US21/20948 filed Mar. 4, 2021, e.g., at Table 30, Table 31, and Table 44 therein; the entire application is incorporated by reference herein with respect to retroviral RTs, e.g., in said sequences and tables. Accordingly, a gene modifying polypeptide described herein may comprise an amino acid sequence according to any of the Tables mentioned in this paragraph, or a domain thereof (e.g., a retroviral RT domain), or a functional fragment or variant of any of the foregoing, or an amino acid sequence having at least 70%, 80%, 85%, 90%, 95%, or 99% identity thereto.

[0356] In some embodiments, a polypeptide for use in any of the systems described herein can be a molecular reconstruction or ancestral reconstruction based upon the aligned polypeptide sequence of multiple homologous proteins. In some embodiments, a reverse transcriptase domain for use in any of the systems described herein can be a molecular reconstruction or an ancestral reconstruction, or can be modified at particular residues, based upon alignments of reverse transcriptase domains from the same or different sources. A skilled artisan can, based on the Accession numbers provided herein, align polypeptides or nucleic acid sequences, e.g., by using routine sequence analysis tools as Basic Local Alignment Search Tool (BLAST) or CD-Search for conserved domain analysis. Molecular reconstructions can be created based upon sequence consensus, e.g. using approaches described in Ivics et al., Cell 1997, 501-510; Wagstaff et al., Molecular Biology and Evolution 2013, 88-99.

[0357] Polypeptide components of gene modifying systems

[0358] In some embodiments, the gene modifying polypeptide possesses the functions of DNA target site binding, template nucleic acid (e.g., RNA) binding, DNA target site cleavage, and template nucleic acid (e.g., RNA) writing, e.g., reverse transcription. In some embodiments, each functions is contained within a distinct domain. In some embodiments, a function may be attributed to two or more domains (e.g., two or more domains, together, exhibit the functionality). In some embodiments, two or more domains may have the same or similar function (e.g., two or more domains each independently have DNA-binding functionality, e.g., for two different DNA sequences). In other embodiments, one or more domains may be capable of enabling one or more functions, e.g., a Cas9 domain enabling both DNA binding and target site cleavage. In some embodiments, the domains are all located within a single polypeptide. In some embodiments, a first domain is in one polypeptide and a second domain is in a second polypeptide. For example, in some embodiments, the sequences may be split between a first polypeptide and a second polypeptide, e.g., wherein the first polypeptide comprises a reverse transcriptase (RT) domain and wherein the second polypeptide comprises a DNA-binding domain and an endonuclease domain, e.g., a nickase domain. As a further example, in some embodiments, the first polypeptide and the second polypeptide each comprise a DNA binding domain (e.g., a first DNA binding domain and a second DNA binding domain). In some embodiments, the first and second polypeptide may be brought together post-translationally via a split-intein to form a single gene modifying polypeptide.

[0359] In some aspects, a gene modifying polypeptide described herein comprises (e.g., a system described herein comprises a gene modifying polypeptide that comprises): 1) a Cas domain (e.g., a Cas nickase domain, e.g., a Cas9 nickase domain); 2) a reverse transcriptase (RT) domain of Table D, or a sequence having at least 70%, 75%, 80%, 85%, 90%, 95%, 97%, 98%, or 99% identity thereto, wherein the RT domain is C-terminal of the Cas domain; and a linker disposed between the RT domain and the Cas domain, wherein the linker has a sequence from the same row of Table D as the RT domain, or a sequence having at least 70%, 75%, 80%, 85%, 90%, 95%, 97%, 98%, or 99% identity thereto.

[0360] In some embodiments, the RT domain has a sequence with 100% identity to the RT domain of Table D and the linker has a sequence with 100% identity to the linker sequence from the same row of Table D as the RT domain. In some embodiments, the Cas domain comprises a sequence of Table 8, or a sequence having at least 70%, 75%, 80%, 85%, 90%, 95%, 98%, or 99% identity thereto. In some embodiments, the gene modifying polypeptide comprises an amino acid sequence according to any of SEQ ID NOs: 1-3332 in the sequence listing, or a sequence having at least 70%, 75%, 80%, 85%, 90%, 95%, 97%, 98%, or 99% identity thereto.

[0361] In some embodiments, the gene modifying polypeptide comprises a GG amino acid sequence between the Cas domain and the linker, an AG amino acid sequence between the RT domain and the second NLS, and/or a GG amino acid sequence between the linker and the RT domain. In some embodiments, the gene modifying polypeptide comprises a sequence of SEQ ID NO: 4000 which comprises the first NLS and the Cas domain, or a sequence having at least 70%, 75%, 80%, 85%, 90%, 95%, 98%, or 99% identity thereto. In some embodiments, the gene modifying polypeptide comprises a sequence of SEQ ID NO: 4001 which comprises the second NLS, or a sequence having at least 70%, 75%, 80%, 85%, 90%, 95%, 98%, or 99% identity thereto.

Exemplary N-terminal NLS-Cas9 domain
(SEQ ID NO: 4000)
MPAAKRVKLDGGDKKYSIGLDIGTNSVGWAVITDEYKVPSKKFKVLGNTD
RHSIKKNLIGALLFDSGETAEATRLKRTARRRYTRRKNRICYLQEIFSNE
MAKVDDSFFHRLEESFLVEEDKKHERHPIFGNIVDEVAYHEKYPTIYHLR
KKLVDSTDKADLRLIYLALAHMIKFRGHFLIEGDLNPDNSDVDKLFIQLV
QTYNQLFEENPINASGVDAKAILSARLSKSRRLENLIAQLPGEKKNGLFG
NLIALSLGLTPNFKSNFDLAEDAKLQLSKDTYDDDLDNLLAQIGDQYADL
FLAAKNLSDAILLSDILRVNTEITKAPLSASMIKRYDEHHQDLTLLKALV
RQQLPEKYKEIFFDQSKNGYAGYIDGGASQEEFYKFIKPILEKMDGTEEL
LVKLNREDLLRKQRTFDNGSIPHQIHLGELHAILRRQEDFYPFLKDNREK
IEKILTFRIPYYVGPLARGNSRFAWMTRKSEETITPWNFEEVVDKGASAQ
SFIERMTNFDKNLPNEKVLPKHSLLYEYFTVYNELTKVKYVTEGMRKPAF
LSGEQKKAIVDLLFKTNRKVTVKQLKEDYFKKIECFDSVEISGVEDRFNA
SLGTYHDLLKIIKDKDFLDNEENEDILEDIVLTLTLFEDREMIEERLKTY
AHLFDDKVMKQLKRRRYTGWGRLSRKLINGIRDKQSGKTILDFLKSDGFA
NRNFMQLIHDDSLTFKEDIQKAQVSGQGDSLHEHIANLAGSPAIKKGILQ
TVKVVDELVKVMGRHKPENIVIEMARENQTTQKGQKNSRERMKRIEEGIK
ELGSQILKEHPVENTQLQNEKLYLYYLQNGRDMYVDQELDINRLSDYDVD
HIVPQSFLKDDSIDNKVLTRSDKARGKSDNVPSEEVVKKMKNYWRQLLNA
KLITQRKFDNLTKAERGGLSELDKAGFIKRQLVETRQITKHVAQILDSRM
NTKYDENDKLIREVKVITLKSKLVSDFRKDFQFYKVREINNYHHAHDAYL
NAVVGTALIKKYPKLESEFVYGDYKVYDVRKMIAKSEQEIGKATAKYFFY
SNIMNFFKTEITLANGEIRKRPLIETNGETGEIVWDKGRDFATVRKVLSM
PQVNIVKKTEVQTGGFSKESILPKRNSDKLIARKKDWDPKKYGGFDSPTV
AYSVLVVAKVEKGKSKKLKSVKELLGITIMERSSFEKNPIDFLEAKGYKE
VKKDLIIKLPKYSLFELENGRKRMLASAGELQKGNELALPSKYVNFLYLA
SHYEKLKGSPEDNEQKQLFVEQHKHYLDEIIEQISEFSKRVILADANLDK
VLSAYNKHRDKPIREQAENIIHLFTLTNLGAPAAFKYFDTTIDRKRYTST
KEVLDATLIHQSITGLYETRIDLSQLGGDGG
Exemplary C-terminal sequence comprising an NLS
(SEQ ID NO: 4001)
AGKRTADGSEFEKRTADGSEFESPKKKAKVE

### Writing Domain (RT Domain)

[0362] In certain aspects of the present invention, the writing domain of the gene modifying system possesses reverse transcriptase activity and is also referred to as a reverse transcriptase domain (a RT domain). In some embodiments, the RT domain comprises an RT catalytic portion and RNA-binding region (e.g., a region that binds the template RNA).

[0363] In some embodiments, a nucleic acid encoding the reverse transcriptase is altered from its natural sequence to have altered codon usage, e.g. improved for human cells. In some embodiments the reverse transcriptase domain is a heterologous reverse transcriptase from a retrovirus. In some embodiments, the RT domain comprising a gene modifying polypeptide has been mutated from its original amino acid sequence, e.g., has at least 1, 2, 3, 4, 5, 6, 7, 8, 9, 10, 20, 30, 40, 50, 60, 70, 80, 90, or 100 substitutions. In some embodiments, the RT domain is derived from the RT of a retrovirus, e.g., HIV-1 RT, Moloney Murine Leukemia Virus (MMLV) RT, avian myeloblastosis virus (AMV) RT, or Rous Sarcoma Virus (RSV) RT.

[0364] In some embodiments, the retroviral reverse transcriptase (RT) domain exhibits enhanced stringency of target-primed reverse transcription (TPRT) initiation, e.g., relative to an endogenous RT domain. In some embodiments, the RT domain initiates TPRT when the 3 nt in the target site immediately upstream of the first strand nick, e.g., the genomic DNA priming the RNA template, have at least 66% or 100% complementarity to the 3 nt of homology in the RNA template. In some embodiments, the RT domain initiates TPRT when there are less than 5 nt mismatched (e.g., less than 1, 2, 3, 4, or 5 nt mismatched) between the template RNA homology and the target DNA priming reverse transcription. In some embodiments, the RT domain is modified such that the stringency for mismatches in priming the TPRT reaction is increased, e.g., wherein the RT domain does not tolerate any mismatches or tolerates fewer mismatches in the priming region relative to a wild-type (e.g., unmodified) RT domain. In some embodiments, the RT domain comprises a HIV-1 RT domain. In embodiments, the HIV-1 RT domain initiates lower levels of synthesis even with three nucleotide mismatches relative to an alternative RT domain (e.g., as described by Jamburuthugoda and Eickbush J Mol Biol 407(5):661-672 (2011); incorporated herein by reference in its entirety). In some embodiments, the RT domain forms a dimer (e.g., a heterodimer or homodimer). In some embodiments, the RT domain is monomeric. In some embodiments, an RT domain, naturally functions as a monomer or as a dimer (e.g., heterodimer or homodimer). In some embodiments, an RT domain naturally functions as a monomer, e.g., is derived from a virus wherein it functions as a monomer. In embodiments, the RT domain is selected from an RT domain from murine leukemia virus (MLV; sometimes referred to as MoMLV) (e.g., P03355), porcine endogenous retrovirus (PERV) (e.g., UniProt Q4VFZ2), mouse mammary tumor virus (MMTV) (e.g., UniProt P03365), Avian reticuloendotheliosis virus (AVIRE) (e.g., UniProtKB accession: P03360); Feline leukemia virus (FLV or FeLV) (e.g., e.g., UniProtKB accession: P10273); Mason-Pfizer monkey virus (MPMV) (e.g., UniProt P07572), bovine leukemia virus (BLV) (e.g., UniProt P03361), human T-cell leukemia virus-1 (HTLV-1) (e.g., UniProt P03362), human foamy virus (HFV) (e.g., UniProt P14350), simian foamy virus (SFV) (e.g., SFV3L) (e.g., UniProt P23074 or P27401), or bovine foamy/syncytial virus (BFV/BSV) (e.g., UniProt 041894), or a functional fragment or variant thereof (e.g., an amino acid sequence having at least 70%, 80%, 90%, 95%, or 99% identity thereto). In some embodiments, an RT domain is dimeric in its natural functioning. In some embodiments, the RT domain is derived from a virus wherein it functions as a dimer. In embodiments, the RT domain is selected from an RT domain from avian sarcoma/leukemia virus (ASLV) (e.g., UniProt A0A142BKH1), Rous sarcoma virus (RSV) (e.g., UniProt P03354), avian myeloblastosis virus (AMV) (e.g., UniProt Q83133), human immunodeficiency virus type I (HIV-1) (e.g., UniProt P03369), human immunodeficiency virus type II (HIV-2) (e.g., UniProt P15833), simian immunodeficiency virus (SIV) (e.g., UniProt P05896), bovine immunodeficiency virus (BIV) (e.g., UniProt P19560), equine infectious anemia virus (EIAV) (e.g., UniProt P03371), or feline immunodeficiency virus (FIV) (e.g., UniProt P16088) (Herschhorn and Hizi Cell Mol Life Sci 67(16):2717-2747 (2010)), or a functional fragment or variant thereof (e.g., an amino acid sequence having at least 70%, 80%, 90%, 95%, or 99% identity thereto). Naturally heterodimeric RT domains may, in some embodiments, also be functional as homodimers. In some embodiments, dimeric RT domains are expressed as fusion proteins, e.g., as homodimeric fusion proteins or heterodimeric fusion proteins. In some embodiments, the RT function of the system is fulfilled by multiple RT domains (e.g., as described herein). In further embodiments, the multiple RT domains are fused or separate, e.g., may be on the same polypeptide or on different polypeptides.

[0365] In some embodiments, a gene modifying system described herein comprises an integrase domain, e.g., wherein the integrase domain may be part of the RT domain. In some embodiments, an RT domain (e.g., as described herein) comprises an integrase domain. In some embodiments, an RT domain (e.g., as described herein) lacks an integrase domain, or comprises an integrase domain that has been inactivated by mutation or deleted. In some embodiment, a gene modifying system described herein comprises an RNase H domain, e.g., wherein the RNase H domain may be part of the RT domain. In some embodiments, the RNase H domain is not part of the RT domain and is covalently linked via a flexible linker. In some embodiments, an RT domain (e.g., as described herein) comprises an RNase H domain, e.g., an endogenous RNAse H domain or a heterologous RNase H domain. In some embodiments, an RT domain (e.g., as described herein) lacks an RNase H domain. In some embodiments, an RT domain (e.g., as described herein) comprises an RNase H domain that has been added, deleted, mutated, or swapped for a heterologous RNase H domain. In some embodiments, the polypeptide comprises an inactivated endogenous RNase H domain. In some embodiments, an endogenous RNase H domain from one of the other domains of the polypeptide is genetically removed such that it is not included in the polypeptide, e.g., the endogenous RNase H domain is partially or completely truncated from the comprising domain. In some embodiments, mutation of an RNase H domain yields a polypeptide exhibiting lower RNase activity, e.g., as determined by the methods described in Kotewicz et al. Nucleic Acids Res 16(1):265-277 (1988) (incorporated herein by reference in its entirety), e.g., lower by at least 10%, 20%, 30%, 40%, 50%, 60%, 70%, 80%, or 90% compared to an otherwise similar domain without the mutation. In some embodiments, RNase H activity is abolished.

[0366] In some embodiments, an RT domain is mutated to increase fidelity compared to an otherwise similar domain without the mutation. For instance, in some embodiments, a YADD (SEQ ID NO: 21999) or YMDD (SEQ ID NO: 22000) motif in an RT domain (e.g., in a reverse transcriptase) is replaced with YVDD (SEQ ID NO: 22001). In embodiments, replacement of the YADD (SEQ ID NO: 21999) or YMDD (SEQ ID NO: 22000) or YVDD (SEQ ID NO: 22001) results in higher fidelity in retroviral reverse transcriptase activity (e.g., as described in Jamburuthugoda and Eickbush J Mol Biol 2011; incorporated herein by reference in its entirety).

[0367] In some embodiments, a gene modifying polypeptide described herein comprises an RT domain having an amino acid sequence according to Table 6, or a sequence having at least 70%, 80%, 85%, 90%, 95%, 97%, 98%, or 99% identity thereto. In some embodiments, a nucleic acid described herein encodes an RT domain having an amino acid sequence according to Table 6, or a sequence having at least 70%, 80%, 85%, 90%, 95%, 97%, 98%, or 99% identity thereto.

TABLE 6
Exemplary reverse transcriptase domains from retroviruses

| RT Name | SEQ ID NO: | RT amino acid sequence |
|---|---|---|
| AVIRE_P03360 | 8,001 | TAPLEEEYRLFLEAPIQNVTLLEQWKREIPKVWAEINPPGLASTQAPIHVQLLSTALPVRVRQYPITLEAKRSLRETIRKFRAAGILRPVHSPWNTPLLPV |
| | | RKSGTSEYRMVQDLREVNKRVETIHPTVPNPYTLLSLLPPDRIWYSVLDLKDAFFCIPLAPESQLIFAFEWADAEEGESGQLTWTRLPQGFKNSPTLFD |
| | | EALNRDLQGFRLDHPSVSLLQYVDDLLIAADTQAACLSATRDLLMTLAELGYRVSGKKAQLCQEEVTYLGFKIHKGSRSLSNSRTQAILQIPVPKTKRQV |
| | | REFLGTIGYCRLWIPGFAELAQPLYAATRGGNDPLVWGEKEEEAFQSLKLALTQPPALALPSLDKPFQLFVEETSGAAKGVLTQALGPWKRPVAYLSK |
| | | RLDPVAAGWPRCLRAIAAAALLTREASKLTFGQDIEITSSHNLESLLRSPPDKWLTNARITQYQVLLLDPPRVRFKQTAALNPATLLPETDDTLPIHHCLD |
| | | TLDSLTSTRPDLTDQPLAQAEATLFTDGSSYIRDGKRYAGAAVVTLDSVIWAEPLPIGTSAQKAELIALTKALEWSKDKSVNIYTDSRYAFATLHVHGMIY |
| | | RERGLLTAGGKAIKNAPEILALLTAVWLPKRVAVMHCKGHQKDDAPTSTGNRRADEVAREVAIRPLSTQATIS |
| AVIRE_P03360_3mut | 8,002 | TAPLEEEYRLFLEAPIQNVTLLEQWKREIPKVWAEINPPGLASTQAPIHVQLLSTALPVRVRQYPITLEAKRSLRETIRKFRAAGILRPVHSPWNTPLLPV |
| | | RKSGTSEYRMVQDLREVNKRVETIHPTVPNPYTLLSLLPPDRIWYSVLDLKDAFFCIPLAPESQLIFAFEWADAEEGESGQLTWTRLPQGFKNSPTLFN |
| | | EALNRDLQGFRLDHPSVSLLQYVDDLLIAADTQAACLSATRDLLMTLAELGYRVSGKKAQLCQEEVTYLGFKIHKGSRSLSNSRTQAILQIPVPKTKRQV |
| | | REFLGTIGYCRLWIPGFAELAQPLYAATRPGNDPLVWGEKEEEAFQSLKLALTQPPALALPSLDKPFQLFVEETSGAAKGVLTQALGPWKRPVAYLSK |
| | | RLDPVAAGWPRCLRAIAAAALLTREASKLTFGQDIEITSSHNLESLLRSPPDKWLTNARITQYQVLLLDPPRVRFKQTAALNPATLLPETDDTLPIHHCLD |
| | | TLDSLTSTRPDLTDQPLAQAEATLFTDGSSYIRDGKRYAGAAVVTLDSVIWAEPLPIGTSAQKAELIALTKALEWSKDKSVNIYTDSRYAFATLHVHGMIY |
| | | RERGWLTAGGKAIKNAPEILALLTAVWLPKRVAVMHCKGHQKDDAPTSTGNRRADEVAREVAIRPLSTQATIS |
| AVIRE_P03360_3mutA | 8,003 | TAPLEEEYRLFLEAPIQNVTLLEQWKREIPKVWAEINPPGLASTQAPIHVQLLSTALPVRVRQYPITLEAKRSLRETIRKFRAAGILRPVHSPWNTPLLPV |
| | | RKSGTSEYRMVQDLREVNKRVETIHPTVPNPYTLLSLLPPDRIWYSVLDLKDAFFCIPLAPESQLIFAFEWADAEEGESGQLTWTRLPQGFKNSPTLFN |
| | | EALNRDLQGFRLDHPSVSLLQYVDDLLIAADTQAACLSATRDLLMTLAELGYRVSGKKAQLCQEEVTYLGFKIHKGSRSLSNSRTQAILQIPVPKTKRQV |
| | | REFLGKIGYCRLFIPGFAELAQPLYAATRPGNDPLVWGEKEEEAFQSLKLALTQPPALALPSLDKPFQLFVEETSGAAKGVLTQALGPWKRPVAYLSKR |
| | | LDPVAAGWPRCLRAIAAAALLTREASKLTFGQDIEITSSHNLESLLRSPPDKWLTNARITQYQVLLLDPPRVRFKQTAALNPATLLPETDDTLPIHHQLDT |
| | | LDSLTSTRPDLTDQPLAQAEATLFTDGSSYIRDGKRYAGAAVVTLDSVIWAEPLPIGTSAQKAELIALTKALEWSKDKSVNIYTDSRYAFATLHVHGMIY |
| | | RERGWLTAGGKAIKNAPEILALLTAVWLPKRVAVMHCKGHQKDDAPTSTGNRRADEVAREVAIRPLSTQATIS |
| BAEVM_P10272 | 8,004 | TVSLQDEHRLFDIPVTTSLPDVWLQDFPQAWAETGGLGRAKCQAPIIIDLKPTAVPVSIKQYPMSLEAHMGIRQHIIKFLELGVLRPCRSPWNTPLLPVK |
| | | KPGTQDYRPVQDLREINKRTVDIHPTVPNPYNLLSTLKPDYSWYTVLDLKDAFFCLPLAPQSQELFAFEWKDPERGISGQLTWTRLPQGFKNSPTLFD |
| | | EALHRDLTDFRTQHPEVTLLQYVDDLLLAAPTKKACTQGTRHLLQELGEKGYRASAKKAQICQTKVTYLGYILSEGKRWLTPGRIETVARIPPPRNPRE |
| | | VREFLGTAGFCRLWIPGFAELAAPLYALTKESTPFTWQTEHQLAFEALKKALLSAPALGLPDTSKPFTLFLDERQGIAKGVLTQKLGPWKRPVAYLSKK |
| | | LDPVAAGWPPCLRIMAATAMLVKDSAKLTLGQPLTVITPHTLEAIVRQPPDRWITNARLTHYQALLLDTDRVQFGPPVTLNPATLLPVPENQPSPHDCR |
| | | QVLAETHGTREDLKDQELPDADHTWYTDGSSYLDSGTRRAGAAVVDGHNTIWAQSLPPGTSAQKAELIALTKALELSKGKKANIYTDSRYAFATAHTH |
| | | GSIYERRGLLTSEGKEIKNKAEIIALLKALFLPQEVAIIHCPGHQKGQDPVAVGNRQADRVARQAAMAEVLTLATEPDNTSHIT |
| BAEVM_P10272_3mut | 8,005 | TVSLQDEHRLFDIPVTTSLPDVWLQDFPQAWAETGGLGRAKCQAPIIIDLKPTAVPVSIKQYPMSLEAHMGIRQHIIKFLELGVLRPCRSPWNTPLLPVK |
| | | KPGTQDYRPVQDLREINKRTVDIHPTVPNPYNLLSTLKPDYSWYTVLDLKDAFFCLPLAPQSQELFAFEWKDPERGISGQLTWTRLPQGFKNSPTLFN |
| | | EALHRDLTDFRTQHPEVTLLQYVDDLLLAAPTKKACTQGTRHLLQELGEKGYRASAKKAQICQTKVTYLGYILSEGKRWLTPGRIETVARIPPPRNPRE |
| | | VREFLGTAGFCRLWIPGFAELAAPLYALTKPSTPFTWQTEHQLAFEALKKALLSAPALGLPDTSKPFTLFLDERQGIAKGVLTQKLGPWKRPVAYLSKK |
| | | LDPVAAGWPPCLRIMAATAMLVKDSAKLTLGQPLTVITPHTLEAIVRQPPDRWITNARLTHYQALLLDTDRVQFGPPVTLNPATLLPVPENQPSPHDCR |
| | | QVLAETHGTREDLKDQELPDADHTWYTDGSSYLDSGTRRAGAAVVDGHNTIWAQSLPPGTSAQKAELIALTKALELSKGKKANIYTDSRYAFATAHTH |
| | | GSIYERRGWLTSEGKEIKNKAEIIALLKALFLPQEVAIIHCPGHQKGQDPVAVGNRQADRVARQAAMAEVLTLATEPDNTSHIT |
| BAEVM_P10272_3mutA | 8,006 | TVSLQDEHRLFDIPVTTSLPDVWLQDFPQAWAETGGLGRAKCQAPIIIDLKPTAVPVSIKQYPMSLEAHMGIRQHIIKFLELGVLRPCRSPWNTPLLPVK |
| | | KPGTQDYRPVQDLREINKRTVDIHPTVPNPYNLLSTLKPDYSWYTVLDLKDAFFCLPLAPQSQELFAFEWKDPERGISGQLTWTRLPQGFKNSPTLFN |
| | | EALHRDLTDFRTQHPEVTLLQYVDDLLLAAPTKKACTQGTRHLLQELGEKGYRASAKKAQICQTKVTYLGYILSEGKRWLTPGRIETVARIPPPRNPRE |
| | | VREFLGKAGFCRLFIPGFAELAAPLYALTKPSTPFTWQTEHQLAFEALKKALLSAPALGLPDTSKPFTLFLDERQGIAKGVLTQKLGPWKRPVAYLSKKL |
| | | DPVAAGWPPCLRIMAATAMLVKDSAKLTLGQPLTVITPHTLEAIVRQPPDRWITNARLTHYQALLLDTDRVQFGPPVTLNPATLLPVPENQPSPHDCRQ |
| | | VLAETHGTREDLKDQELPDADHTWYTDGSSYLDSGTRRAGAAVVDGHNTIWAQSLPPGTSAQKAELIALTKALELSKGKKANIYTDSRYAFATAHTHG |
| | | SIYERRGWLTSEGKEIKNKAEIIALLKALFLPQEVAIIHCPGHQKGQDPVAVGNRQADRVARQAAMAEVLTLATEPDNTSHIT |
| BLVAU_P25059 | 8,007 | GVLDAPPSHIGLEHLPPPPEVPQFPLNLERLQALQDLVHRSLEAGYISPWDGPGNNPVFPVRKPNGAWRFVHDLRVTNALTKPIPALSPGPPDLTAIPT |
| | | HLPHIICLDLKDAFFQIPVEDRFRSYFAFTLPTPGGLQPHRRFAWRVLPQGFINSPALFERALQEPLRQVSAAFSQSLLVSYMDDILYVSPTEEQRLQCY |
| | | QTMAAHLRDLGFQVASEKTRQTPSPVPFLGQMVHERMVTYQSLPTLQISSPISLHQLQTVLGDLQWVSRGTPTTRRPLQLLYSSLKGIDDPRAIIHLSP |
| | | EQQQGIAELRQALSHNARSRYNEQEPLLAYVHLTRAGSTLVLFQKGAQFPLAYFQTPLTDNQASPWGLLLLLGCQYLQAQALSSYAKTILKYYHNLPK |
| | | TSLDNWIQSSEDPRVQELLQLWPQISSQGIQPPGPWKTLVTRAEVFLTPQFSPEPIPAALCLFSDGAARRGAYCLWKDHLLDFQAVPAPESAQKGELA |
| | | GLLAGLAAAPPEPLNIWVDSKYLYSLLRTLVLGAWLQPDPVPSYALLYKSLLRHPAIFVGHVRSHSSASHPIASLNNYVDQL |
| BLVAU_P25059_2mut | 8,008 | GVLDAPPSHIGLEHLPPPPEVPQFPLNLERLQALQDLVHRSLEAGYISPWDGPGNNPVFPVRKPNGAWRFVHDLRVTNALTKPIPALSPGPPDLTAIPT |
| | | HLPHIICLDLKDAFFQIPVEDRFRSYFAFTLPTPGGLQPHRRFAWRVLPQGFINSPALFQRALQEPLRQVSAAFSQSLLVSYMDDILYVSPTEEQRLQCY |
| | | QTMAAHLRDLGFQVASEKTRQTPSPVPFLGQMVHERMVTYQSLPTLQISSPISLHQLQTVLGDLQWVSRGTPTTRRPLQLLYSSLKPIDDPRAIIHLSP |
| | | EQQQGIAELRQALSHNARSRYNEQEPLLAYVHLTRAGSTLVLFQKGAQFPLAYFQTPLTDNQASPWGLLLLLGCQYLQAQALSSYAKTILKYYHNLPK |
| | | TSLDNWIQSSEDPRVQELLQLWPQISSQGIQPPGPWKTLVTRAEVFLTPQFSPEPIPAALCLFSDGAARRGAYCLWKDHLLDFQAVPAPESAQKGELA |
| | | GLLAGLAAAPPEPLNIWVDSKYLYSLLRTLVLGAWLQPDPVPSYALLYKSLLRHPAIFVGHVRSHSSASHPIASLNNYVDQL |
| BLVJ_P03361 | 8,009 | GVLDTPPSHIGLEHLPPPPEVPQFPLNLERLQALQDLVHRSLEAGYISPWDGPGNNPVFPVRKPNGAWRFVHDLRATNALTKPIPALSPGPPDLTAIPT |
| | | HPPHIICLDLKDAFFQIPVEDRFRFYLSFTLPSPGGLQPHRRFAWRVLPQGFINSPALFERALQEPLRQVSAAFSQSLLVSYMDDILYASPTEEQRSQCY |
| | | QALAARLRDLGFQVASEKTSQTPSPVPFLGQMVHEQIVTYQSLPTLQISSPISLHQLQAVLGDLQWVSRGTPTTRRPLQLLYSSLKRHHDPRAIIQLSPE |
| | | QLQGIAELRQALSHNARSRYNEQEPLLAYVHLTRAGSTLVLFQKGAQFPLAYFQTPLTDNQASPWGLLLLLGCQYLQTQALSSYAKPILKYYHNLPKTS |
| | | LDNWIQSSEDPRVQELLQLWPQISSQGIQPPGPWKTLITRAEVFLTPQFSPDPIPAALCLFSDGATGRGAYCLWKDHLLDFQAVPAPESAQKGELAGL |
| | | LAGLAAAPPEPVNIWVDSKYLYSLLRTLVLGAWLQPDPVPSYALLYKSLLRHPAIVVGHVRSHSSASHPIASLNNYVDQL |
| BLVJ_P03361_2mut | 8,010 | GVLDTPPSHIGLEHLPPPPEVPQFPLNLERLQALQDLVHRSLEAGYISPWDGPGNNPVFPVRKPNGAWRFVHDLRATNALTKPIPALSPGPPDLTAIPT |
| | | HPPHIICLDLKDAFFQIPVEDRFRFYLSFTLPSPGGLQPHRRFAWRVLPQGFINSPALFNRALQEPLRQVSAAFSQSLLVSYMDDILYASPTEEQRSQCY |
| | | QALAARLRDLGFQVASEKTSQTPSPVPFLGQMVHEQIVTYQSLPTLQISSPISLHQLQAVLGDLQWVSRGTPTTRRPLQLLYSSLKRHHDPRAIIQLSPE |
| | | QLQGIAELRQALSHNARSRYNEQEPLLAYVHLTRAGSTLVLFQKGAQFPLAYFQTPLTDNQASPWGLLLLLGCQYLQTQALSSYAKPILKYYHNLPKTS |
| | | LDNWIQSSEDPRVQELLQLWPQISSQGIQPPGPWKTLITRAEVFLTPQFSPDPIPAALCLFSDGATGRGAYCLWKDHLLDFQAVPAPESAQKGELAGL |
| | | LAGLAAAPPEPVNIWVDSKYLYSLLRTWVLGAWLQPDPVPSYALLYKSLLRHPAIVVGHVRSHSSASHPIASLNNYVDQL |
| BLVJ_P03361_2mutB | 8,011 | GVLDTPPSHIGLEHLPPPPEVPQFPLNLERLQALQDLVHRSLEAGYISPWDGPGNNPVFPVRKPNGAWRFVHDLRATNALTKPIPALSPGPPDLTAPP |
| | | THPPHIICLDLKDAFFQIPVEDRFRFYLSFTLPSPGGLQPHRRFAWRVLPQGFINSPALFQRALQEPLRQVSAAFSQSLLVSYMDDILYASPTEEQRSQC |
| | | YQALAARLRDLGFQVASEKTSQTPSPVPFLGQMVHEQIVTYQSLPTLQISSPISLHQLQAVLGDLQWVSRGTPTTRRPLQLLYSSLKRHHDPRAIIQLSP |
| | | EQLQGIAELRQALSHNARSRYNEQEPLLAYVHLTRAGSTLVLFQKGAQFPLAYFQTPLTDNQASPWGLLLLLGCQYLQTQALSSYAKPILKYYHNLPKT |
| | | SLDNWIQSSEDPRVQELLQLWPQISSQGIQPPGPWKTLITRAEVFLTPQFSPDPIPAALCLFSDGATGRGAYCLWKDHLLDFQAVPAPESAQKGELAG |
| | | LLAGLAAAPPEPVNIWVDSKYLYSLLRTWVLGAWLQPDPVPSYALLYKSLLRHPAIVVGHVRSHSSASHPIASLNNYVDQL |
| FFV_O93209 | 8,012 | MDLLKPLTVERKGVKIKGYWNSQADITCVPKDLLQGEEPVRQQNVTTIHGTQEGDVYYVNLKIDGRRINTEVIGTTLDYAIITPGDVPWILKKPLELTIKLD |
| | | LEEQQGTLLNNSILSKKGKEELKQLFEKYSALWQSWENQVGHRRIRPHKIATGTVKPTPQKQYHINPKAKPDIQIVINDLLKQGVLIQKESTMNTPVYPV |
| | | PKPNGRWRMVLDYRAVNKVTPLIAVQNQHSYGILGSLFKGRYKTTIDLSNGFWAHPIVPEDYWITAFTWQGKQYCWTVLPQGFLNSPGLFTGDVVDL |
| | | LQGIPNVEVYVDDVYISHDSEKEHLEYLDILFNRLKEAGYIISLKKSNIANSIVDFLGFQITNEGRGLTDTFKEKLENITAPTTLKQLQSILGLLNFARNFIPD |
| | | FTELIAPLYALIPKSTKNYVPWQIEHSTTLETLITKLNGAEYLQGRKGDKTLIMKVNASYTTGYIRYYNEGEKKPISYVSIVFSKTELKFTELEKLLTTVHKG |
| | | LLKALDLSMGQNIHVYSPIVSMQNIQKTPQTAKKALASRWLSWLSYLEDPRIRFFYDPQMPALKDLPAVDTGKDNKKHPSNFQHIFYTDGSAITSPTKE |
| | | GHLNAGMGIVYFINKDGNLQKQQEWSISLGNHTAQFAEIAAFEFALKKCLPLGGNILVVTDSNYVAKAYNEELDVWASNGFVNNRKKPLKHISKWKSV |
| | | ADLKRLRPDVVVTHEPGHQKLDSSPHAYGNNLADQLATQASFKVH |
| FFV_O93209_2mut | 8,013 | MDLLKPLTVERKGVKIKGYWNSQADITCVPKDLLQGEEPVRQQNVTTIHGTQEGDVYYVNLKIDGRRINTEVIGTTLDYAIITPGDVPWILKKPLELTIKLD |
| | | LEEQQGTLLNNSILSKKGKEELKQLFEKYSALWQSWENQVGHRRIRPHKIATGTVKPTPQKQYHINPKAKPDIQIVINDLLKQGVLIQKESTMNTPVYPV |
| | | PKPNGRWRMVLDYRAVNKVTPLIAVQNQHSYGILGSLFKGRYKTTIDLSNGFWAHPIVPEDYWITAFTWQGKQYCWTVLPQGFLNSPGLFNGDVVDL |
| | | LQGIPNVEVYVDDVYISHDSEKEHLEYLDILFNRLKEAGYIISLKKSNIANSIVDFLGFQITNEGRGLTDTFKEKLENITAPTTLKQLQSILGLLNFARNFIPD |
| | | FTELIAPLYALIPKSPKNYVPWQIEHSTTLETLITKLNGAEYLQGRKGDKTLIMKVNASYTTGYIRYYNEGEKKPISYVSIVFSKTELKFTELEKLLTTVHKG |
| | | LLKALDLSMGQNIHVYSPIVSMQNIQKTPQTAKKALASRWLSWLSYLEDPRIRFFYDPQMPALKDLPAVDTGKDNKKHPSNFQHIFYTDGSAITSPTKE |
| | | GHLNAGMGIVYFINKDGNLQKQQEWSISLGNHTAQFAEIAAFEFALKKCLPLGGNILVVTDSNYVAKAYNEELDVWASNGFVNNRKKPLKHISKWKSV |
| | | ADLKRLRPDVVVTHEPGHQKLDSSPHAYGNNLADQLATQASFKVH |
| FFV_O93209_2mutA | 8,014 | MDLLKPLTVERKGVKIKGYWNSQADITCVPKDLLQGEEPVRQQNVTTIHGTQEGDVYYVNLKIDGRRINTEVIGTTLDYAIITPGDVPWILKKPLELTIKLD |
| | | LEEQQGTLLNNSILSKKGKEELKQLFEKYSALWQSWENQVGHRRIRPHKIATGTVKPTPQKQYHINPKAKPDIQIVINDLLKQGVLIQKESTMNTPVYPV |
| | | PKPNGRWRMVLDYRAVNKVTPLIAVQNQHSYGILGSLFKGRYKTTIDLSNGFWAHPIVPEDYWITAFTWQGKQYCWTVLPQGFLNSPGLFNGDVVDL |
| | | LQGIPNVEVYVDDVYISHDSEKEHLEYLDILFNRLKEAGYIISLKKSNIANSIVDFLGFQITNEGRGLTDTFKEKLENITAPTTLKQLQSILGKLNFARNFIPD |
| | | FTELIAPLYALIPKSPKNYVPWQIEHSTTLETLITKLNGAEYLQGRKGDKTLIMKVNASYTTGYIRYYNEGEKKPISYVSIVFSKTELKFTELEKLLTTVHKG |
| | | LLKALDLSMGQNIHVYSPIVSMQNIQKTPQTAKKALASRWLSWLSYLEDPRIRFFYDPQMPALKDLPAVDTGKDNKKHPSNFQHIFYTDGSAITSPTKE |
| | | GHLNAGMGIVYFINKDGNLQKQQEWSISLGNHTAQFAEIAAFEFALKKCLPLGGNILVVTDSNYVAKAYNEELDVWASNGFVNNRKKPLKHISKWKSV |
| | | ADLKRLRPDVVVTHEPGHQKLDSSPHAYGNNLADQLATQASFKVH |
| FFV_O93209-Pro | 8,015 | VPWILKKPLELTIKLDLEEQQGTLLNNSILSKKGKEELKQLFEKYSALWQSWENQVGHRRIRPHKIATGTVKPTPQKQYHINPKAKPDIQIVINDLLKQGV |
| | | LIQKESTMNTPVYPVPKPNGRWRMVLDYRAVNKVTPLIAVQNQHSYGILGSLFKGRYKTTIDLSNGFWAHPIVPEDYWITAFTWQGKQYCWTVLPQGF |
| | | LNSPGLFTGDVVDLLQGIPNVEVYVDDVYISHDSEKEHLEYLDILFNRLKEAGYIISLKKSNIANSIVDFLGFQITNEGRGLTDTFKEKLENITAPTTLKQLQ |
| | | SILGLLNFARNFIPDFTELIAPLYALIPKSTKNYVPWQIEHSTTLETLITKLNGAEYLQGRKGDKTLIMKVNASYTTGYIRYYNEGEKKPISYVSIVFSKTELK |
| | | FTELEKLLTTVHKGLLKALDLSMGQNIHVYSPIVSMQNIQKTPQTAKKALASRWLSWLSYLEDPRIRFFYDPQMPALKDLPAVDTGKDNKKHPSNFQHI |
| | | FYTDGSAITSPTKEGHLNAGMGIVYFINKDGNLQKQQEWSISLGNHTAQFAEIAAFEFALKKCLPLGGNILVVTDSNYVAKAYNEELDVWASNGFVNNR |
| | | KKPLKHISKWKSVADLKRLRPDVVVTHEPGHQKLDSSPHAYGNNLADQLATQASFKVH |
| FFV_O93209-Pro_2mut | 8,016 | VPWILKKPLELTIKLDLEEQQGTLLNNSILSKKGKEELKQLFEKYSALWQSWENQVGHRRIRPHKIATGTVKPTPQKQYHINPKAKPDIQIVINDLLKQGV |
| | | LIQKESTMNTPVYPVPKPNGRWRMVLDYRAVNKVTPLIAVQNQHSYGILGSLFKGRYKTTIDLSNGFWAHPIVPEDYWITAFTWQGKQYCWTVLPQGF |
| | | LNSPGLFNGDVVDLLQGIPNVEVYVDDVYISHDSEKEHLEYLDILFNRLKEAGYIISLKKSNIANSIVDFLGFQITNEGRGLTDTFKEKLENITAPTTLKQLQ |
| | | SILGLLNFARNFIPDFTELIAPLYALIPKSPKNYVPWQIEHSTTLETLITKLNGAEYLQGRKGDKTLIMKVNASYTTGYIRYYNEGEKKPISYVSIVFSKTELK |
| | | FTELEKLLTTVHKGLLKALDLSMGQNIHVYSPIVSMQNIQKTPQTAKKALASRWLSWLSYLEDPRIRFFYDPQMPALKDLPAVDTGKDNKKHPSNFQHI |
| | | FYTDGSAITSPTKEGHLNAGMGIVYFINKDGNLQKQQEWSISLGNHTAQFAEIAAFEFALKKCLPLGGNILVVTDSNYVAKAYNEELDVWASNGFVNNR |
| | | KKPLKHISKWKSVADLKRLRPDVVVTHEPGHQKLDSSPHAYGNNLADQLATQASFKVH |
| FFV_O93209-Pro_2mutA | 8,017 | VPWILKKPLELTIKLDLEEQQGTLLNNSILSKKGKEELKQLFEKYSALWQSWENQVGHRRIRPHKIATGTVKPTPQKQYHINPKAKPDIQIVINDLLKQGV |
| | | LIQKESTMNTPVYPVPKPNGRWRMVLDYRAVNKVTPLIAVQNQHSYGILGSLFKGRYKTTIDLSNGFWAHPIVPEDYWITAFTWQGKQYCWTVLPQGF |
| | | LNSPGLFNGDVVDLLQGIPNVEVYVDDVYISHDSEKEHLEYLDILFNRLKEAGYIISLKKSNIANSIVDFLGFQITNEGRGLTDTFKEKLENITAPTTLKQLQ |
| | | SILGKLNFARNFIPDFTELIAPLYALIPKSPKNYVPWQIEHSTTLETLITKLNGAEYLQGRKGDKTLIMKVNASYTTGYIRYYNEGEKKPISYVSIVFSKTELK |
| | | FTELEKLLTTVHKGLLKALDLSMGQNIHVYSPIVSMQNIQKTPQTAKKALASRWLSWLSYLEDPRIRFFYDPQMPALKDLPAVDTGKDNKKHPSNFQHI |
| | | FYTDGSAITSPTKEGHLNAGMGIVYFINKDGNLQKQQEWSISLGNHTAQFAEIAAFEFALKKCLPLGGNILVVTDSNYVAKAYNEELDVWASNGFVNNR |
| | | KKPLKHISKWKSVADLKRLRPDVVVTHEPGHQKLDSSPHAYGNNLADQLATQASFKVH |
| FLV_P10273 | 8,018 | TLQLEEEYRLFEPESTQKQEMDIWLKNFPQAWAETGGMGTAHCQAPVLIQLKATATPISIRQYPMPHEAYQGIKPHIRRMLDQGILKPCQSPWNTPLLP |
| | | VKKPGTEDYRPVQDLREVNKRVEDIHPTVPNPYNLLSTLPPSHPWYTVLDLKDAFFCLRLHSESQLLFAFEWRDPEIGLSGQLTWTRLPQGFKNSPTL |
| | | FDEALHSDLADFRVRYPALVLLQYVDDLLLAAATRTECLEGTKALLETLGNKGYRASAKKAQICLQEVTYLGYSLKDGQRWLTKARKEAILSIPVPKNSR |
| | | QVREFLGTAGYCRLWIPGFAELAAPLYPLTRPGTLFQWGTEQQLAFEDIKKALLSSPALGLPDITKPFELFIDENSGFAKGVLVQKLGPWKRPVAYLSK |
| | | KLDTVASGWPPCLRMVAAIAILVKDAGKLTLGQPLTILTSHPVEALVRQPPNKWLSNARMTHYQAMLLDAERVHFGPTVSLNPATLLPLPSGGNHHDC |
| | | LQILAETHGTRPDLTDQPLPDADLTWYTDGSSFIRNGEREAGAAVTTESEVIWAAPLPPGTSAQRAELIALTQALKMAEGKKLTVYTDSRYAFATTHVH |
| | | GEIYRRRGLLTSEGKEIKNKNEILALLEALFLPKRLSIIHCPGHQKGDSPQAKGNRLADDTAKKAATETHSSLTVLP |
| FLV_P10273_3mut | 8,019 | TLQLEEEYRLFEPESTQKQEMDIWLKNFPQAWAETGGMGTAHCQAPVLIQLKATATPISIRQYPMPHEAYQGIKPHIRRMLDQGILKPCQSPWNTPLLP |
| | | VKKPGTEDYRPVQDLREVNKRVEDIHPTVPNPYNLLSTLPPSHPWYTVLDLKDAFFCLRLHSESQLLFAFEWRDPEIGLSGQLTWTRLPQGFKNSPTL |
| | | FNEALHSDLADFRVRYPALVLLQYVDDLLLAAATRTECLEGTKALLETLGNKGYRASAKKAQICLQEVTYLGYSLKDGQRWLTKARKEAILSIPVPKNSR |
| | | QVREFLGTAGYCRLWIPGFAELAAPLYPLTRPGTLFQWGTEQQLAFEDIKKALLSSPALGLPDITKPFELFIDENSGFAKGVLVQKLGPWKRPVAYLSK |
| | | KLDTVASGWPPCLRMVAAIAILVKDAGKLTLGQPLTILTSHPVEALVRQPPNKWLSNARMTHYQAMLLDAERVHFGPTVSLNPATLLPLPSGGNHHDC |
| | | LQILAETHGTRPDLTDQPLPDADLTWYTDGSSFIRNGEREAGAAVTTESEVIWAAPLPPGTSAQRAELIALTQALKMAEGKKLTVYTDSRYAFATTHVH |
| | | GEIYRRRGWLTSEGKEIKNKNEILALLEALFLPKRLSIIHCPGHQKGDSPQAKGNRLADDTAKKAATETHSSLTVLP |
| FLV_P10273_3mutA | 8,020 | TLQLEEEYRLFEPESTQKQEMDIWLKNFPQAWAETGGMGTAHCQAPVLIQLKATATPISIRQYPMPHEAYQGIKPHIRRMLDQGILKPCQSPWNTPLLP |
| | | VKKPGTEDYRPVQDLREVNKRVEDIHPTVPNPYNLLSTLPPSHPWYTVLDLKDAFFCLRLHSESQLLFAFEWRDPEIGLSGQLTWTRLPQGFKNSPTL |
| | | FNEALHSDLADFRVRYPALVLLQYVDDLLLAAATRTECLEGTKALLETLGNKGYRASAKKAQICLQEVTYLGYSLKDGQRWLTKARKEAILSIPVPKNSR |
| | | QVREFLGKAGYCRLFIPGFAELAAPLYPLTRPGTLFQWGTEQQLAFEDIKKALLSSPALGLPDITKPFELFIDENSGFAKGVLVQKLGPWKRPVAYLSKK |
| | | LDTVASGWPPCLRMVAAIAILVKDAGKLTLGQPLTILTSHPVEALVRQPPNKWLSNARMTHYQAMLLDAERVHFGPTVSLNPATLLPLPSGGNHHDCL |
| | | QILAETHGTRPDLTDQPLPDADLTWYTDGSSFIRNGEREAGAAVTTESEVIWAAPLPPGTSAQRAELIALTQALKMAEGKKLTVYTDSRYAFATTHVHG |
| | | EIYRRRGWLTSEGKEIKNKNEILALLEALFLPKRLSIIHCPGHQKGDSPQAKGNRLADDTAKKAATETHSSLTVLP |
| FOAMV_P14350 | 8,021 | MNPLQLLQPLPAEIKGTKLLAHWNSGATITCIPESFLEDEQPIKKTLIKTIHGEKQQNVYYVTFKVKGRKVEAEVIASPYEYILLSPTDVPWLTQQPLQLTIL |
| | | VPLQEYQEKILSKTALPEDQKQQLKTLFVKYDNLWQHWENQVGHRKIRPHNIATGDYPPRPQKQYPINPKAKPSIQIVIDDLLKQGVLTPQNSTMNTPV |
| | | YPVPKPDGRWRMVLDYREVNKTIPLTAAQNQHSAGILATIVRQKYKTTLDLANGFWAHPITPESYWLTAFTWQGKQYCWTRLPQGFLNSPALFTADV |
| | | VDLLKEIPNVQVYVDDIYLSHDDPKEHVQQLEKVFQILLQAGYVVSLKKSEIGQKTVEFLGFNITKEGRGLTDTFKTKLLNITPPKDLKQLQSILGLLNFAR |
| | | NFIPNFAELVQPLYNLIASAKGKYIEWSEENTKQLNMVIEALNTASNLEERLPEQRLVIKVNTSPSAGYVRYYNETGKKPIMYLNYVFSKAELKFSMLEKL |
| | | LTTMHKALIKAMDLAMGQEILVYSPIVSMTKIQKTPLPERKALPIRWITWMTYLEDPRIQFHYDKTLPELKHIPDVYTSSQSPVKHPSQYEGVFYTDGSAI |
| | | KSPDPTKSNNAGMGIVHATYKPEYQVLNQWSIPLGNHTAQMAEIAAVEFACKKALKIPGPVLVITDSFYVAESANKELPYWKSNGFVNNKKKPLKHISK |
| | | WKSIAECLSMKPDITIQHEKGISLQIPVFILKGNALADKLATQGSYVVN |
| FOAMV_P14350_2mut | 8,022 | MNPLQLLQPLPAEIKGTKLLAHWNSGATITCIPESFLEDEQPIKKTLIKTIHGEKQQNVYYVTFKVKGRKVEAEVIASPYEYILLSPTDVPWLTQQPLQLTIL |
| | | VPLQEYQEKILSKTALPEDQKQQLKTLEVKYDNLWQHWENQVGHRKIRPHNIATGDYPPRPQKQYPINPKAKPSIQIVIDDLLKQGVLTPQNSTMNTPV |
| | | YPVPKPDGRWRMVLDYREVNKTIPLTAAQNQHSAGILATIVRQKYKTTLDLANGFWAHPITPESYWLTAFTWQGKQYCWTRLPQGFLNSPALFNADV |
| | | VDLLKEIPNVQVYVDDIYLSHDDPKEHVQQLEKVFQILLQAGYVVSLKKSEIGQKTVEFLGFNITKEGRGLTDTFKTKLLNITPPKDLKQLQSILGLLNFAR |
| | | NFIPNFAELVQPLYNLIAPAKGKYIEWSEENTKQLNMVIEALNTASNLEERLPEQRLVIKVNTSPSAGYVRYYNETGKKPIMYLNYVFSKAELKFSMLEKL |
| | | LTTMHKALIKAMDLAMGQEILVYSPIVSMTKIQKTPLPERKALPIRWITWMTYLEDPRIQFHYDKTLPELKHIPDVYTSSQSPVKHPSQYEGVFYTDGSAI |
| | | KSPDPTKSNNAGMGIVHATYKPEYQVLNQWSIPLGNHTAQMAEIAAVEFACKKALKIPGPVLVITDSFYVAESANKELPYWKSNGFVNNKKKPLKHISK |
| | | WKSIAECLSMKPDITIQHEKGISLQIPVFILKGNALADKLATQGSYVVN |
| FOAMV_P14350_2mutA | 8,023 | MNPLQLLQPLPAEIKGTKLLAHWNSGATITCIPESFLEDEQPIKKTLIKTIHGEKQQNVYYVTFKVKGRKVEAEVIASPYEYILLSPTDVPWLTQQPLQLTIL |
| | | VPLQEYQEKILSKTALPEDQKQQLKTLFVKYDNLWQHWENQVGHRKIRPHNIATGDYPPRPQKQYPINPKAKPSIQIVIDDLLKQGVLTPQNSTMNTPV |
| | | YPVPKPDGRWRMVLDYREVNKTIPLTAAQNQHSAGILATIVRQKYKTTLDLANGFWAHPITPESYWLTAFTWQGKQYCWTRLPQGFLNSPALFNADV |
| | | VDLLKEIPNVQVYVDDIYLSHDDPKEHVQQLEKVFQILLQAGYVVSLKKSEIGQKTVEFLGFNITKEGRGLTDTFKTKLLNITPPKDLKQLQSILGKLNFAR |
| | | NFIPNFAELVQPLYNLIAPAKGKYIEWSEENTKQLNMVIEALNTASNLEERLPEQRLVIKVNTSPSAGYVRYYNETGKKPIMYLNYVFSKAELKFSMLEKL |
| | | LTTMHKALIKAMDLAMGQEILVYSPIVSMTKIQKTPLPERKALPIRWITWMTYLEDPRIQFHYDKTLPELKHIPDVYTSSQSPVKHPSQYEGVFYTDGSAI |
| | | KSPDPTKSNNAGMGIVHATYKPEYQVLNQWSIPLGNHTAQMAEIAAVEFACKKALKIPGPVLVITDSFYVAESANKELPYWKSNGFVNNKKKPLKHISK |
| | | WKSIAECLSMKPDITIQHEKGISLQIPVFILKGNALADKLATQGSYVVN |
| FOAMV_P14350-Pro | 8,024 | VPWLTQQPLQLTILVPLQEYQEKILSKTALPEDQKQQLKTLFVKYDNLWQHWENQVGHRKIRPHNIATGDYPPRPQKQYPINPKAKPSIQIVIDDLLKQG |
| | | VLTPQNSTMNTPVYPVPKPDGRWRMVLDYREVNKTIPLTAAQNQHSAGILATIVRQKYKTTLDLANGFWAHPITPESYWLTAFTWQGKQYCWTRLPQ |
| | | GFLNSPALFTADVVDLLKEIPNVQVYVDDIYLSHDDPKEHVQQLEKVFQILLQAGYVVSLKKSEIGQKTVEFLGFNITKEGRGLTDTFKTKLLNITPPKDLK |
| | | QLQSILGLLNFARNFIPNFAELVQPLYNLIASAKGKYIEWSEENTKQLNMVIEALNTASNLEERLPEQRLVIKVNTSPSAGYVRYYNETGKKPIMYLNYVF |
| | | SKAELKFSMLEKLLTTMHKALIKAMDLAMGQEILVYSPIVSMTKIQKTPLPERKALPIRWITWMTYLEDPRIQFHYDKTLPELKHIPDVYTSSQSPVKHPS |
| | | QYEGVFYTDGSAIKSPDPTKSNNAGMGIVHATYKPEYQVLNQWSIPLGNHTAQMAEIAAVEFACKKALKIPGPVLVITDSFYVAESANKELPYWKSNGF |
| | | VNNKKKPLKHISKWKSIAECLSMKPDITIQHEKGISLQIPVFILKGNALADKLATQGSYVVN |
| FOAMV_P14350-Pro_2mut | 8,025 | VPWLTQQPLQLTILVPLQEYQEKILSKTALPEDQKQQLKTLFVKYDNLWQHWENQVGHRKIRPHNIATGDYPPRPQKQYPINPKAKPSIQIVIDDLLKQG |
| | | VLTPQNSTMNTPVYPVPKPDGRWRMVLDYREVNKTIPLTAAQNQHSAGILATIVRQKYKTTLDLANGFWAHPITPESYWLTAFTWQGKQYCWTRLPQ |
| | | GFLNSPALFNADVVDLLKEIPNVQVYVDDIYLSHDDPKEHVQQLEKVFQILLQAGYVVSLKKSEIGQKTVEFLGFNITKEGRGLTDTFKTKLLNITPPKDL |
| | | KQLQSILGLLNFARNFIPNFAELVQPLYNLIAPAKGKYIEWSEENTKQLNMVIEALNTASNLEERLPEQRLVIKVNTSPSAGYVRYYNETGKKPIMYLNYV |
| | | FSKAELKFSMLEKLLTTMHKALIKAMDLAMGQEILVYSPIVSMTKIQKTPLPERKALPIRWITWMTYLEDPRIQFHYDKTLPELKHIPDVYTSSQSPVKHP |
| | | SQYEGVFYTDGSAIKSPDPTKSNNAGMGIVHATYKPEYQVLNQWSIPLGNHTAQMAEIAAVEFACKKALKIPGPVLVITDSFYVAESANKELPYWKSNG |
| | | FVNNKKKPLKHISKWKSIAECLSMKPDITIQHEKGISLQIPVFILKGNALADKLATQGSYVVN |
| FOAMV_P14350-Pro_2mutA | 8,026 | VPWLTQQPLQLTILVPLQEYQEKILSKTALPEDQKQQLKTLFVKYDNLWQHWENQVGHRKIRPHNIATGDYPPRPQKQYPINPKAKPSIQIVIDDLLKQG |
| | | VLTPQNSTMNTPVYPVPKPDGRWRMVLDYREVNKTIPLTAAQNQHSAGILATIVRQKYKTTLDLANGFWAHPITPESYWLTAFTWQGKQYCWTRLPQ |
| | | GFLNSPALFNADVVDLLKEIPNVQVYVDDIYLSHDDPKEHVQQLEKVFQILLQAGYVVSLKKSEIGQKTVEFLGFNITKEGRGLTDTFKTKLLNITPPKDL |
| | | KQLQSILGKLNFARNFIPNFAELVQPLYNLIAPAKGKYIEWSEENTKQLNMVIEALNTASNLEERLPEQRLVIKVNTSPSAGYVRYYNETGKKPIMYLNYV |
| | | FSKAELKFSMLEKLLTTMHKALIKAMDLAMGQEILVYSPIVSMTKIQKTPLPERKALPIRWITWMTYLEDPRIQFHYDKTLPELKHIPDVYTSSQSPVKHP |
| | | SQYEGVFYTDGSAIKSPDPTKSNNAGMGIVHATYKPEYQVLNQWSIPLGNHTAQMAEIAAVEFACKKALKIPGPVLVITDSFYVAESANKELPYWKSNG |
| | | FVNNKKKPLKHISKWKSIAECLSMKPDITIQHEKGISLQIPVFILKGNALADKLATQGSYVVN |
| GALV_P21414 | 8,027 | VLNLEEEYRLHEKPVPSSIDPSWLQLFPTVWAERAGMGLANQVPPVVVELRSGASPVAVRQYPMSKEAREGIRPHIQKFLDLGVLVPCRSPWNTPLL |
| | | PVKKPGTNDYRPVQDLREINKRVQDIHPTVPNPYNLLSSLPPSYTWYSVLDLKDAFFCLRLHPNSQPLFAFEWKDPEKGNTGQLTWTRLPQGFKNSP |
| | | TLFDEALHRDLAPFRALNPQVVLLQYVDDLLVAAPTYEDCKKGTQKLLQELSKLGYRVSAKKAQLCQREVTYLGYLLKEGKRWLTPARKATVMKIPVP |
| | | TTPRQVREFLGTAGFCRLWIPGFASLAAPLYPLTKESIPFIWTEEHQQAFDHIKKALLSAPALALPDLTKPFTLYIDERAGVARGVLTQTLGPWRRPVAY |
| | | LSKKLDPVASGWPTCLKAVAAVALLLKDADKLTLGQNVTVIASHSLESIVRQPPDRWMTNARMTHYQSLLLNERVSFAPPAVLNPATLLPVESEATPVH |
| | | RCSEILAEETGTRRDLEDQPLPGVPTWYTDGSSFITEGKRRAGAPIVDGKRTVWASSLPEGTSAQKAELVALTQALRLAEGKNINIYTDSRYAFATAHIH |
| | | GAIYKQRGLLTSAGKDIKNKEEILALLEAIHLPRRVAIIHCPGHQRGSNPVATGNRRADEAAKQAALSTRVLAGTTKP |
| GALV_P21414_3mut | 8,028 | VLNLEEEYRLHEKPVPSSIDPSWLQLFPTVWAERAGMGLANQVPPVVVELRSGASPVAVRQYPMSKEAREGIRPHIQKFLDLGVLVPCRSPWNTPLL |
| | | PVKKPGTNDYRPVQDLREINKRVQDIHPTVPNPYNLLSSLPPSYTWYSVLDLKDAFFCLRLHPNSQPLFAFEWKDPEKGNTGQLTWTRLPQGFKNSP |
| | | TLFNEALHRDLAPFRALNPQVVLLQYVDDLLVAAPTYEDCKKGTQKLLQELSKLGYRVSAKKAQLCQREVTYLGYLLKEGKRWLTPARKATVMKIPVP |
| | | TTPRQVREFLGTAGFCRLWIPGFASLAAPLYPLTKPSIPFIWTEEHQQAFDHIKKALLSAPALALPDLTKPFTLYIDERAGVARGVLTQTLGPWRRPVAY |
| | | LSKKLDPVASGWPTCLKAVAAVALLLKDADKLTLGQNVTVIASHSLESIVRQPPDRWMTNARMTHYQSLLLNERVSFAPPAVLNPATLLPVESEATPVH |
| | | RCSEILAEETGTRRDLEDQPLPGVPTWYTDGSSFITEGKRRAGAPIVDGKRTVWASSLPEGTSAQKAELVALTQALRLAEGKNINIYTDSRYAFATAHIH |
| | | GAIYKQRGWLTSAGKDIKNKEEILALLEAIHLPRRVAIIHCPGHQRGSNPVATGNRRADEAAKQAALSTRVLAGTTKP |
| GALV_P21414_3mutA | 8,029 | VLNLEEEYRLHEKPVPSSIDPSWLQLFPTVWAERAGMGLANQVPPVVVELRSGASPVAVRQYPMSKEAREGIRPHIQKFLDLGVLVPCRSPWNTPLL |
| | | PVKKPGTNDYRPVQDLREINKRVQDIHPTVPNPYNLLSSLPPSYTWYSVLDLKDAFFCLRLHPNSQPLFAFEWKDPEKGNTGQLTWTRLPQGFKNSP |
| | | TLFNEALHRDLAPFRALNPQVVLLQYVDDLLVAAPTYEDCKKGTQKLLQELSKLGYRVSAKKAQLCQREVTYLGYLLKEGKRWLTPARKATVMKIPVP |
| | | TTPRQVREFLGKAGFCRLFIPGFASLAAPLYPLTKPSIPFIWTEEHQQAFDHIKKALLSAPALALPDLTKPFTLYIDERAGVARGVLTQTLGPWRRPVAYL |
| | | SKKLDPVASGWPTCLKAVAAVALLLKDADKLTLGQNVTVIASHSLESIVRQPPDRWMTNARMTHYQSLLLNERVSFAPPAVLNPATLLPVESEATPVH |
| | | RCSEILAEETGTRRDLEDQPLPGVPTWYTDGSSFITEGKRRAGAPIVDGKRTVWASSLPEGTSAQKAELVALTQALRLAEGKNINIYTDSRYAFATAHIH |
| | | GAIYKQRGWLTSAGKDIKNKEEILALLEAIHLPRRVAIIHCPGHQRGSNPVATGNRRADEAAKQAALSTRVLAGTTKP |
| HTL1A_P03362 | 8,030 | AVLGLEHLPRPPQISQFPLNPERLQALQHLVRKALEAGHIEPYTGPGNNPVFPVKKANGTWRFIHDLRATNSLTIDLSSSSPGPPDLSSLPTTLAHLQTI |
| | | DLRDAFFQIPLPKQFQPYFAFTVPQQCNYGPGTRYAWKVLPQGFKNSPTLFEMQLAHILQPIRQAFPQCTILQYMDDILLASPSHEDLLLLSEATMASLI |
| | | SHGLPVSENKTQQTPGTIKFLGQIISPNHLTYDAVPTVPIRSRWALPELQALLGEIQWVSKGTPTLRQPLHSLYCALQRHTDPRDQIYLNPSQVQSLVQL |
| | | RQALSQNCRSRLVQTLPLLGAIMLTLTGTTTVVFQSKEQWPLVWLHAPLPHTSQCPWGQLLASAVLLLDKYTLQSYGLLCQTIHHNISTQTFNQFIQTS |
| | | DHPSVPILLHHSHRFKNLGAQTGELWNTFLKTAAPLAPVKALMPVFTLSPVIINTAPCLFSDGSTSRAAYILWDKQILSQRSFPLPPPHKSAQRAELLGLL |
| | | HGLSSARSWRCLNIFLDSKYLYHYLRTLALGTFQGRSSQAPFQALLPRLLSRKVVYLHHVRSHTNLPDPISRLNALTDALLITPVLQL |
| HTL1A_P03362_2mut | 8,031 | AVLGLEHLPRPPQISQFPLNPERLQALQHLVRKALEAGHIEPYTGPGNNPVFPVKKANGTWRFIHDLRATNSLTIDLSSSSPGPPDLSSLPTTLAHLQTI |
| | | DLRDAFFQIPLPKQFQPYFAFTVPQQCNYGPGTRYAWKVLPQGFKNSPTLFQMQLAHILQPIRQAFPQCTILQYMDDILLASPSHEDLLLLSEATMASLI |
| | | SHGLPVSENKTQQTPGTIKFLGQIISPNHLTYDAVPTVPIRSRWALPELQALLGEIQWVSKGTPTLRQPLHSLYCALQPHTDPRDQIYLNPSQVQSLVQL |
| | | RQALSQNCRSRLVQTLPLLGAIMLTLTGTTTVVFQSKEQWPLVWLHAPLPHTSQCPWGQLLASAVLLLDKYTLQSYGLLCQTIHHNISTQTFNQFIQTS |
| | | DHPSVPILLHHSHRFKNLGAQTGELWNTFLKTAAPLAPVKALMPVFTLSPVIINTAPCLFSDGSTSRAAYILWDKQILSQRSFPLPPPHKSAQRAELLGLL |
| | | HGLSSARSWRCLNIFLDSKYLYHYLRTLALGTFQGRSSQAPFQALLPRLLSRKVVYLHHVRSHTNLPDPISRLNALTDALLITPVLQL |
| HTL1A_P03362_2mutB | 8,032 | AVLGLEHLPRPPQISQFPLNPERLQALQHLVRKALEAGHIEPYTGPGNNPVFPVKKANGTWRFIHDLRATNSLTIDLSSSSPGPPDLSSPPTTLAHLQTI |
| | | DLRDAFFQIPLPKQFQPYFAFTVPQQCNYGPGTRYAWKVLPQGFKNSPTLFQMQLAHILQPIRQAFPQCTILQYMDDILLASPSHEDLLLLSEATMASLI |
| | | SHGLPVSENKTQQTPGTIKFLGQIISPNHLTYDAVPTVPIRSRWALPELQALLGEIQWVSKGTPTLRQPLHSLYCALQPHTDPRDQIYLNPSQVQSLVQL |
| | | RQALSQNCRSRLVQTLPLLGAIMLTLTGTTTVVFQSKEQWPLVWLHAPLPHTSQCPWGQLLASAVLLLDKYTLQSYGLLCQTIHHNISTQTFNQFIQTS |
| | | DHPSVPILLHHSHRFKNLGAQTGELWNTFLKTAAPLAPVKALMPVFTLSPVIINTAPCLFSDGSTSRAAYILWDKQILSQRSFPLPPPHKSAQRAELLGLL |
| | | HGLSSARSWRCLNIFLDSKYLYHYLRTLALGTFQGRSSQAPFQALLPRLLSRKVVYLHHVRSHTNLPDPISRLNALTDALLITPVLQL |
| HTL1C_P14078 | 8,033 | AVLGLEHLPRPPEISQFPLNPERLQALQHLVRKALEAGHIEPYTGPGNNPVFPVKKANGTWRFIHDLRATNSLTIDLSSSSPGPPDLSSLPTTLAHLQTI |
| | | DLKDAFFQIPLPKQFQPYFAFTVPQQCNYGPGTRYAWRVLPQGFKNSPTLFEMQLAHILQPIRQAFPQCTILQYMDDILLASPSHADLQLLSEATMASLI |
| | | SHGLPVSENKTQQTPGTIKFLGQIISPNHLTYDAVPKVPIRSRWALPELQALLGEIQWVSKGTPTLRQPLHSLYCALQRHTDPRDQIYLNPSQVQSLVQL |
| | | RQALSQNCRSRLVQTLPLLGAIMLTLTGTTTVVFQSKQQWPLVWLHAPLPHTSQCPWGQLLASAVLLLDKYTLQSYGLLCQTIHHNISTQTFNQFIQTS |
| | | DHPSVPILLHHSHRFKNLGAQTGELWNTFLKTTAPLAPVKALMPVFTLSPVIINTAPCLFSDGSTSQAAYILWDKHILSQRSFPLPPPHKSAQRAELLGLL |
| | | HGLSSARSWRCLNIFLDSKYLYHYLRTLALGTFQGRSSQAPFQALLPRLLSRKVVYLHHVRSHTNLPDPISRLNALTDALLITPVLQL |
| HTL1C_P14078_2mut | 8,034 | AVLGLEHLPRPPEISQFPLNPERLQALQHLVRKALEAGHIEPYTGPGNNPVFPVKKANGTWRFIHDLRATNSLTIDLSSSSPGPPDLSSLPTTLAHLQTI |
| | | DLKDAFFQIPLPKQFQPYFAFTVPQQCNYGPGTRYAWRVLPQGFKNSPTLFQMQLAHILQPIRQAFPQCTILQYMDDILLASPSHADLQLLSEATMASLI |
| | | SHGLPVSENKTQQTPGTIKFLGQIISPNHLTYDAVPKVPIRSRWALPELQALLGEIQWVSKGTPTLRQPLHSLYCALQPHTDPRDQIYLNPSQVQSLVQL |
| | | RQALSQNCRSRLVQTLPLLGAIMLTLTGTTTVVFQSKQQWPLVWLHAPLPHTSQCPWGQLLASAVLLLDKYTLQSYGLLCQTIHHNISTQTFNQFIQTS |
| | | DHPSVPILLHHSHRFKNLGAQTGELWNTFLKTTAPLAPVKALMPVFTLSPVIINTAPCLFSDGSTSQAAYILWDKHILSQRSFPLPPPHKSAQRAELLGLL |
| | | HGLSSARSWRCLNIFLDSKYLYHYLRTLALGTFQGRSSQAPFQALLPRLLSRKVVYLHHVRSHTNLPDPISRLNALTDALLITPVLQL |
| HTL1L_P0C211 | 8,035 | GLEHLPRPPEISQFPLNPERLQALQHLVRKALEAGHIEPYTGPGNNPVFPVKKANGTWRFIHDLRATNSLTVDLSSSSPGPPDLSSLPTTLAHLQTIDLK |
| | | DAFFQIPLPKQFQPYFAFTVPQQCNYGPGTRYAWKVLPQGFKNSPTLFEMQLASILQPIRQAFPQCVILQYMDDILLASPSPEDLQQLSEATMASLISH |
| | | GLPVSQDKTQQTPGTIKFLGQIISPNHITYDAVPTVPIRSRWALPELQALLGEIQWVSKGTPTLRQPLHSLYCALQGHTDPRDQIYLNPSQVQSLMQLQ |
| | | QALSQNCRSRLAQTLPLLGAIMLTLTGTTTVVFQSKQQWPLVWLHAPLPHTSQCPWGQLLASAVLLLDKYTLQSYGLLCQTIHHNISIQTFNQFIQTSD |
| | | HPSVPILLHHSHRFKNLGAQTGELWNTFLKTAAPLAPVKALTPVFTLSPIIINTAPCLFSDGSTSQAAYILWDKHILSQRSFPLPPPHKSAQQAELLGLLH |
| | | GLSSARSWHCLNIFLDSKYLYHYLRTLALGTFQGKSSQAPFQALLPRLLAHKVIYLHHVRSHTNLPDPISKLNALTDALLITPIL |
| HTL1L_P0C211_2mut | 8,036 | GLEHLPRPPEISQFPLNPERLQALQHLVRKALEAGHIEPYTGPGNNPVFPVKKANGTWRFIHDLRATNSLTVDLSSSSPGPPDLSSLPTTLAHLQTIDLK |
| | | DAFFQIPLPKQFQPYFAFTVPQQCNYGPGTRYAWKVLPQGFKNSPTLFQMQLASILQPIRQAFPQCVILQYMDDILLASPSPEDLQQLSEATMASLISH |
| | | GLPVSQDKTQQTPGTIKFLGQIISPNHITYDAVPTVPIRSRWALPELQALLGEIQWVSKGTPTLRQPLHSLYCALQGHTDPRDQIYLNPSQVQSLMQLQ |
| | | QALSQNCRSRLAQTLPLLGAIMLTLTGTTTVVFQSKQQWPLVWLHAPLPHTSQCPWGQLLASAVLLLDKYTLQSYGLLCQTIHHNISIQTFNQFIQTSD |
| | | HPSVPILLHHSHRFKNLGAQTGELWNTFLKTAAPLAPVKALTPVFTLSPIIINTAPCLFSDGSTSQAAYILWDKHILSQRSFPLPPPHKSAQQAELLGLLH |
| | | GLSSARSWHCLNIFLDSKYLYHYLRTLAWGTFQGKSSQAPFQALLPRLLAHKVIYLHHVRSHTNLPDPISKLNALTDALLITPIL |
| HTL1L_P0C211_2mutB | 8,037 | GLEHLPRPPEISQFPLNPERLQALQHLVRKALEAGHIEPYTGPGNNPVFPVKKANGTWRFIHDLRATNSLTVDLSSSSPGPPDLSSPPTTLAHLQTIDLK |
| | | DAFFQIPLPKQFQPYFAFTVPQQCNYGPGTRYAWKVLPQGFKNSPTLFQMQLASILQPIRQAFPQCVILQYMDDILLASPSPEDLQQLSEATMASLISH |
| | | GLPVSQDKTQQTPGTIKFLGQIISPNHITYDAVPTVPIRSRWALPELQALLGEIQWVSKGTPTLRQPLHSLYCALQGHTDPRDQIYLNPSQVQSLMQLQ |
| | | QALSQNCRSRLAQTLPLLGAIMLTLTGTTTVVFQSKQQWPLVWLHAPLPHTSQCPWGQLLASAVLLLDKYTLQSYGLLCQTIHHNISIQTFNQFIQTSD |
| | | HPSVPILLHHSHRFKNLGAQTGELWNTFLKTAAPLAPVKALTPVFTLSPIIINTAPCLFSDGSTSQAAYILWDKHILSQRSFPLPPPHKSAQQAELLGLLH |
| | | GLSSARSWHCLNIFLDSKYLYHYLRTLAWGTFQGKSSQAPFQALLPRLLAHKVIYLHHVRSHTNLPDPISKLNALTDALLITPIL |
| HTL32_Q0R5R2 | 8,038 | GLEHLPPPPEVSQFPLNPERLQALTDLVSRALEAKHIEPYQGPGNNPIFPVKKPNGKWRFIHDLRATNSVTRDLASPSPGPPDLTSLPQGLPHLRTIDLT |
| | | DAFFQIPLPTIFQPYFAFTLPQPNNYGPGTRYSWRVLPQGFKNSPTLFEQQLSHILTPVRKTFPNSLIIQYMDDILLASPAPGELAALTDKVTNALTKEGL |
| | | PLSPEKTQATPGPIHFLGQVISQDCITYETLPSINVKSTWSLAELQSMLGELQWVSKGTPVLRSSLHQLYLALRGHRDPRDTIKLTSIQVQALRTIQKALT |
| | | LNCRSRLVNQLPILALIMLRPTGTTAVLFQTKQKWPLVWLHTPHPATSLRPWGQLLANAVIILDKYSLQHYGQVCKSFHHNISNQALTYYLHTSDQSSV |
| | | AILLQHSHRFHNLGAQPSGPWRSLLQMPQIFQNIDVLRPPFTISPVVINHAPCLFSDGSASKAAFIIWDRQVIHQQVLSLPSTCSAQAGELFGLLAGLQK |
| | | SQPWVALNIFLDSKFLIGHLRRMALGAFPGPSTQCELHTQLLPLLQGKTVYVHHVRSHTLLQDPISRLNEATDALMLAPLLPL |
| HTL32_Q0R5R2_2mut | 8,039 | GLEHLPPPPEVSQFPLNPERLQALTDLVSRALEAKHIEPYQGPGNNPIFPVKKPNGKWRFIHDLRATNSVTRDLASPSPGPPDLTSLPQGLPHLRTIDLT |
| | | DAFFQIPLPTIFQPYFAFTLPQPNNYGPGTRYSWRVLPQGFKNSPTLFQQQLSHILTPVRKTFPNSLIIQYMDDILLASPAPGELAALTDKVTNALTKEGL |
| | | PLSPEKTQATPGPIHFLGQVISQDCITYETLPSINVKSTWSLAELQSMLGELQWVSKGTPVLRSSLHQLYLALRGHRDPRDTIKLTSIQVQALRTIQKALT |
| | | LNCRSRLVNQLPILALIMLRPTGTTAVLFQTKQKWPLVWLHTPHPATSLRPWGQLLANAVIILDKYSLQHYGQVCKSFHHNISNQALTYYLHTSDQSSV |
| | | AILLQHSHRFHNLGAQPSGPWRSLLQMPQIFQNIDVLRPPFTISPVVINHAPCLFSDGSASKAAFIIWDRQVIHQQVLSLPSTCSAQAGELFGLLAGLQK |
| | | SQPWVALNIFLDSKFLIGHLRRMAWGAFPGPSTQCELHTQLLPLLQGKTVYVHHVRSHTLLQDPISRLNEATDALMLAPLLPL |
| HTL32_Q0R5R2_2mutB | 8,040 | GLEHLPPPPEVSQFPLNPERLQALTDLVSRALEAKHIEPYQGPGNNPIFPVKKPNGKWRFIHDLRATNSVTRDLASPSPGPPDLTSPPQGLPHLRTIDL |
| | | TDAFFQIPLPTIFQPYFAFTLPQPNNYGPGTRYSWRVLPQGFKNSPTLFQQQLSHILTPVRKTFPNSLIIQYMDDILLASPAPGELAALTDKVTNALTKEG |
| | | LPLSPEKTQATPGPIHFLGQVISQDCITYETLPSINVKSTWSLAELQSMLGELQWVSKGTPVLRSSLHQLYLALRGHRDPRDTIKLTSIQVQALRTIQKAL |
| | | TLNCRSRLVNQLPILALIMLRPTGTTAVLFQTKQKWPLVWLHTPHPATSLRPWGQLLANAVIILDKYSLQHYGQVCKSFHHNISNQALTYYLHTSDQSS |
| | | VAILLQHSHRFHNLGAQPSGPWRSLLQMPQIFQNIDVLRPPFTISPVVINHAPCLFSDGSASKAAFIIWDRQVIHQQVLSLPSTCSAQAGELFGLLAGLQ |
| | | KSQPWVALNIFLDSKFLIGHLRRMAWGAFPGPSTQCELHTQLLPLLQGKTVYVHHVRSHTLLQDPISRLNEATDALMLAPLLPL |
| HTL3P_Q4U0X6 | 8,041 | GLEHLPPPPEVSQFPLNPERLQALTDLVSRALEAKHIEPYQGPGNNPIFPVKKPNGKWRFIHDLRATNSLTRDLASPSPGPPDLTSLPQDLPHLRTIDLT |
| | | DAFFQIPLPAVFQPYFAFTLPQPNNHGPGTRYSWRVLPQGFKNSPTLFEQQLSHILAPVRKAFPNSLIIQYMDDILLASPALRELTALTDKVTNALTKEGL |
| | | PMSLEKTQATPGSIHFLGQVISPDCITYETLPSIHVKSIWSLAELQSMLGELQWVSKGTPVLRSSLHQLYLALRGHRDPRDTIELTSTQVQALKTIQKALA |
| | | LNCRSRLVSQLPILALIILRPTGTTAVLFQTKQKWPLVWLHTPHPATSLRPWGQLLANAIITLDKYSLQHYGQICKSFHHNISNQALTYYLHTSDQSSVAIL |
| | | LQHSHRFHNLGAQPSGPWRSLLQVPQIFQNIDVLRPPFIISPVVIDHAPCLFSDGATSKAAFILWDKQVIHQQVLPLPSTCSAQAGELFGLLAGLQKSKP |
| | | WPALNIFLDSKFLIGHLRRMALGAFLGPSTQCDLHARLFPLLQGKTVYVHHVRSHTLLQDPISRLNEATDALMLAPLLPL |
| HTL3P_Q4U0X6_2mut | 8,042 | GLEHLPPPPEVSQFPLNPERLQALTDLVSRALEAKHIEPYQGPGNNPIFPVKKPNGKWRFIHDLRATNSLTRDLASPSPGPPDLTSLPQDLPHLRTIDLT |
| | | DAFFQIPLPAVFQPYFAFTLPQPNNHGPGTRYSWRVLPQGFKNSPTLFQQQLSHILAPVRKAFPNSLIIQYMDDILLASPALRELTALTDKVTNALTKEG |
| | | LPMSLEKTQATPGSIHFLGQVISPDCITYETLPSIHVKSIWSLAELQSMLGELQWVSKGTPVLRSSLHQLYLALRGHRDPRDTIELTSTQVQALKTIQKAL |
| | | ALNCRSRLVSQLPILALIILRPTGTTAVLFQTKQKWPLVWLHTPHPATSLRPWGQLLANAIITLDKYSLQHYGQICKSFHHNISNQALTYYLHTSDQSSVAI |
| | | LLQHSHRFHNLGAQPSGPWRSLLQVPQIFQNIDVLRPPFIISPVVIDHAPCLFSDGATSKAAFILWDKQVIHQQVLPLPSTCSAQAGELFGLLAGLQKSK |
| | | PWPALNIFLDSKFLIGHLRRMAWGAFLGPSTQCDLHARLFPLLQGKTVYVHHVRSHTLLQDPISRLNEATDALMLAPLLPL |
| HTL3P_Q4U0X6_2mutB | 8,043 | GLEHLPPPPEVSQFPLNPERLQALTDLVSRALEAKHIEPYQGPGNNPIFPVKKPNGKWRFIHDLRATNSLTRDLASPSPGPPDLTSPPQDLPHLRTIDLT |
| | | DAFFQIPLPAVFQPYFAFTLPQPNNHGPGTRYSWRVLPQGFKNSPTLFQQQLSHILAPVRKAFPNSLIIQYMDDILLASPALRELTALTDKVTNALTKEG |
| | | LPMSLEKTQATPGSIHFLGQVISPDCITYETLPSIHVKSIWSLAELQSMLGELQWVSKGTPVLRSSLHQLYLALRGHRDPRDTIELTSTQVQALKTIQKAL |
| | | ALNCRSRLVSQLPILALIILRPTGTTAVLFQTKQKWPLVWLHTPHPATSLRPWGQLLANAIITLDKYSLQHYGQICKSFHHNISNQALTYYLHTSDQSSVAI |
| | | LLQHSHRFHNLGAQPSGPWRSLLQVPQIFQNIDVLRPPFIISPVVIDHAPCLFSDGATSKAAFILWDKQVIHQQVLPLPSTCSAQAGELFGLLAGLQKSK |
| | | PWPALNIFLDSKFLIGHLRRMAWGAFLGPSTQCDLHARLFPLLQGKTVYVHHVRSHTLLQDPISRLNEATDALMLAPLLPL |
| HTLV2_P03363_2mut | 8,044 | HLPPPPQVDQFPLNLPERLQALNDLVSKALEAGHIEPYSGPGNNPVFPVKKPNGKWRFIHDLRATNAITTTLTSPSPGPPDLTSLPTALPHLQTIDLTDA |
| | | FFQIPLPKQYQPYFAFTIPQPCNYGPGTRYAWTVLPQGFKNSPTLFQQQLAAVLNPMRKMFPTSTIVQYMDDILLASPTNEELQQLSQLTLQALTTHGL |
| | | PISQEKTQQTPGQIRFLGQVISPNHITYESTPTIPIKSQWTLTELQVILGEIQWVSKGTPILRKHLQSLYSALHPYRDPRACITLTPQQLHALHAIQQALQH |
| | | NCRGRLNPALPLLGLISLSTSGTTSVIFQPKQNWPLAWLHTPHPPTSLCPWGHLLACTILTLDKYTLQHYGQLCQSFHHNMSKQALCDFLRNSPHPSV |
| | | GILIHHMGRFHNLGSQPSGPWKTLLHLPTLLQEPRLLRPIFTLSPVVLDTAPCLFSDGSPQKAAYVLWDQTILQQDITPLPSHETHSAQKGELLALICGLR |
| | | AAKPWPSLNIFLDSKYLIKYLHSLAIGAFLGTSAHQTLQAALPPLLQGKTIYLHHVRSHTNLPDPISTFNEYTDSLILAPLVPL |
| JSRV_P31623 | 8,045 | PLGTSDSPVTHADPIDWKSEEPVWVDQWPLTQEKLSAAQQLVQEQLRLGHIEPSTSAWNSPIFVIKKKSGKWRLLQDLRKVNETMMHMGALQPGLPT |
| | | PSAIPDKSYIIVIDLKDCFYTIPLAPQDCKRFAFSLPSVNFKEPMQRYQWRVLPQGMTNSPTLCQKFVATAIAPVRQRFPQLYLVHYMDDILLAHTDEHLL |
| | | YQAFSILKQHLSLNGLVIADEKIQTHFPYNYLGFSLYPRVYNTQLVKLQTDHLKTLNDFQKLLGDINWIRPYLKLPTYTLQPLFDILKGDSDPASPRTLSLE |
| | | GRTALQSIEEAIRQQQITYCDYQRSWGLYILPTPRAPTGVLYQDKPLRWIYLSATPTKHLLPYYELVAKIIAKGRHEAIQYFGMEPPFICVPYALEQQDWL |
| | | FQFSDNWSIAFANYPGQITHHYPSDKLLQFASSHAFIFPKIVRRQPIPEATLIFTDGSSNGTAALIINHQTYYAQTSFSSAQVVELFAVHQALLTVPTSFNL |
| | | FTDSSYVVGALQMIETVPIIGTTSPEVLNLFTLIQQVLHCRQHPCFFGHIRAHSTLPGALVQGNHTADVLTKQVFFQS |
| JSRV_P31623_2mutB | 8,046 | PLGTSDSPVTHADPIDWKSEEPVWVDQWPLTQEKLSAAQQLVQEQLRLGHIEPSTSAWNSPIFVIKKKSGKWRLLQDLRKVNETMMHMGALQPGLPT |
| | | PSPIPDKSYIIVIDLKDCFYTIPLAPQDCKRFAFSLPSVNFKEPMQRYQWRVLPQGMTNSPTLCQKFVATAIAPVRQRFPQLYLVHYMDDILLAHTDEHLL |
| | | YQAFSILKQHLSLNGLVIADEKIQTHFPYNYLGFSLYPRVYNTQLVKLQTDHLKTLNDFQKLLGDINWIRPYLKLPTYTLQPLFDILKGDSDPASPRTLSLE |
| | | GRTALQSIEEAIRQQQITYCDYQRSWGLYILPTPRAPTGVLYQDKPLRWIYLSATPTKHLLPYYELVAKIIAKGRHEAIQYFGMEPPFICVPYALEQQDWL |
| | | FQFSDNWSIAFANYPGQITHHYPSDKLLQFASSHAFIFPKIVRRQPIPEATLIFTDGSSNGTAALIINHQTYYAQTSFSSAQVVELFAVHQALLTVPTSFNL |
| | | FTDSSYVVGALQMIETVPIIGTTSPEVLNLFTLIQQVLHCRQHPCFFGHIRAHSTLPGALVQGNHTADVLTKQVFFQS |
| KORV_Q9TTC1 | 8,047 | TLGDQGSRGSDPLPEPRVTLTVEGIPTEFLVNTGAEHSVLTKPMGKMGSKRTVVAGATGSKVYPWTTKRLLKIGQKQVTHSFLVIPECPAPLLGRDLLT |
| | | KLKAQIQFSTEGPQVTWEDRPAMCLVLNLEEEYRLHEKPVPPSIDPSWLQLFPMVWAEKAGMGLANQVPPVVVELKSDASPVAVRQYPMSKEAREGI |
| | | RPHIQRFLDLGILVPCQSPWNTPLLPVKKPGTNDYRPVQDLREVNKRVQDIHPTVPNPYNLLSSLPPSHTWYSVLDLKDAFFCLKLHPNSQPLFAFEW |
| | | RDPEKGNTGQLTWTRLPQGFKNSPTLFDEALHRDLASFRALNPQVVMLQYVDDLLVAAPTYRDCKEGTRRLLQELSKLGYRVSAKKAQLCREEVTYL |
| | | GYLLKGGKRWLTPARKATVMKIPTPTTPRQVREFLGTAGFCRLWIPGFASLAAPLYPLTREKVPFTWTEAHQEAFGRIKEALLSAPALALPDLTKPFAL |
| | | YVDEKEGVARGVLTQTLGPWRRPVAYLSKKLDPVASGWPTCLKAIAAVALLLKDADKLTLGQNVLVIAPHNLESIVRQPPDRWMTNARMTHYQSLLLN |
| | | ERVSFAPPAILNPATLLPVESDDTPIHICSEILAEETGTRPDLRDQPLPGVPAWYTDGSSFIMDGRRQAGAAIVDNKRTVWASNLPEGTSAQKAELIALT |
| | | QALRLAEGKSINIYTDSRYAFATAHVHGAIYKQRGLLTSAGKDIKNKEEILALLEAIHLPKRVAIIHCPGHQRGTDPVATGNRKADEAAKQAAQSTRILTETTKN |
| KORV_Q9TTC1_3mut | 8,048 | TLGDQGSRGSDPLPEPRVTLTVEGIPTEFLVNTGAEHSVLTKPMGKMGSKRTVVAGATGSKVYPWTTKRLLKIGQKQVTHSFLVIPECPAPLLGRDLLT |
| | | KLKAQIQFSTEGPQVTWEDRPAMCLVLNLEEEYRLHEKPVPPSIDPSWLQLFPMVWAEKAGMGLANQVPPVVVELKSDASPVAVRQYPMSKEAREGI |
| | | RPHIQRFLDLGILVPCQSPWNTPLLPVKKPGTNDYRPVQDLREVNKRVQDIHPTVPNPYNLLSSLPPSHTWYSVLDLKDAFFCLKLHPNSQPLFAFEW |
| | | RDPEKGNTGQLTWTRLPQGFKNSPTLFNEALHRDLASFRALNPQVVMLQYVDDLLVAAPTYRDCKEGTRRLLQELSKLGYRVSAKKAQLCREEVTYL |
| | | GYLLKGGKRWLTPARKATVMKIPTPTTPRQVREFLGTAGFCRLWIPGFASLAAPLYPLTRPKVPFTWTEAHQEAFGRIKEALLSAPALALPDLTKPFAL |
| | | YVDEKEGVARGVLTQTLGPWRRPVAYLSKKLDPVASGWPTCLKAIAAVALLLKDADKLTLGQNVLVIAPHNLESIVRQPPDRWMTNARMTHYQSLLLN |
| | | ERVSFAPPAILNPATLLPVESDDTPIHICSEILAEETGTRPDLRDQPLPGVPAWYTDGSSFIMDGRRQAGAAIVDNKRTVWASNLPEGTSAQKAELIALT |
| | | QALRLAEGKSINIYTDSRYAFATAHVHGAIYKQRGWLTSAGKDIKNKEEILALLEAIHLPKRVAIIHCPGHQRGTDPVATGNRKADEAAKQAAQSTRILTETTKN |
| KORV_Q9TTC1_3mutA | 8,049 | TLGDQGSRGSDPLPEPRVTLTVEGIPTEFLVNTGAEHSVLTKPMGKMGSKRTVVAGATGSKVYPWTTKRLLKIGQKQVTHSFLVIPECPAPLLGRDLLT |
| | | KLKAQIQFSTEGPQVTWEDRPAMCLVLNLEEEYRLHEKPVPPSIDPSWLQLFPMVWAEKAGMGLANQVPPVVVELKSDASPVAVRQYPMSKEAREGI |
| | | RPHIQRFLDLGILVPCQSPWNTPLLPVKKPGTNDYRPVQDLREVNKRVQDIHPTVPNPYNLLSSLPPSHTWYSVLDLKDAFFCLKLHPNSQPLFAFEW |
| | | RDPEKGNTGQLTWTRLPQGFKNSPTLFNEALHRDLASFRALNPQVVMLQYVDDLLVAAPTYRDCKEGTRRLLQELSKLGYRVSAKKAQLCREEVTYL |
| | | GYLLKGGKRWLTPARKATVMKIPTPTTPRQVREFLGKAGFCRLFIPGFASLAAPLYPLTRPKVPFTWTEAHQEAFGRIKEALLSAPALALPDLTKPFALY |
| | | VDEKEGVARGVLTQTLGPWRRPVAYLSKKLDPVASGWPTCLKAIAAVALLLKDADKLTLGQNVLVIAPHNLESIVRQPPDRWMTNARMTHYQSLLLNE |
| | | RVSFAPPAILNPATLLPVESDDTPIHICSEILAEETGTRPDLRDQPLPGVPAWYTDGSSFIMDGRRQAGAAIVDNKRTVWASNLPEGTSAQKAELIALTQ |
| | | ALRLAEGKSINIYTDSRYAFATAHVHGAIYKQRGWLTSAGKDIKNKEEILALLEAIHLPKRVAIIHCPGHQRGTDPVATGNRKADEAAKQAAQSTRILTETTKN |
| KORV_Q9TTC1-Pro | 8,050 | LLGRDLLTKLKAQIQFSTEGPQVTWEDRPAMCLVLNLEEEYRLHEKPVPPSIDPSWLQLFPMVWAEKAGMGLANQVPPVVVELKSDASPVAVRQYPM |
| | | SKEAREGIRPHIQRFLDLGILVPCQSPWNTPLLPVKKPGTNDYRPVQDLREVNKRVQDIHPTVPNPYNLLSSLPPSHTWYSVLDLKDAFFCLKLHPNSQ |
| | | PLFAFEWRDPEKGNTGQLTWTRLPQGFKNSPTLFDEALHRDLASFRALNPQVVMLQYVDDLLVAAPTYRDCKEGTRRLLQELSKLGYRVSAKKAQLC |
| | | REEVTYLGYLLKGGKRWLTPARKATVMKIPTPTTPRQVREFLGTAGFCRLWIPGFASLAAPLYPLTREKVPFTWTEAHQEAFGRIKEALLSAPALALPD |
| | | LTKPFALYVDEKEGVARGVLTQTLGPWRRPVAYLSKKLDPVASGWPTCLKAIAAVALLLKDADKLTLGQNVLVIAPHNLESIVRQPPDRWMTNARMTH |
| | | YQSLLLNERVSFAPPAILNPATLLPVESDDTPIHICSEILAEETGTRPDLRDQPLPGVPAWYTDGSSFIMDGRRQAGAAIVDNKRTVWASNLPEGTSAQ |
| | | KAELIALTQALRLAEGKSINIYTDSRYAFATAHVHGAIYKQRGLLTSAGKDIKNKEEILALLEAIHLPKRVAIIHCPGHQRGTDPVATGNRKADEAAKQAAQSTRILTE |
| | | TTKN |
| KORV_Q9TTC1-Pro_3mut | 8,051 | LLGRDLLTKLKAQIQFSTEGPQVTWEDRPAMCLVLNLEEEYRLHEKPVPPSIDPSWLQLFPMVWAEKAGMGLANQVPPVVVELKSDASPVAVRQYPM |
| | | SKEAREGIRPHIQRFLDLGILVPCQSPWNTPLLPVKKPGTNDYRPVQDLREVNKRVQDIHPTVPNPYNLLSSLPPSHTWYSVLDLKDAFFCLKLHPNSQ |
| | | PLFAFEWRDPEKGNTGQLTWTRLPQGFKNSPTLFNEALHRDLASFRALNPQVVMLQYVDDLLVAAPTYRDCKEGTRRLLQELSKLGYRVSAKKAQLC |
| | | REEVTYLGYLLKGGKRWLTPARKATVMKIPTPTTPRQVREFLGTAGFCRLWIPGFASLAAPLYPLTRPKVPFTWTEAHQEAFGRIKEALLSAPALALPD |
| | | LTKPFALYVDEKEGVARGVLTQTLGPWRRPVAYLSKKLDPVASGWPTCLKAIAAVALLLKDADKLTLGQNVLVIAPHNLESIVRQPPDRWMTNARMTH |
| | | YQSLLLNERVSFAPPAILNPATLLPVESDDTPIHICSEILAEETGTRPDLRDQPLPGVPAWYTDGSSFIMDGRRQAGAAIVDNKRTVWASNLPEGTSAQ |
| | | KAELIALTQALRLAEGKSINIYTDSRYAFATAHVHGAIYKQRGWLTSAGKDIKNKEEILALLEAIHLPKRVAIIHCPGHQRGTDPVATGNRKADEAAKQAAQSTRILTE |
| | | TTKN |
| KORV_Q9TTC1-Pro_3mutA | 8,052 | LLGRDLLTKLKAQIQFSTEGPQVTWEDRPAMCLVLNLEEEYRLHEKPVPPSIDPSWLQLFPMVWAEKAGMGLANQVPPVVVELKSDASPVAVRQYPM |
| | | SKEAREGIRPHIQRFLDLGILVPCQSPWNTPLLPVKKPGTNDYRPVQDLREVNKRVQDIHPTVPNPYNLLSSLPPSHTWYSVLDLKDAFFCLKLHPNSQ |
| | | PLFAFEWRDPEKGNTGQLTWTRLPQGFKNSPTLFNEALHRDLASFRALNPQVVMLQYVDDLLVAAPTYRDCKEGTRRLLQELSKLGYRVSAKKAQLC |
| | | REEVTYLGYLLKGGKRWLTPARKATVMKIPTPTTPRQVREFLGKAGFCRLFIPGFASLAAPLYPLTRPKVPFTWTEAHQEAFGRIKEALLSAPALALPDL |
| | | TKPFALYVDEKEGVARGVLTQTLGPWRRPVAYLSKKLDPVASGWPTCLKAIAAVALLLKDADKLTLGQNVLVIAPHNLESIVRQPPDRWMTNARMTHY |
| | | QSLLLNERVSFAPPAILNPATLLPVESDDTPIHICSEILAEETGTRPDLRDQPLPGVPAWYTDGSSFIMDGRRQAGAAIVDNKRTVWASNLPEGTSAQK |
| | | AELIALTQALRLAEGKSINIYTDSRYAFATAHVHGAIYKQRGWLTSAGKDIKNKEEILALLEAIHLPKRVAIIHCPGHQRGTDPVATGNRKADEAAKQAAQSTRILTE |
| | | TTKN |
| MLVAV_P03356 | 8,053 | TLNLEDEYRLYETSAEPEVSPGSTWLSDFPQAWAETGGMGLAVRQAPLIIPLKATSTPVSIKQYPMSQEAKLGIKPHIQRLLDQGILVPCQSPWNTPLL |
| | | PVKKPGTNDYRPVQDLREVNKRVEDIHPTVPNPYNLLSGLPPSHRWYTVLDLKDAFFCLRLHPTSQPLFAFEWRDPGMGISGQLTWTRLPQGFKNSP |
| | | TLFDEALHRDLADFRIQHPDLILLQYVDDILLAATSELDCQQGTRALLLTLGNLGYRASAKKAQLCQKQVKYLGYLLKEGQRWLTEARKETVMGQPTPK |
| | | TPRQLREFLGTAGFCRLWIPGFAEMAAPLYPLTKTGTLFNWGPDQQKAYQEIKQALLTAPALGLPDLTKPFELFVDEKQGYAKGVLTQKLGPWRRPVA |
| | | YLSKKLDPVAAGWPPCLRMVAAIAVLRKDAGKLTMGQPLVILAPHAVEALVKQPPDRWLSNARMTHYQAMLLDTDRVQFGPVVALNPATLLPLPEEG |
| | | APHDCLEILAETHGTRPDLTDQPIPDADHTWYTDGSSFLQEGQRKAGAAVTTETEVIWARALPAGTSAQRAELIALTQALKMAEGKRLNVYTDSRYAF |
| | | ATAHIHGEIYRRRGLLTSEGREIKNKSEILALLKALFLPKRLSIIHCLGHQKGDSAEARGNRLADQAAREAAIKTPPDTSTLL |
| MLVAV_P03356_3mut | 8,054 | TLNLEDEYRLYETSAEPEVSPGSTWLSDFPQAWAETGGMGLAVRQAPLIIPLKATSTPVSIKQYPMSQEAKLGIKPHIQRLLDQGILVPCQSPWNTPLL |
| | | PVKKPGTNDYRPVQDLREVNKRVEDIHPTVPNPYNLLSGLPPSHRWYTVLDLKDAFFCLRLHPTSQPLFAFEWRDPGMGISGQLTWTRLPQGFKNSP |
| | | TLFNEALHRDLADFRIQHPDLILLQYVDDILLAATSELDCQQGTRALLLTLGNLGYRASAKKAQLCQKQVKYLGYLLKEGQRWLTEARKETVMGQPTPK |
| | | TPRQLREFLGTAGFCRLWIPGFAEMAAPLYPLTKPGTLFNWGPDQQKAYQEIKQALLTAPALGLPDLTKPFELFVDEKQGYAKGVLTQKLGPWRRPV |
| | | AYLSKKLDPVAAGWPPCLRMVAAIAVLRKDAGKLTMGQPLVILAPHAVEALVKQPPDRWLSNARMTHYQAMLLDTDRVQFGPVVALNPATLLPLPEE |
| | | GAPHDCLEILAETHGTRPDLTDQPIPDADHTWYTDGSSFLQEGQRKAGAAVTTETEVIWARALPAGTSAQRAELIALTQALKMAEGKRLNVYTDSRYA |
| | | FATAHIHGEIYRRRGWLTSEGREIKNKSEILALLKALFLPKRLSIIHCLGHQKGDSAEARGNRLADQAAREAAIKTPPDTSTLL |
| MLVAV_P03356_3mutA | 8,055 | TLNLEDEYRLYETSAEPEVSPGSTWLSDFPQAWAETGGMGLAVRQAPLIIPLKATSTPVSIKQYPMSQEAKLGIKPHIQRLLDQGILVPCQSPWNTPLL |
| | | PVKKPGTNDYRPVQDLREVNKRVEDIHPTVPNPYNLLSGLPPSHRWYTVLDLKDAFFCLRLHPTSQPLFAFEWRDPGMGISGQLTWTRLPQGFKNSP |
| | | TLFNEALHRDLADFRIQHPDLILLQYVDDILLAATSELDCQQGTRALLLTLGNLGYRASAKKAQLCQKQVKYLGYLLKEGQRWLTEARKETVMGQPTPK |
| | | TPRQLREFLGKAGFCRLFIPGFAEMAAPLYPLTKPGTLFNWGPDQQKAYQEIKQALLTAPALGLPDLTKPFELFVDEKQGYAKGVLTQKLGPWRRPVA |
| | | YLSKKLDPVAAGWPPCLRMVAAIAVLRKDAGKLTMGQPLVILAPHAVEALVKQPPDRWLSNARMTHYQAMLLDTDRVQFGPVVALNPATLLPLPEEG |
| | | APHDCLEILAETHGTRPDLTDQPIPDADHTWYTDGSSFLQEGQRKAGAAVTTETEVIWARALPAGTSAQRAELIALTQALKMAEGKRLNVYTDSRYAF |
| | | ATAHIHGEIYRRRGWLTSEGREIKNKSEILALLKALFLPKRLSIIHCLGHQKGDSAEARGNRLADQAAREAAIKTPPDTSTLL |
| MLVBM_Q7SVK7 | 8,056 | TLGIEDEYRLHETSTEPDVSLGSTWLSDFPQAWAETGGMGLAVRQAPLIIPLKATSTPVSIQQYPMSHEARLGIKPHIQRLLDQGILVPCQSPWNTPLLP |
| | | VKKPGTNDYRPVQDLREVNKRVEDIHPTVPNPYNLLSGLPPSHQWYTVLDLKDAFFCLRLHPTSQPLFAFEWRDPGMGISGQLTWTRLPQGFKNSPT |
| | | LFDEALHRDLADFRIQHPDLILLQYVDDILLAATSELDCQQGTRALLQTLGDLGYRASAKKAQICQKQVKYLGYLLREGQRWLTEARKETVMGQPVPKT |
| | | PRQLREFLGTAGFCRLWIPGFAEMAAPLYPLTKTGTLFSWGPDQQKAYQEIKQALLTAPALGLPDLTKPFELFVDEKQGYAKGVLTQKLGPWRRPVAY |
| | | LSKKLDPVAAGWPPCLRMVAAIAVLTKDAGKLTMGQPLVILAPHAVEALVKQPPDRWLSNARMTHYQAMLLDTDRVQFGPVVALNPATLLPLPEEGAP |
| | | HDCLEILAETHGTRPDLTDQPIPDADHTWYTDGSSFLQEGQRKAGAAVTTETEVIWAGALPAGTSAQRAELIALTQALKMAEGKRLNVYTDSRYAFAT |
| | | AHIHGEIYRRRGLLTSEGREIKNKSEILALLKALFLPKRLSIIHCLGHQKGDSAEARGNRLADQAAREAAIKTPPDTSTLL |
| MLVBM_Q7SVK7 | 8,057 | TLGIEDEYRLHETSTEPDVSLGSTWLSDFPQAWAETGGMGLAVRQAPLIIPLKATSTPVSIQQYPMSHEARLGIKPHIQRLLDQGILVPCQSPWNTPLLP |
| | | VKKPGTNDYRPVQDLREVNKRVEDIHPTVPNPYNLLSGLPPSHQWYTVLDLKDAFFCLRLHPTSQPLFAFEWRDPGMGISGQLTWTRLPQGFKNSPT |
| | | LFDEALHRDLADFRIQHPDLILLQYVDDILLAATSELDCQQGTRALLQTLGDLGYRASAKKAQICQKQVKYLGYLLREGQRWLTEARKETVMGQPVPKT |
| | | PRQLREFLGTAGFCRLWIPGFAEMAAPLYPLTKTGTLFSWGPDQQKAYQEIKQALLTAPALGLPDLTKPFELFVDEKQGYAKGVLTQKLGPWRRPVAY |
| | | LSKKLDPVAAGWPPCLRMVAAIAVLTKDAGKLTMGQPLVILAPHAVEALVKQPPDRWLSNARMTHYQAMLLDTDRVQFGPVVALNPATLLPLPEEGAP |
| | | HDCLEILAETHGTRPDLTDQPIPDADHTWYTDGSSFLQEGQRKAGAAVTTETEVIWAGALPAGTSAQRAELIALTQALKMAEGKRLNVYTDSRYAFAT |
| | | AHIHGEIYRRRGLLTSEGREIKNKSEILALLKALFLPKRLSIIHCLGHQKGDSAEARGNRLADQAAREAAIKTPPDTSTLL |
| MLVBM_Q7SVK7_3mut | 8,058 | TLGIEDEYRLHETSTEPDVSLGSTWLSDFPQAWAETGGMGLAVRQAPLIIPLKATSTPVSIQQYPMSHEARLGIKPHIQRLLDQGILVPCQSPWNTPLLP |
| | | VKKPGTNDYRPVQDLREVNKRVEDIHPTVPNPYNLLSGLPPSHQWYTVLDLKDAFFCLRLHPTSQPLFAFEWRDPGMGISGQLTWTRLPQGFKNSPT |
| | | LFNEALHRDLADFRIQHPDLILLQYVDDILLAATSELDCQQGTRALLQTLGDLGYRASAKKAQICQKQVKYLGYLLREGQRWLTEARKETVMGQPVPKT |
| | | PRQLREFLGTAGFCRLWIPGFAEMAAPLYPLTKPGTLFSWGPDQQKAYQEIKQALLTAPALGLPDLTKPFELFVDEKQGYAKGVLTQKLGPWRRPVA |
| | | YLSKKLDPVAAGWPPCLRMVAAIAVLTKDAGKLTMGQPLVILAPHAVEALVKQPPDRWLSNARMTHYQAMLLDTDRVQFGPVVALNPATLLPLPEEGA |
| | | PHDCLEILAETHGTRPDLTDQPIPDADHTWYTDGSSFLQEGQRKAGAAVTTETEVIWAGALPAGTSAQRAELIALTQALKMAEGKRLNVYTDSRYAFA |
| | | TAHIHGEIYRRRGWLTSEGREIKNKSEILALLKALFLPKRLSIIHCLGHQKGDSAEARGNRLADQAAREAAIKTPPDTSTLL |
| MLVBM_Q7SVK7_3mut | 8,059 | TLGIEDEYRLHETSTEPDVSLGSTWLSDFPQAWAETGGMGLAVRQAPLIIPLKATSTPVSIQQYPMSHEARLGIKPHIQRLLDQGILVPCQSPWNTPLLP |
| | | VKKPGTNDYRPVQDLREVNKRVEDIHPTVPNPYNLLSGLPPSHQWYTVLDLKDAFFCLRLHPTSQPLFAFEWRDPGMGISGQLTWTRLPQGFKNSPT |
| | | LFNEALHRDLADFRIQHPDLILLQYVDDILLAATSELDCQQGTRALLQTLGDLGYRASAKKAQICQKQVKYLGYLLREGQRWLTEARKETVMGQPVPKT |
| | | PRQLREFLGTAGFCRLWIPGFAEMAAPLYPLTKPGTLFSWGPDQQKAYQEIKQALLTAPALGLPDLTKPFELFVDEKQGYAKGVLTQKLGPWRRPVA |
| | | YLSKKLDPVAAGWPPCLRMVAAIAVLTKDAGKLTMGQPLVILAPHAVEALVKQPPDRWLSNARMTHYQAMLLDTDRVQFGPVVALNPATLLPLPEEGA |
| | | PHDCLEILAETHGTRPDLTDQPIPDADHTWYTDGSSFLQEGQRKAGAAVTTETEVIWAGALPAGTSAQRAELIALTQALKMAEGKRLNVYTDSRYAFA |
| | | TAHIHGEIYRRRGWLTSEGREIKNKSEILALLKALFLPKRLSIIHCLGHQKGDSAEARGNRLADQAAREAAIKTPPDTSTLL |
| MLVBM_Q7SVK7_3mutA_WS | 8,060 | LGIEDEYRLHETSTEPDVSLGSTWLSDFPQAWAETGGMGLAVRQAPLIIPLKATSTPVSIQQYPMSHEARLGIKPHIQRLLDQGILVPCQSPWNTPLLPV |
| | | KKPGTNDYRPVQDLREVNKRVEDIHPTVPNPYNLLSGLPPSHQWYTVLDLKDAFFCLRLHPTSQPLFAFEWRDPGMGISGQLTWTRLPQGFKNSPTL |
| | | FNEALHRDLADFRIQHPDLILLQYVDDILLAATSELDCQQGTRALLQTLGDLGYRASAKKAQICQKQVKYLGYLLREGQRWLTEARKETVMGQPVPKTP |
| | | RQLREFLGKAGFCRLFIPGFAEMAAPLYPLTKPGTLFSWGPDQQKAYQEIKQALLTAPALGLPDLTKPFELFVDEKQGYAKGVLTQKLGPWRRPVAYL |
| | | SKKLDPVAAGWPPCLRMVAAIAVLTKDAGKLTMGQPLVILAPHAVEALVKQPPDRWLSNARMTHYQAMLLDTDRVQFGPVVALNPATLLPLPEEGAP |
| | | HDCLEILAETHGTRPDLTDQPIPDADHTWYTDGSSFLQEGQRKAGAAVTTETEVIWAGALPAGTSAQRAELIALTQALKMAEGKRLNVYTDSRYAFAT |
| | | AHIHGEIYRRRGWLTSEGREIKNKSEILALLKALFLPKRLSIIHCLGHQKGDSAEARGNRLADQAAREAAIKTPPDTSTLLI |
| MLVBM_Q7SVK7_3mutAWS | 8,061 | LGIEDEYRLHETSTEPDVSLGSTWLSDFPQAWAETGGMGLAVRQAPLIIPLKATSTPVSIQQYPMSHEARLGIKPHIQRLLDQGILVPCQSPWNTPLLPV |
| | | KKPGTNDYRPVQDLREVNKRVEDIHPTVPNPYNLLSGLPPSHQWYTVLDLKDAFFCLRLHPTSQPLFAFEWRDPGMGISGQLTWTRLPQGFKNSPTL |
| | | FNEALHRDLADFRIQHPDLILLQYVDDILLAATSELDCQQGTRALLQTLGDLGYRASAKKAQICQKQVKYLGYLLREGQRWLTEARKETVMGQPVPKTP |
| | | RQLREFLGKAGFCRLFIPGFAEMAAPLYPLTKPGTLFSWGPDQQKAYQEIKQALLTAPALGLPDLTKPFELFVDEKQGYAKGVLTQKLGPWRRPVAYL |
| | | SKKLDPVAAGWPPCLRMVAAIAVLTKDAGKLTMGQPLVILAPHAVEALVKQPPDRWLSNARMTHYQAMLLDTDRVQFGPVVALNPATLLPLPEEGAP |
| | | HDCLEILAETHGTRPDLTDQPIPDADHTWYTDGSSFLQEGQRKAGAAVTTETEVIWAGALPAGTSAQRAELIALTQALKMAEGKRLNVYTDSRYAFAT |
| | | AHIHGEIYRRRGWLTSEGREIKNKSEILALLKALFLPKRLSIIHCLGHQKGDSAEARGNRLADQAAREAAIKTPPDTSTLLI |
| MLVCB_P08361 | 8,062 | TLNIEDEYRLHETSKEPDVSLGSTWLSDFPQAWAETGGMGLAVRQAPLIIPLKATSTPVSIKQYPMSQEARLGIKPHIQRLLDQGILVPCQSPWNTPLLP |
| | | VKKPGTNDYRPVQDLREVNKRVEDIHPTVPNPYNLLSGLPPSHQWYTVLDLKDAFFCLRLHPTSQPLFAFEWRDPEMGISGQLTWTRLPQGFKNSPT |
| | | LFDEALHRDLAGFRIQHPDLILLQYVDDLLLAATSELDCQQGTRALLQTLGDLGYRASAKKAQICQKQVKYLGYLLKEGQRWLTEARKETVMGQPIPKT |
| | | PRQLREFLGTAGFCRLWIPGFAEMAAPLYPLTKTGTLFNWGPDQQKAFQEIKQALLTAPALGLPDLTKPFELFVDEKQGYAKGVLTQKLGPWRRPVAY |
| | | LSKKLDPVAAGWPPCLRMVAAIAVLTKDAGKLTMGQPLVILAPHAVEALVKQPPDRWLSNARMTHYQALLLDTDRVQFGPVVALNPATLLPLPEEGLQ |
| | | HDCLDILAEAHGTRSDLMDQPLPDADHTWYTDGSSFLQEGQRKAGAAVTTETEVIWARALPAGTSAQRAELIALTQALKMAEGKKLNVYTDSRYAFAT |
| | | AHIHGEIYRRRGLLTSEGKEIKNKDEILALLKALFLPKRLSIIHCPGHQKGNSAEARGNRMADQAAREVATRETPETSTLL |
| MLVCB_P08361_3mut | 8,063 | TLNIEDEYRLHETSKEPDVSLGSTWLSDFPQAWAETGGMGLAVRQAPLIIPLKATSTPVSIKQYPMSQEARLGIKPHIQRLLDQGILVPCQSPWNTPLLP |
| | | VKKPGTNDYRPVQDLREVNKRVEDIHPTVPNPYNLLSGLPPSHQWYTVLDLKDAFFCLRLHPTSQPLFAFEWRDPEMGISGQLTWTRLPQGFKNSPT |
| | | LFNEALHRDLAGFRIQHPDLILLQYVDDLLLAATSELDCQQGTRALLQTLGDLGYRASAKKAQICQKQVKYLGYLLKEGQRWLTEARKETVMGQPIPKT |
| | | PRQLREFLGTAGFCRLWIPGFAEMAAPLYPLTKPGTLFNWGPDQQKAFQEIKQALLTAPALGLPDLTKPFELFVDEKQGYAKGVLTQKLGPWRRPVA |
| | | YLSKKLDPVAAGWPPCLRMVAAIAVLTKDAGKLTMGQPLVILAPHAVEALVKQPPDRWLSNARMTHYQALLLDTDRVQFGPVVALNPATLLPLPEEGL |
| | | QHDCLDILAEAHGTRSDLMDQPLPDADHTWYTDGSSFLQEGQRKAGAAVTTETEVIWARALPAGTSAQRAELIALTQALKMAEGKKLNVYTDSRYAF |
| | | ATAHIHGEIYRRRGWLTSEGKEIKNKDEILALLKALFLPKRLSIIHCPGHQKGNSAEARGNRMADQAAREVATRETPETSTLL |
| MLVCB_P08361_3mutA | 8,064 | TLNIEDEYRLHETSKEPDVSLGSTWLSDFPQAWAETGGMGLAVRQAPLIIPLKATSTPVSIKQYPMSQEARLGIKPHIQRLLDQGILVPCQSPWNTPLLP |
| | | VKKPGTNDYRPVQDLREVNKRVEDIHPTVPNPYNLLSGLPPSHQWYTVLDLKDAFFCLRLHPTSQPLFAFEWRDPEMGISGQLTWTRLPQGFKNSPT |
| | | LFNEALHRDLAGFRIQHPDLILLQYVDDLLLAATSELDCQQGTRALLQTLGDLGYRASAKKAQICQKQVKYLGYLLKEGQRWLTEARKETVMGQPIPKT |
| | | PRQLREFLGKAGFCRLFIPGFAEMAAPLYPLTKPGTLFNWGPDQQKAFQEIKQALLTAPALGLPDLTKPFELFVDEKQGYAKGVLTQKLGPWRRPVAY |
| | | LSKKLDPVAAGWPPCLRMVAAIAVLTKDAGKLTMGQPLVILAPHAVEALVKQPPDRWLSNARMTHYQALLLDTDRVQFGPVVALNPATLLPLPEEGLQ |
| | | HDCLDILAEAHGTRSDLMDQPLPDADHTWYTDGSSFLQEGQRKAGAAVTTETEVIWARALPAGTSAQRAELIALTQALKMAEGKKLNVYTDSRYAFAT |
| | | AHIHGEIYRRRGWLTSEGKEIKNKDEILALLKALFLPKRLSIIHCPGHQKGNSAEARGNRMADQAAREVATRETPETSTLL |
| MLVF5_P26810 | 8,065 | TLNIEDEYRLHETSKGPDVPLGSTWLSDFPQAWAETGGMGLAFRQAPLIISLKATSTPVSIKQYPMSQEARLGIKPHIQRLLDQGILVPCQSPWNTPLLP |
| | | VKKPGTNDYRPVQDLREVNKRVEDIHPTVPNPYNLLSGLPPSHQWYTVLDLKDAFFCLRLHPTSQSLFAFEWKDPEMGISGQLTWTRLPQGFKNSPT |
| | | LFDEALHRDLADFRIQHPDLILLQYVDDLLLAATSELDCQQGTRALLQTLGDLGYRASAKKAQICQKQVKYLGYLLKEGQRWLTEARKETVMGQPTPKT |
| | | PRQLREFLGTAGLCRLWIPGFAEMAAPLYPLTKTGTLFKWGPDQQKAYQEIKQALLTAPALGLPDLTKPFELFVDEKQGYAKGVLTQKLGPWRRPVAY |
| | | LSKKLDPVAAGWPPCLRMVAAIAVLTKDVGKLTMGQPLVILAPHAVEALVKQPPDRWLSNARMTHYQALLLDTDRVQFGPIVALNPATLLPLPEEGLQ |
| | | HDCLDILAEAHGTRPDLTDQPLPDADHTWYTDGSSFLQEGQRRAGAAVTTETEVIWAKALPAGTSAQRAELIALTQALKMAAGKKLNVYTDSRYAFAT |
| | | AHIHGEIYRRRGLLTSEGKEIKNKDEILALLKALFLPKRLSIIHCPGHQKGNHAEARGNRMADQAAREVATRETPETSTLL |
| MLVF5_P26810_3mut | 8,066 | TLNIEDEYRLHETSKGPDVPLGSTWLSDFPQAWAETGGMGLAFRQAPLIISLKATSTPVSIKQYPMSQEARLGIKPHIQRLLDQGILVPCQSPWNTPLLP |
| | | VKKPGTNDYRPVQDLREVNKRVEDIHPTVPNPYNLLSGLPPSHQWYTVLDLKDAFFCLRLHPTSQSLFAFEWKDPEMGISGQLTWTRLPQGFKNSPT |
| | | LFNEALHRDLADFRIQHPDLILLQYVDDLLLAATSELDCQQGTRALLQTLGDLGYRASAKKAQICQKQVKYLGYLLKEGQRWLTEARKETVMGQPTPKT |
| | | PRQLREFLGTAGLCRLWIPGFAEMAAPLYPLTKPGTLFKWGPDQQKAYQEIKQALLTAPALGLPDLTKPFELFVDEKQGYAKGVLTQKLGPWRRPVAY |
| | | LSKKLDPVAAGWPPCLRMVAAIAVLTKDVGKLTMGQPLVILAPHAVEALVKQPPDRWLSNARMTHYQALLLDTDRVQFGPIVALNPATLLPLPEEGLQ |
| | | HDCLDILAEAHGTRPDLTDQPLPDADHTWYTDGSSFLQEGQRRAGAAVTTETEVIWAKALPAGTSAQRAELIALTQALKMAAGKKLNVYTDSRYAFAT |
| | | AHIHGEIYRRRGWLTSEGKEIKNKDEILALLKALFLPKRLSIIHCPGHQKGNHAEARGNRMADQAAREVATRETPETSTLL |
| MLVF5_P26810_3mutA | 8,067 | TLNIEDEYRLHETSKGPDVPLGSTWLSDFPQAWAETGGMGLAFRQAPLIISLKATSTPVSIKQYPMSQEARLGIKPHIQRLLDQGILVPCQSPWNTPLLP |
| | | VKKPGTNDYRPVQDLREVNKRVEDIHPTVPNPYNLLSGLPPSHQWYTVLDLKDAFFCLRLHPTSQSLFAFEWKDPEMGISGQLTWTRLPQGFKNSPT |
| | | LFNEALHRDLADFRIQHPDLILLQYVDDLLLAATSELDCQQGTRALLQTLGDLGYRASAKKAQICQKQVKYLGYLLKEGQRWLTEARKETVMGQPTPKT |
| | | PRQLREFLGKAGLCRLFIPGFAEMAAPLYPLTKPGTLFKWGPDQQKAYQEIKQALLTAPALGLPDLTKPFELFVDEKQGYAKGVLTQKLGPWRRPVAY |
| | | LSKKLDPVAAGWPPCLRMVAAIAVLTKDVGKLTMGQPLVILAPHAVEALVKQPPDRWLSNARMTHYQALLLDTDRVQFGPIVALNPATLLPLPEEGLQ |
| | | HDCLDILAEAHGTRPDLTDQPLPDADHTWYTDGSSFLQEGQRRAGAAVTTETEVIWAKALPAGTSAQRAELIALTQALKMAAGKKLNVYTDSRYAFAT |
| | | AHIHGEIYRRRGWLTSEGKEIKNKDEILALLKALFLPKRLSIIHCPGHQKGNHAEARGNRMADQAAREVATRETPETSTLL |
| MLVFF_P26809_3mut | 8,068 | TLNIEDEYRLHETSKGPDVPLGSTWLSDFPQAWAETGGMGLAVRQAPLIIPLKATSTPVSIKQYPMSQEARLGIKPHIQRLLDQGILVPCQSPWNTPLLP |
| | | VKKPGTNDYRPVQDLREVNKRVEDIHPTVPNPYNLLSGLPPSHQWYTVLDLKDAFFCLRLHPTSQSLFAFEWRDPEMGISGQLTWTRLPQGFKNSPT |
| | | LFNEALHRDLADFRIQHPDLILLQYVDDLLLAATSELDCQQGTRALLQTLGDLGYRASAKKAQICQKQVKYLGYLLKEGQRWLTEARKETVMGQPTPKT |
| | | PRQLREFLGTAGFCRLWIPGFAEMAAPLYPLTKPGTLFEWGPDQQKAYQEIKQALLTAPALGLPDLTKPFELFVDEKQGYAKGVLTQKLGPWRRPVA |
| | | YLSKKLDPVAAGWPPCLRMVAAIAVLTKDAGKLTMGQPLVILAPHAVEALVKQPPDRWLSNARMTHYQALLLDTDRVQFGPIVALNPATLLPLPEEGLQ |
| | | HDCLDILAEAHGTRPDLTDQPLPDADHTWYTDGSSFLQEGQRKAGAAVTTETEVVWAKALPAGTSAQRAELIALTQALKMAEGKKLNVYTDSRYAFA |
| | | TAHIHGEIYRRRGWLTSEGKEIKNKDEILALLKALFLPKRLSIIHCPGHQKGNRAEARGNRMADQAAREVATRETPETSTLL |
| MLVFF_P26809_3mutA | 8,069 | TLNIEDEYRLHETSKGPDVPLGSTWLSDFPQAWAETGGMGLAVRQAPLIIPLKATSTPVSIKQYPMSQEARLGIKPHIQRLLDQGILVPCQSPWNTPLLP |
| | | VKKPGTNDYRPVQDLREVNKRVEDIHPTVPNPYNLLSGLPPSHQWYTVLDLKDAFFCLRLHPTSQSLFAFEWRDPEMGISGQLTWTRLPQGFKNSPT |
| | | LFNEALHRDLADFRIQHPDLILLQYVDDLLLAATSELDCQQGTRALLQTLGDLGYRASAKKAQICQKQVKYLGYLLKEGQRWLTEARKETVMGQPTPKT |
| | | PRQLREFLGKAGFCRLFIPGFAEMAAPLYPLTKPGTLFEWGPDQQKAYQEIKQALLTAPALGLPDLTKPFELFVDEKQGYAKGVLTQKLGPWRRPVAY |
| | | LSKKLDPVAAGWPPCLRMVAAIAVLTKDAGKLTMGQPLVILAPHAVEALVKQPPDRWLSNARMTHYQALLLDTDRVQFGPIVALNPATLLPLPEEGLQ |
| | | HDCLDILAEAHGTRPDLTDQPLPDADHTWYTDGSSFLQEGQRKAGAAVTTETEVVWAKALPAGTSAQRAELIALTQALKMAEGKKLNVYTDSRYAFA |
| | | TAHIHGEIYRRRGWLTSEGKEIKNKDEILALLKALFLPKRLSIIHCPGHQKGNRAEARGNRMADQAAREVATRETPETSTLL |
| MLVMS_P03355 | 8,070 | TLNIEDEHRLHETSKEPDVSLGSTWLSDFPQAWAETGGMGLAVRQAPLIIPLKATSTPVSIKQYPMSQEARLGIKPHIQRLLDQGILVPCQSPWNTPLLP |
| | | VKKPGTNDYRPVQDLREVNKRVEDIHPTVPNPYNLLSGLPPSHQWYTVLDLKDAFFCLRLHPTSQPLFAFEWRDPEMGISGQLTWTRLPQGFKNSPT |
| | | LFDEALHRDLADFRIQHPDLILLQYVDDLLLAATSELDCQQGTRALLQTLGNLGYRASAKKAQICQKQVKYLGYLLKEGQRWLTEARKETVMGQPTPKT |
| | | PRQLREFLGTAGFCRLWIPGFAEMAAPLYPLTKTGTLFNWGPDQQKAYQEIKQALLTAPALGLPDLTKPFELFVDEKQGYAKGVLTQKLGPWRRPVA |
| | | YLSKKLDPVAAGWPPCLRMVAAIAVLTKDAGKLTMGQPLVILAPHAVEALVKQPPDRWLSNARMTHYQALLLDTDRVQFGPVVALNPATLLPLPEEGL |
| | | QHNCLDILAEAHGTRPDLTDQPLPDADHTWYTDGSSLLQEGQRKAGAAVTTETEVIWAKALPAGTSAQRAELIALTQALKMAEGKKLNVYTDSRYAFA |
| | | TAHIHGEIYRRRGLLTSEGKEIKNKDEILALLKALFLPKRLSIIHCPGHQKGHSAEARGNRMADQAARKAAITETPDTSTLL |
| MLVMS_reference | 8,137 | TLNIEDEYRLHETSKEPDVSLGSTWLSDFPQAWAETGGMGLAVRQAPLIIPLKATSTPVSIKQYPMSQEARLGIKPHIQRLLDQGILVPCQSPWNTPLLP |
| | | VKKPGTNDYRPVQDLREVNKRVEDIHPTVPNPYNLLSGLPPSHQWYTVLDLKDAFFCLRLHPTSQPLFAFEWRDPEMGISGQLTWTRLPQGFKNSPT |
| | | LFNEALHRDLADFRIQHPDLILLQYVDDLLLAATSELDCQQGTRALLQTLGNLGYRASAKKAQICQKQVKYLGYLLKEGQRWLTEARKETVMGQPTPKT |
| | | PRQLREFLGKAGFCRLFIPGFAEMAAPLYPLTKPGTLFNWGPDQQKAYQEIKQALLTAPALGLPDLTKPFELFVDEKQGYAKGVLTQKLGPWRRPVAY |
| | | LSKKLDPVAAGWPPCLRMVAAIAVLTKDAGKLTMGQPLVILAPHAVEALVKQPPDRWLSNARMTHYQALLLDTDRVQFGPVVALNPATLLPLPEEGLQ |
| | | HNCLDILAEAHGTRPDLTDQPLPDADHTWYTDGSSLLQEGQRKAGAAVTTETEVIWAKALPAGTSAQRAELIALTQALKMAEGKKLNVYTDSRYAFAT |
| | | AHIHGEIYRRRGWLTSEGKEIKNKDEILALLKALFLPKRLSIIHCPGHQKGHSAEARGNRMADQAARKAAITETPDTSTLLIENSSP |
| MLVMS_P03355 | 8,071 | TLNIEDEHRLHETSKEPDVSLGSTWLSDFPQAWAETGGMGLAVRQAPLIIPLKATSTPVSIKQYPMSQEARLGIKPHIQRLLDQGILVPCQSPWNTPLLP |
| | | VKKPGTNDYRPVQDLREVNKRVEDIHPTVPNPYNLLSGLPPSHQWYTVLDLKDAFFCLRLHPTSQPLFAFEWRDPEMGISGQLTWTRLPQGFKNSPT |
| | | LFDEALHRDLADFRIQHPDLILLQYVDDLLLAATSELDCQQGTRALLQTLGNLGYRASAKKAQICQKQVKYLGYLLKEGQRWLTEARKETVMGQPTPKT |
| | | PRQLREFLGTAGFCRLWIPGFAEMAAPLYPLTKTGTLFNWGPDQQKAYQEIKQALLTAPALGLPDLTKPFELFVDEKQGYAKGVLTQKLGPWRRPVA |
| | | YLSKKLDPVAAGWPPCLRMVAAIAVLTKDAGKLTMGQPLVILAPHAVEALVKQPPDRWLSNARMTHYQALLLDTDRVQFGPVVALNPATLLPLPEEGL |
| | | QHNCLDILAEAHGTRPDLTDQPLPDADHTWYTDGSSLLQEGQRKAGAAVTTETEVIWAKALPAGTSAQRAELIALTQALKMAEGKKLNVYTDSRYAFA |
| | | TAHIHGEIYRRRGLLTSEGKEIKNKDEILALLKALFLPKRLSIIHCPGHQKGHSAEARGNRMADQAARKAAITETPDTSTLL |
| MLVMS_P03355_3mut | 8,072 | TLNIEDEHRLHETSKEPDVSLGSTWLSDFPQAWAETGGMGLAVRQAPLIIPLKATSTPVSIKQYPMSQEARLGIKPHIQRLLDQGILVPCQSPWNTPLLP |
| | | VKKPGTNDYRPVQDLREVNKRVEDIHPTVPNPYNLLSGLPPSHQWYTVLDLKDAFFCLRLHPTSQPLFAFEWRDPEMGISGQLTWTRLPQGFKNSPT |
| | | LFNEALHRDLADFRIQHPDLILLQYVDDLLLAATSELDCQQGTRALLQTLGNLGYRASAKKAQICQKQVKYLGYLLKEGQRWLTEARKETVMGQPTPKT |
| | | PRQLREFLGTAGFCRLWIPGFAEMAAPLYPLTKPGTLFNWGPDQQKAYQEIKQALLTAPALGLPDLTKPFELFVDEKQGYAKGVLTQKLGPWRRPVA |
| | | YLSKKLDPVAAGWPPCLRMVAAIAVLTKDAGKLTMGQPLVILAPHAVEALVKQPPDRWLSNARMTHYQALLLDTDRVQFGPVVALNPATLLPLPEEGL |
| | | QHNCLDILAEAHGTRPDLTDQPLPDADHTWYTDGSSLLQEGQRKAGAAVTTETEVIWAKALPAGTSAQRAELIALTQALKMAEGKKLNVYTDSRYAFA |
| | | TAHIHGEIYRRRGWLTSEGKEIKNKDEILALLKALFLPKRLSIIHCPGHQKGHSAEARGNRMADQAARKAAITETPDTSTLL |
| MLVMS_P03355_3mut | 8,073 | TLNIEDEHRLHETSKEPDVSLGSTWLSDFPQAWAETGGMGLAVRQAPLIIPLKATSTPVSIKQYPMSQEARLGIKPHIQRLLDQGILVPCQSPWNTPLLP |
| | | VKKPGTNDYRPVQDLREVNKRVEDIHPTVPNPYNLLSGLPPSHQWYTVLDLKDAFFCLRLHPTSQPLFAFEWRDPEMGISGQLTWTRLPQGFKNSPT |
| | | LFNEALHRDLADFRIQHPDLILLQYVDDLLLAATSELDCQQGTRALLQTLGNLGYRASAKKAQICQKQVKYLGYLLKEGQRWLTEARKETVMGQPTPKT |
| | | PRQLREFLGTAGFCRLWIPGFAEMAAPLYPLTKPGTLFNWGPDQQKAYQEIKQALLTAPALGLPDLTKPFELFVDEKQGYAKGVLTQKLGPWRRPVA |
| | | YLSKKLDPVAAGWPPCLRMVAAIAVLTKDAGKLTMGQPLVILAPHAVEALVKQPPDRWLSNARMTHYQALLLDTDRVQFGPVVALNPATLLPLPEEGL |
| | | QHNCLDILAEAHGTRPDLTDQPLPDADHTWYTDGSSLLQEGQRKAGAAVTTETEVIWAKALPAGTSAQRAELIALTQALKMAEGKKLNVYTDSRYAFA |
| | | TAHIHGEIYRRRGWLTSEGKEIKNKDEILALLKALFLPKRLSIIHCPGHQKGHSAEARGNRMADQAARKAAITETPDTSTLL |
| MLVMS_P03355_3mutA_WS | 8,074 | TLNIEDEHRLHETSKEPDVSLGSTWLSDFPQAWAETGGMGLAVRQAPLIIPLKATSTPVSIKQYPMSQEARLGIKPHIQRLLDQGILVPCQSPWNTPLLP |
| | | VKKPGTNDYRPVQDLREVNKRVEDIHPTVPNPYNLLSGLPPSHQWYTVLDLKDAFFCLRLHPTSQPLFAFEWRDPEMGISGQLTWTRLPQGFKNSPT |
| | | LFNEALHRDLADFRIQHPDLILLQYVDDLLLAATSELDCQQGTRALLQTLGNLGYRASAKKAQICQKQVKYLGYLLKEGQRWLTEARKETVMGQPTPKT |
| | | PRQLREFLGKAGFCRLFIPGFAEMAAPLYPLTKPGTLFNWGPDQQKAYQEIKQALLTAPALGLPDLTKPFELFVDEKQGYAKGVLTQKLGPWRRPVAY |
| | | LSKKLDPVAAGWPPCLRMVAAIAVLTKDAGKLTMGQPLVILAPHAVEALVKQPPDRWLSNARMTHYQALLLDTDRVQFGPVVALNPATLLPLPEEGLQ |
| | | HNCLDILAEAHGTRPDLTDQPLPDADHTWYTDGSSLLQEGQRKAGAAVTTETEVIWAKALPAGTSAQRAELIALTQALKMAEGKKLNVYTDSRYAFAT |
| | | AHIHGEIYRRRGWLTSEGKEIKNKDEILALLKALFLPKRLSIIHCPGHQKGHSAEARGNRMADQAARKAAITETPDTSTLL |
| MLVMS_P03355_3mutA_WS | 8,075 | TLNIEDEHRLHETSKEPDVSLGSTWLSDFPQAWAETGGMGLAVRQAPLIIPLKATSTPVSIKQYPMSQEARLGIKPHIQRLLDQGILVPCQSPWNTPLLP |
| | | VKKPGTNDYRPVQDLREVNKRVEDIHPTVPNPYNLLSGLPPSHQWYTVLDLKDAFFCLRLHPTSQPLFAFEWRDPEMGISGQLTWTRLPQGFKNSPT |
| | | LFNEALHRDLADFRIQHPDLILLQYVDDLLLAATSELDCQQGTRALLQTLGNLGYRASAKKAQICQKQVKYLGYLLKEGQRWLTEARKETVMGQPTPKT |
| | | PRQLREFLGKAGFCRLFIPGFAEMAAPLYPLTKPGTLFNWGPDQQKAYQEIKQALLTAPALGLPDLTKPFELFVDEKQGYAKGVLTQKLGPWRRPVAY |
| | | LSKKLDPVAAGWPPCLRMVAAIAVLTKDAGKLTMGQPLVILAPHAVEALVKQPPDRWLSNARMTHYQALLLDTDRVQFGPVVALNPATLLPLPEEGLQ |
| | | HNCLDILAEAHGTRPDLTDQPLPDADHTWYTDGSSLLQEGQRKAGAAVTTETEVIWAKALPAGTSAQRAELIALTQALKMAEGKKLNVYTDSRYAFAT |
| | | AHIHGEIYRRRGWLTSEGKEIKNKDEILALLKALFLPKRLSIIHCPGHQKGHSAEARGNRMADQAARKAAITETPDTSTLL |
| MLVMS_P03355_PLV919 | 8,076 | TLNIEDEYRLHETSKEPDVSLGSTWLSDFPQAWAETGGMGLAVRQAPLIIPLKATSTPVSIKQYPMSQEARLGIKPHIQRLLDQGILVPCQSPWNTPLLP |
| | | VKKPGTNDYRPVQDLREVNKRVEDIHPTVPNPYNLLSGLPPSHQWYTVLDLKDAFFCLRLHPTSQPLFAFEWRDPEMGISGQLTWTRLPQGFKNSPT |
| | | LFNEALHRDLADFRIQHPDLILLQYVDDLLLAATSELDCQQGTRALLQTLGNLGYRASAKKAQICQKQVKYLGYLLKEGQRWLTEARKETVMGQPTPKT |
| | | PRQLREFLGKAGFCRLFIPGFAEMAAPLYPLTKPGTLFNWGPDQQKAYQEIKQALLTAPALGLPDLTKPFELFVDEKQGYAKGVLTQKLGPWRRPVAY |
| | | LSKKLDPVAAGWPPCLRMVAAIAVLTKDAGKLTMGQPLVILAPHAVEALVKQPPDRWLSNARMTHYQALLLDTDRVQFGPVVALNPATLLPLPEEGLQ |
| | | HNCLDILAEAHGTRPDLTDQPLPDADHTWYTDGSSLLQEGQRKAGAAVTTETEVIWAKALPAGTSAQRAELIALTQALKMAEGKKLNVYTDSRYAFAT |
| | | AHIHGEIYRRRGWLTSEGKEIKNKDEILALLKALFLPKRLSIIHCPGHQKGHSAEARGNRMADQAARKAAITETPDTSTLLIENSSPSGGSKRTADGSEFE |
| MLVMS_P03355_PLV919 | 8,077 | TLNIEDEYRLHETSKEPDVSLGSTWLSDFPQAWAETGGMGLAVRQAPLIIPLKATSTPVSIKQYPMSQEARLGIKPHIQRLLDQGILVPCQSPWNTPLLP |
| | | VKKPGTNDYRPVQDLREVNKRVEDIHPTVPNPYNLLSGLPPSHQWYTVLDLKDAFFCLRLHPTSQPLFAFEWRDPEMGISGQLTWTRLPQGFKNSPT |
| | | LFNEALHRDLADFRIQHPDLILLQYVDDLLLAATSELDCQQGTRALLQTLGNLGYRASAKKAQICQKQVKYLGYLLKEGQRWLTEARKETVMGQPTPKT |
| | | PRQLREFLGKAGFCRLFIPGFAEMAAPLYPLTKPGTLFNWGPDQQKAYQEIKQALLTAPALGLPDLTKPFELFVDEKQGYAKGVLTQKLGPWRRPVAY |
| | | LSKKLDPVAAGWPPCLRMVAAIAVLTKDAGKLTMGQPLVILAPHAVEALVKQPPDRWLSNARMTHYQALLLDTDRVQFGPVVALNPATLLPLPEEGLQ |
| | | HNCLDILAEAHGTRPDLTDQPLPDADHTWYTDGSSLLQEGQRKAGAAVTTETEVIWAKALPAGTSAQRAELIALTQALKMAEGKKLNVYTDSRYAFAT |
| | | AHIHGEIYRRRGWLTSEGKEIKNKDEILALLKALFLPKRLSIIHCPGHQKGHSAEARGNRMADQAARKAAITETPDTSTLLIENSSPSGGSKRTADGSEFE |
| MLVRD_P11227 | 8,078 | TLNIEDEYRLHEISTEPDVSPGSTWLSDFPQAWAETGGMGLAVRQAPLIIPLKATSTPVSIKQYPMSQEAKLGIKPHIQRLLDQGILVPCQSPWNTPLLP |
| | | VKKPGTNDYRPVQGLREVNKRVEDIHPTVPNPYNLLSGLPTSHRWYTVLDLKDAFFCLRLHPTSQPLFASEWRDPGMGISGQLTWTRLPQGFKNSPT |
| | | LFDEALHRGLADFRIQHPDLILLQYVDDLLLAATSELDCQQGTRALLKTLGNLGYRASAKKAQICQKQVKYLGYLLREGQRWLTEARKETVMGQPTPKT |
| | | PRQLREFLGTAGFCRLWIPRFAEMAAPLYPLTKTGTLFNWGPDQQKAYHEIKQALLTAPALGLPDLTKPFELFVDEKQGYAKGVLTQKLGPWRRPVAY |
| | | LSKKLDPVAAGWPPCLRMVAAIAVLTKDAGKLTMGQPLVILAPHAVEALVKQPPDRWLSNARMTHYQAMLLDTDRVQFGPVVALNPATLLPLPEEGAP |
| | | HDCLEILAETHGTEPDLTDQPIPDADHTWYTDGSSFLQEGQRKAGAAVTTETEVIWARALPAGTSAQRAELIALTQALKMAEGKRLNVYTDSRYAFATA |
| | | HIHGEIYKRRGLLTSEGREIKNKSEILALLKALFLPKRLSIIHCLGHQKGDSAEARGNRLADQAAREAAIKTPPDTSTLL |
| MLVRD_P11227_3mut | 8,079 | TLNIEDEYRLHEISTEPDVSPGSTWLSDFPQAWAETGGMGLAVRQAPLIIPLKATSTPVSIKQYPMSQEAKLGIKPHIQRLLDQGILVPCQSPWNTPLLP |
| | | VKKPGTNDYRPVQGLREVNKRVEDIHPTVPNPYNLLSGLPTSHRWYTVLDLKDAFFCLRLHPTSQPLFASEWRDPGMGISGQLTWTRLPQGFKNSPT |
| | | LFNEALHRGLADFRIQHPDLILLQYVDDLLLAATSELDCQQGTRALLKTLGNLGYRASAKKAQICQKQVKYLGYLLREGQRWLTEARKETVMGQPTPKT |
| | | PRQLREFLGTAGFCRLWIPRFAEMAAPLYPLTKPGTLFNWGPDQQKAYHEIKQALLTAPALGLPDLTKPFELFVDEKQGYAKGVLTQKLGPWRRPVAY |
| | | LSKKLDPVAAGWPPCLRMVAAIAVLTKDAGKLTMGQPLVILAPHAVEALVKQPPDRWLSNARMTHYQAMLLDTDRVQFGPVVALNPATLLPLPEEGAP |
| | | HDCLEILAETHGTEPDLTDQPIPDADHTWYTDGSSFLQEGQRKAGAAVTTETEVIWARALPAGTSAQRAELIALTQALKMAEGKRLNVYTDSRYAFATA |
| | | HIHGEIYKRRGWLTSEGREIKNKSEILALLKALFLPKRLSIIHCLGHQKGDSAEARGNRLADQAAREAAIKTPPDTSTLL |
| MMTVB_P03365 | 8,080 | WVQEISDSRPMLHIYLNGRRFLGLLNTGADKTCIAGRDWPANWPIHQTESSLQGLGMACGVARSSQPLRWQHEDKSGIIHPFVIPTLPFTLWGRDIMK |
| | | DIKVRLMTDSPDDSQDLMIGAIESNLFADQISWKSDQPVWLNQWPLKQEKLQALQQLVTEQLQLGHLEESNSPWNTPVFVIKKKSGKWRLLQDLRAV |
| | | NATMHDMGALQPGLPSPVAVPKGWEIIIIDLQDCFFNIKLHPEDCKRFAFSVPSPNFKRPYQRFQWKVLPQGMKNSPTLCQKFVDKAILTVRDKYQDS |
| | | YIVHYMDDILLAHPSRSIVDEILTSMIQALNKHGLVVSTEKIQKYDNLKYLGTHIQGDSVSYQKLQIRTDKLRTLNDFQKLLGNINWIRPFLKLTTGELKPLF |
| | | EILNGDSNPISTRKLTPEACKALQLMNERLSTARVKRLDLSQPWSLCILKTEYTPTACLWQDGVVEWIHLPHISPKVITPYDIFCTQLIIKGRHRSKELFSK |
| | | DPDYIVVPYTKVQFDLLLQEKEDWPISLLGFLGEVHFHLPKDPLLTFTLQTAIIFPHMTSTTPLEKGIVIFTDGSANGRSVTYIQGREPIIKENTQNTAQQA |
| | | EIVAVITAFEEVSQPFNLYTDSKYVTGLFPEIETATLSPRTKIYTELKHLQRLIHKRQEKFYIGHIRGHTGLPGPLAQGNAYADSLTRILT |
| MMTVB_P03365 | 8,081 | WVQEISDSRPMLHIYLNGRRFLGLLNTGADKTCIAGRDWPANWPIHQTESSLQGLGMACGVARSSQPLRWQHEDKSGIIHPFVIPTLPFTLWGRDIMK |
| | | DIKVRLMTDSPDDSQDLMIGAIESNLFADQISWKSDQPVWLNQWPLKQEKLQALQQLVTEQLQLGHLEESNSPWNTPVFVIKKKSGKWRLLQDLRAV |
| | | NATMHDMGALQPGLPSPVAVPKGWEIIIIDLQDCFFNIKLHPEDCKRFAFSVPSPNFKRPYQRFQWKVLPQGMKNSPTLCQKFVDKAILTVRDKYQDS |
| | | YIVHYMDDILLAHPSRSIVDEILTSMIQALNKHGLVVSTEKIQKYDNLKYLGTHIQGDSVSYQKLQIRTDKLRTLNDFQKLLGNINWIRPFLKLTTGELKPLF |
| | | EILNGDSNPISTRKLTPEACKALQLMNERLSTARVKRLDLSQPWSLCILKTEYTPTACLWQDGVVEWIHLPHISPKVITPYDIFCTQLIIKGRHRSKELFSK |
| | | DPDYIVVPYTKVQFDLLLQEKEDWPISLLGFLGEVHFHLPKDPLLTFTLQTAIIFPHMTSTTPLEKGIVIFTDGSANGRSVTYIQGREPIIKENTQNTAQQA |
| | | EIVAVITAFEEVSQPFNLYTDSKYVTGLFPEIETATLSPRTKIYTELKHLQRLIHKRQEKFYIGHIRGHTGLPGPLAQGNAYADSLTRILT |
| MMTVB_P03365_2mut | 8,082 | WVQEISDSRPMLHIYLNGRRFLGLLNTGADKTCIAGRDWPANWPIHQTESSLQGLGMACGVARSSQPLRWQHEDKSGIIHPFVIPTLPFTLWGRDIMK |
| | | DIKVRLMTDSPDDSQDLMIGAIESNLFADQISWKSDQPVWLNQWPLKQEKLQALQQLVTEQLQLGHLEESNSPWNTPVFVIKKKSGKWRLLQDLRAV |
| | | NATMHDMGALQPGLPSPVAVPKGWEIIIIDLQDCFFNIKLHPEDCKRFAFSVPSPNFKRPYQRFQWKVLPQGMKNSPTLCQKFVDKAILTVRDKYQDS |
| | | YIVHYMDDILLAHPSRSIVDEILTSMIQALNKHGLVVSTEKIQKYDNLKYLGTHIQGDSVSYQKLQIRTDKLRTLNDFQKLLGNINWIRPFLKLTTGELKPLF |
| | | EILNPDSNPISTRKLTPEACKALQLMNERLSTARVKRLDLSQPWSLCILKTEYTPTACLWQDGVVEWIHLPHISPKVITPYDIFCTQLIIKGRHRSKELFSK |
| | | DPDYIVVPYTKVQFDLLLQEKEDWPISLLGFLGEVHFHLPKDPLLTFTLQTAIIFPHMTSTTPLEKGIVIFTDGSANGRSVTYIQGREPIIKENTQNTAQQA |
| | | EIVAVITAFEEVSQPFNLYTDSKYVTGLFPEIETATLSPRTKIYTELKHLQRLIHKRQEKFYIGHIRGHTGLPGPLAQGNAYADSLTRILT |
| MMTVB_P03365_2mut_WS | 8,083 | VQEISDSRPMLHIYLNGRRFLGLLDTGADKTCIAGRDWPANWPIHQTESSLQGLGMACGVARSSQPLRWQHEDKSGIIHPFVIPTLPFTLWGRDIMKDI |
| | | KVRLMTDSPDDSQDLMIGAIESNLFADQISWKSDQPVWLNQWPLKQEKLQALQQLVTEQLQLGHLEESNSPWNTPVFVIKKKSGKWRLLQDLRAVNA |
| | | TMHDMGALQPGLPSPVAVPKGWEIIIIDLQDCFFNIKLHPEDCKRFAFSVPSPNFKRPYQRFQWKVLPQGMKNSPTLCQKFVDKAILTVRDKYQDSYIV |
| | | HYMDDILLAHPSRSIVDEILTSMIQALNKHGLVVSTEKIQKYDNLKYLGTHIQGDSVSYQKLQIRTDKLRTLNDFQKLLGNINWIRPFLKLTTGELKPLFEIL |
| | | NPDSNPISTRKLTPEACKALQLMNERLSTARVKRLDLSQPWSLCILKTEYTPTACLWQDGVVEWIHLPHISPKVITPYDIFCTQLIIKGRHRSKELFSKDP |
| | | DYIVVPYTKVQFDLLLQEKEDWPISLLGFLGEVHFHLPKDPLLTFTLQTAIIFPHMTSTTPLEKGIVIFTDGSANGRSVTYIQGREPIIKENTQNTAQQAEIV |
| | | AVITAFEEVSQPFNLYTDSKYVTGLFPEIETATLSPRTKIYTELKHLQRLIHKRQEKFYIGHIRGHTGLPGPLAQGNAYADSLTRILTA |
| MMTVB_P03365_2mut_WS | 8,084 | VQEISDSRPMLHIYLNGRRFLGLLDTGADKTCIAGRDWPANWPIHQTESSLQGLGMACGVARSSQPLRWQHEDKSGIIHPFVIPTLPFTLWGRDIMKDI |
| | | KVRLMTDSPDDSQDLMIGAIESNLFADQISWKSDQPVWLNQWPLKQEKLQALQQLVTEQLQLGHLEESNSPWNTPVFVIKKKSGKWRLLQDLRAVNA |
| | | TMHDMGALQPGLPSPVAVPKGWEIIIIDLQDCFFNIKLHPEDCKRFAFSVPSPNFKRPYQRFQWKVLPQGMKNSPTLCQKFVDKAILTVRDKYQDSYIV |
| | | HYMDDILLAHPSRSIVDEILTSMIQALNKHGLVVSTEKIQKYDNLKYLGTHIQGDSVSYQKLQIRTDKLRTLNDFQKLLGNINWIRPFLKLTTGELKPLFEIL |
| | | NPDSNPISTRKLTPEACKALQLMNERLSTARVKRLDLSQPWSLCILKTEYTPTACLWQDGVVEWIHLPHISPKVITPYDIFCTQLIIKGRHRSKELFSKDP |
| | | DYIVVPYTKVQFDLLLQEKEDWPISLLGFLGEVHFHLPKDPLLTFTLQTAIIFPHMTSTTPLEKGIVIFTDGSANGRSVTYIQGREPIIKENTQNTAQQAEIV |
| | | AVITAFEEVSQPFNLYTDSKYVTGLFPEIETATLSPRTKIYTELKHLQRLIHKRQEKFYIGHIRGHTGLPGPLAQGNAYADSLTRILTA |
| MMTVB_P03365_2mutB | 8,085 | WVQEISDSRPMLHIYLNGRRFLGLLNTGADKTCIAGRDWPANWPIHQTESSLQGLGMACGVARSSQPLRWQHEDKSGIIHPFVIPTLPFTLWGRDIMK |
| | | DIKVRLMTDSPDDSQDLMIGAIESNLFADQISWKSDQPVWLNQWPLKQEKLQALQQLVTEQLQLGHLEESNSPWNTPVFVIKKKSGKWRLLQDLRAV |
| | | NATMHDMGALQPGLPSPVAPPKGWEIIIIDLQDCFFNIKLHPEDCKRFAFSVPSPNFKRPYQRFQWKVLPQGMKNSPTLCQKFVDKAILTVRDKYQDS |
| | | YIVHYMDDILLAHPSRSIVDEILTSMIQALNKHGLVVSTEKIQKYDNLKYLGTHIQGDSVSYQKLQIRTDKLRTLNDFQKLLGNINWIRPFLKLTTGELKPLF |
| | | EILNPDSNPISTRKLTPEACKALQLMNERLSTARVKRLDLSQPWSLCILKTEYTPTACLWQDGVVEWIHLPHISPKVITPYDIFCTQLIIKGRHRSKELFSK |
| | | DPDYIVVPYTKVQFDLLLQEKEDWPISLLGFLGEVHFHLPKDPLLTFTLQTAIIFPHMTSTTPLEKGIVIFTDGSANGRSVTYIQGREPIIKENTQNTAQQA |
| | | EIVAVITAFEEVSQPFNLYTDSKYVTGLFPEIETATLSPRTKIYTELKHLQRLIHKRQEKFYIGHIRGHTGLPGPLAQGNAYADSLTRILT |
| MMTVB_P03365_2mutB | 8,086 | WVQEISDSRPMLHIYLNGRRFLGLLNTGADKTCIAGRDWPANWPIHQTESSLQGLGMACGVARSSQPLRWQHEDKSGIIHPFVIPTLPFTLWGRDIMK |
| | | DIKVRLMTDSPDDSQDLMIGAIESNLFADQISWKSDQPVWLNQWPLKQEKLQALQQLVTEQLQLGHLEESNSPWNTPVFVIKKKSGKWRLLQDLRAV |
| | | NATMHDMGALQPGLPSPVAPPKGWEIIIIDLQDCFFNIKLHPEDCKRFAFSVPSPNFKRPYQRFQWKVLPQGMKNSPTLCQKFVDKAILTVRDKYQDS |
| | | YIVHYMDDILLAHPSRSIVDEILTSMIQALNKHGLVVSTEKIQKYDNLKYLGTHIQGDSVSYQKLQIRTDKLRTLNDFQKLLGNINWIRPFLKLTTGELKPLF |
| | | EILNPDSNPISTRKLTPEACKALQLMNERLSTARVKRLDLSQPWSLCILKTEYTPTACLWQDGVVEWIHLPHISPKVITPYDIFCTQLIIKGRHRSKELFSK |
| | | DPDYIVVPYTKVQFDLLLQEKEDWPISLLGFLGEVHFHLPKDPLLTFTLQTAIIFPHMTSTTPLEKGIVIFTDGSANGRSVTYIQGREPIIKENTQNTAQQA |
| | | EIVAVITAFEEVSQPFNLYTDSKYVTGLFPEIETATLSPRTKIYTELKHLQRLIHKRQEKFYIGHIRGHTGLPGPLAQGNAYADSLTRILT |
| MMTVB_P03365_2mutB_WS | 8,087 | VQEISDSRPMLHIYLNGRRFLGLLDTGADKTCIAGRDWPANWPIHQTESSLQGLGMACGVARSSQPLRWQHEDKSGIIHPFVIPTLPFTLWGRDIMKDI |
| | | KVRLMTDSPDDSQDLMIGAIESNLFADQISWKSDQPVWLNQWPLKQEKLQALQQLVTEQLQLGHLEESNSPWNTPVFVIKKKSGKWRLLQDLRAVNA |
| | | TMHDMGALQPGLPSPPAVPKGWEIIIIDLQDCFFNIKLHPEDCKRFAFSVPSPNFKRPYQRFQWKVLPQGMKNSPTLCQKFVDKAILTVRDKYQDSYIV |
| | | HYMDDILLAHPSRSIVDEILTSMIQALNKHGLVVSTEKIQKYDNLKYLGTHIQGDSVSYQKLQIRTDKLRTLNDFQKLLGNINWIRPFLKLTTGELKPLFEIL |
| | | NPDSNPISTRKLTPEACKALQLMNERLSTARVKRLDLSQPWSLCILKTEYTPTACLWQDGVVEWIHLPHISPKVITPYDIFCTQLIIKGRHRSKELFSKDP |
| | | DYIVVPYTKVQFDLLLQEKEDWPISLLGFLGEVHFHLPKDPLLTFTLQTAIIFPHMTSTTPLEKGIVIFTDGSANGRSVTYIQGREPIIKENTQNTAQQAEIV |
| | | AVITAFEEVSQPFNLYTDSKYVTGLFPEIETATLSPRTKIYTELKHLQRLIHKRQEKFYIGHIRGHTGLPGPLAQGNAYADSLTRILTA |
| MMTVB_P03365_2mutB_WS | 8,088 | VQEISDSRPMLHIYLNGRRFLGLLDTGADKTCIAGRDWPANWPIHQTESSLQGLGMACGVARSSQPLRWQHEDKSGIIHPFVIPTLPFTLWGRDIMKDI |
| | | KVRLMTDSPDDSQDLMIGAIESNLFADQISWKSDQPVWLNQWPLKQEKLQALQQLVTEQLQLGHLEESNSPWNTPVFVIKKKSGKWRLLQDLRAVNA |
| | | TMHDMGALQPGLPSPPAVPKGWEIIIIDLQDCFFNIKLHPEDCKRFAFSVPSPNFKRPYQRFQWKVLPQGMKNSPTLCQKFVDKAILTVRDKYQDSYIV |
| | | HYMDDILLAHPSRSIVDEILTSMIQALNKHGLVVSTEKIQKYDNLKYLGTHIQGDSVSYQKLQIRTDKLRTLNDFQKLLGNINWIRPFLKLTTGELKPLFEIL |
| | | NPDSNPISTRKLTPEACKALQLMNERLSTARVKRLDLSQPWSLCILKTEYTPTACLWQDGVVEWIHLPHISPKVITPYDIFCTQLIIKGRHRSKELFSKDP |
| | | DYIVVPYTKVQFDLLLQEKEDWPISLLGFLGEVHFHLPKDPLLTFTLQTAIIFPHMTSTTPLEKGIVIFTDGSANGRSVTYIQGREPIIKENTQNTAQQAEIV |
| | | AVITAFEEVSQPFNLYTDSKYVTGLFPEIETATLSPRTKIYTELKHLQRLIHKRQEKFYIGHIRGHTGLPGPLAQGNAYADSLTRILTA |
| MMTVB_P03365_WS | 8,089 | VQEISDSRPMLHIYLNGRRFLGLLDTGADKTCIAGRDWPANWPIHQTESSLQGLGMACGVARSSQPLRWQHEDKSGIIHPFVIPTLPFTLWGRDIMKDI |
| | | KVRLMTDSPDDSQDLMIGAIESNLFADQISWKSDQPVWLNQWPLKQEKLQALQQLVTEQLQLGHLEESNSPWNTPVFVIKKKSGKWRLLQDLRAVNA |
| | | TMHDMGALQPGLPSPVAVPKGWEIIIIDLQDCFFNIKLHPEDCKRFAFSVPSPNFKRPYQRFQWKVLPQGMKNSPTLCQKFVDKAILTVRDKYQDSYIV |
| | | HYMDDILLAHPSRSIVDEILTSMIQALNKHGLVVSTEKIQKYDNLKYLGTHIQGDSVSYQKLQIRTDKLRTLNDFQKLLGNINWIRPFLKLTTGELKPLFEIL |
| | | NGDSNPISTRKLTPEACKALQLMNERLSTARVKRLDLSQPWSLCILKTEYTPTACLWQDGVVEWIHLPHISPKVITPYDIFCTQLIIKGRHRSKELFSKDP |
| | | DYIVVPYTKVQFDLLLQEKEDWPISLLGFLGEVHFHLPKDPLLTFTLQTAIIFPHMTSTTPLEKGIVIFTDGSANGRSVTYIQGREPIIKENTQNTAQQAEIV |
| | | AVITAFEEVSQPFNLYTDSKYVTGLFPEIETATLSPRTKIYTELKHLQRLIHKRQEKFYIGHIRGHTGLPGPLAQGNAYADSLTRILTA |
| MMTVB_P03365_WS | 8,090 | VQEISDSRPMLHIYLNGRRFLGLLDTGADKTCIAGRDWPANWPIHQTESSLQGLGMACGVARSSQPLRWQHEDKSGIIHPFVIPTLPFTLWGRDIMKDI |
| | | KVRLMTDSPDDSQDLMIGAIESNLFADQISWKSDQPVWLNQWPLKQEKLQALQQLVTEQLQLGHLEESNSPWNTPVFVIKKKSGKWRLLQDLRAVNA |
| | | TMHDMGALQPGLPSPVAVPKGWEIIIIDLQDCFFNIKLHPEDCKRFAFSVPSPNFKRPYQRFQWKVLPQGMKNSPTLCQKFVDKAILTVRDKYQDSYIV |
| | | HYMDDILLAHPSRSIVDEILTSMIQALNKHGLVVSTEKIQKYDNLKYLGTHIQGDSVSYQKLQIRTDKLRTLNDFQKLLGNINWIRPFLKLTTGELKPLFEIL |
| | | NGDSNPISTRKLTPEACKALQLMNERLSTARVKRLDLSQPWSLCILKTEYTPTACLWQDGVVEWIHLPHISPKVITPYDIFCTQLIIKGRHRSKELFSKDP |
| | | DYIVVPYTKVQFDLLLQEKEDWPISLLGFLGEVHFHLPKDPLLTFTLQTAIIFPHMTSTTPLEKGIVIFTDGSANGRSVTYIQGREPIIKENTQNTAQQAEIV |
| | | AVITAFEEVSQPFNLYTDSKYVTGLFPEIETATLSPRTKIYTELKHLQRLIHKRQEKFYIGHIRGHTGLPGPLAQGNAYADSLTRILTA |
| MMTVB_P03365-Pro | 8,091 | GRDIMKDIKVRLMTDSPDDSQDLMIGAIESNLFADQISWKSDQPVWLNQWPLKQEKLQALQQLVTEQLQLGHLEESNSPWNTPVFVIKKKSGKWRLL |
| | | QDLRAVNATMHDMGALQPGLPSPVAVPKGWEIIIIDLQDCFFNIKLHPEDCKRFAFSVPSPNFKRPYQRFQWKVLPQGMKNSPTLCQKFVDKAILTVR |
| | | DKYQDSYIVHYMDDILLAHPSRSIVDEILTSMIQALNKHGLVVSTEKIQKYDNLKYLGTHIQGDSVSYQKLQIRTDKLRTLNDFQKLLGNINWIRPFLKLTT |
| | | GELKPLFEILNGDSNPISTRKLTPEACKALQLMNERLSTARVKRLDLSQPWSLCILKTEYTPTACLWQDGVVEWIHLPHISPKVITPYDIFCTQLIIKGRHR |
| | | SKELFSKDPDYIVVPYTKVQFDLLLQEKEDWPISLLGFLGEVHFHLPKDPLLTFTLQTAIIFPHMTSTTPLEKGIVIFTDGSANGRSVTYIQGREPIIKENTQ |
| | | NTAQQAEIVAVITAFEEVSQPFNLYTDSKYVTGLFPEIETATLSPRTKIYTELKHLQRLIHKRQEKFYIGHIRGHTGLPGPLAQGNAYADSLTRILT |
| MMTVB_P03365-Pro | 8,092 | GRDIMKDIKVRLMTDSPDDSQDLMIGAIESNLFADQISWKSDQPVWLNQWPLKQEKLQALQQLVTEQLQLGHLEESNSPWNTPVFVIKKKSGKWRLL |
| | | QDLRAVNATMHDMGALQPGLPSPVAVPKGWEIIIIDLQDCFFNIKLHPEDCKRFAFSVPSPNFKRPYQRFQWKVLPQGMKNSPTLCQKFVDKAILTVR |
| | | DKYQDSYIVHYMDDILLAHPSRSIVDEILTSMIQALNKHGLVVSTEKIQKYDNLKYLGTHIQGDSVSYQKLQIRTDKLRTLNDFQKLLGNINWIRPFLKLTT |
| | | GELKPLFEILNGDSNPISTRKLTPEACKALQLMNERLSTARVKRLDLSQPWSLCILKTEYTPTACLWQDGVVEWIHLPHISPKVITPYDIFCTQLIIKGRHR |
| | | SKELFSKDPDYIVVPYTKVQFDLLLQEKEDWPISLLGFLGEVHFHLPKDPLLTFTLQTAIIFPHMTSTTPLEKGIVIFTDGSANGRSVTYIQGREPIIKENTQ |
| | | NTAQQAEIVAVITAFEEVSQPFNLYTDSKYVTGLFPEIETATLSPRTKIYTELKHLQRLIHKRQEKFYIGHIRGHTGLPGPLAQGNAYADSLTRILT |
| MMTVB_P03365-Pro_2mut | 8,093 | GRDIMKDIKVRLMTDSPDDSQDLMIGAIESNLFADQISWKSDQPVWLNQWPLKQEKLQALQQLVTEQLQLGHLEESNSPWNTPVFVIKKKSGKWRLL |
| | | QDLRAVNATMHDMGALQPGLPSPVAVPKGWEIIIIDLQDCFFNIKLHPEDCKRFAFSVPSPNFKRPYQRFQWKVLPQGMKNSPTLCQKFVDKAILTVR |
| | | DKYQDSYIVHYMDDILLAHPSRSIVDEILTSMIQALNKHGLVVSTEKIQKYDNLKYLGTHIQGDSVSYQKLQIRTDKLRTLNDFQKLLGNINWIRPFLKLTT |
| | | GELKPLFEILNPDSNPISTRKLTPEACKALQLMNERLSTARVKRLDLSQPWSLCILKTEYTPTACLWQDGVVEWIHLPHISPKVITPYDIFCTQLIIKGRHR |
| | | SKELFSKDPDYIVVPYTKVQFDLLLQEKEDWPISLLGFLGEVHFHLPKDPLLTFTLQTAIIFPHMTSTTPLEKGIVIFTDGSANGRSVTYIQGREPIIKENTQ |
| | | NTAQQAEIVAVITAFEEVSQPFNLYTDSKYVTGLFPEIETATLSPRTKIYTELKHLQRLIHKRQEKFYIGHIRGHTGLPGPLAQGNAYADSLTRILT |
| MMTVB_P03365-Pro_2mut | 8,094 | GRDIMKDIKVRLMTDSPDDSQDLMIGAIESNLFADQISWKSDQPVWLNQWPLKQEKLQALQQLVTEQLQLGHLEESNSPWNTPVFVIKKKSGKWRLL |
| | | QDLRAVNATMHDMGALQPGLPSPVAVPKGWEIIIIDLQDCFFNIKLHPEDCKRFAFSVPSPNFKRPYQRFQWKVLPQGMKNSPTLCQKFVDKAILTVR |
| | | DKYQDSYIVHYMDDILLAHPSRSIVDEILTSMIQALNKHGLVVSTEKIQKYDNLKYLGTHIQGDSVSYQKLQIRTDKLRTLNDFQKLLGNINWIRPFLKLTT |
| | | GELKPLFEILNPDSNPISTRKLTPEACKALQLMNERLSTARVKRLDLSQPWSLCILKTEYTPTACLWQDGVVEWIHLPHISPKVITPYDIFCTQLIIKGRHR |
| | | SKELFSKDPDYIVVPYTKVQFDLLLQEKEDWPISLLGFLGEVHFHLPKDPLLTFTLQTAIIFPHMTSTTPLEKGIVIFTDGSANGRSVTYIQGREPIIKENTQ |
| | | NTAQQAEIVAVITAFEEVSQPFNLYTDSKYVTGLFPEIETATLSPRTKIYTELKHLQRLIHKRQEKFYIGHIRGHTGLPGPLAQGNAYADSLTRILT |
| MMTVB_P03365-Pro_2mutB | 8,095 | GRDIMKDIKVRLMTDSPDDSQDLMIGAIESNLFADQISWKSDQPVWLNQWPLKQEKLQALQQLVTEQLQLGHLEESNSPWNTPVFVIKKKSGKWRLL |
| | | QDLRAVNATMHDMGALQPGLPSPVAPPKGWEIIIIDLQDCFFNIKLHPEDCKRFAFSVPSPNFKRPYQRFQWKVLPQGMKNSPTLCQKFVDKAILTVR |
| | | DKYQDSYIVHYMDDILLAHPSRSIVDEILTSMIQALNKHGLVVSTEKIQKYDNLKYLGTHIQGDSVSYQKLQIRTDKLRTLNDFQKLLGNINWIRPFLKLTT |
| | | GELKPLFEILNPDSNPISTRKLTPEACKALQLMNERLSTARVKRLDLSQPWSLCILKTEYTPTACLWQDGVVEWIHLPHISPKVITPYDIFCTQLIIKGRHR |
| | | SKELFSKDPDYIVVPYTKVQFDLLLQEKEDWPISLLGFLGEVHFHLPKDPLLTFTLQTAIIFPHMTSTTPLEKGIVIFTDGSANGRSVTYIQGREPIIKENTQ |
| | | NTAQQAEIVAVITAFEEVSQPFNLYTDSKYVTGLFPEIETATLSPRTKIYTELKHLQRLIHKRQEKFYIGHIRGHTGLPGPLAQGNAYADSLTRILT |
| MMTVB_P03365-Pro_2mutB | 8,096 | GRDIMKDIKVRLMTDSPDDSQDLMIGAIESNLFADQISWKSDQPVWLNQWPLKQEKLQALQQLVTEQLQLGHLEESNSPWNTPVFVIKKKSGKWRLL |
| | | QDLRAVNATMHDMGALQPGLPSPVAPPKGWEIIIIDLQDCFFNIKLHPEDCKRFAFSVPSPNFKRPYQRFQWKVLPQGMKNSPTLCQKFVDKAILTVR |
| | | DKYQDSYIVHYMDDILLAHPSRSIVDEILTSMIQALNKHGLVVSTEKIQKYDNLKYLGTHIQGDSVSYQKLQIRTDKLRTLNDFQKLLGNINWIRPFLKLTT |
| | | GELKPLFEILNPDSNPISTRKLTPEACKALQLMNERLSTARVKRLDLSQPWSLCILKTEYTPTACLWQDGVVEWIHLPHISPKVITPYDIFCTQLIIKGRHR |
| | | SKELFSKDPDYIVVPYTKVQFDLLLQEKEDWPISLLGFLGEVHFHLPKDPLLTFTLQTAIIFPHMTSTTPLEKGIVIFTDGSANGRSVTYIQGREPIIKENTQ |
| | | NTAQQAEIVAVITAFEEVSQPFNLYTDSKYVTGLFPEIETATLSPRTKIYTELKHLQRLIHKRQEKFYIGHIRGHTGLPGPLAQGNAYADSLTRILT |
| MPMV_P07572 | 8,097 | LTAAIDILAPQQCAEPITWKSDEPVWVDQWPLTNDKLAAAQQLVQEQLEAGHITESSSPWNTPIFVIKKKSGKWRLLQDLRAVNATMVLMGALQPGLP |
| | | SPVAIPQGYLKIIIDLKDCFFSIPLHPSDQKRFAFSLPSTNFKEPMQRFQWKVLPQGMANSPTLCQKYVATAIHKVRHAWKQMYIIHYMDDILIAGKDGQ |
| | | QVLQCFDQLKQELTAAGLHIAPEKVQLQDPYTYLGFELNGPKITNQKAVIRKDKLQTLNDFQKLLGDINWLRPYLKLTTGDLKPLFDTLKGDSDPNSHR |
| | | SLSKEALASLEKVETAIAEQFVTHINYSLPLIFLIFNTALTPTGLFWQDNPIMWIHLPASPKKVLLPYYDAIADLIILGRDHSKKYFGIEPSTIIQPYSKSQIDW |
| | | LMQNTEMWPIACASFVGILDNHYPPNKLIQFCKLHTFVFPQIISKTPLNNALLVFTDGSSTGMAAYTLTDTTIKFQTNLNSAQLVELQALIAVLSAFPNQPL |
| | | NIYTDSAYLAHSIPLLETVAQIKHISETAKLFLQCQQLIYNRSIPFYIGHVRAHSGLPGPIAQGNQRADLATKIVASNINT |
| MPMV_P07572_2mutB | 8,098 | LTAAIDILAPQQCAEPITWKSDEPVWVDQWPLTNDKLAAAQQLVQEQLEAGHITESSSPWNTPIFVIKKKSGKWRLLQDLRAVNATMVLMGALQPGLP |
| | | SPVAPPQGYLKIIIDLKDCFFSIPLHPSDQKRFAFSLPSTNFKEPMQRFQWKVLPQGMANSPTLCQKYVATAIHKVRHAWKQMYIIHYMDDILIAGKDGQ |
| | | QVLQCFDQLKQELTAAGLHIAPEKVQLQDPYTYLGFELNGPKITNQKAVIRKDKLQTLNDFQKLLGDINWLRPYLKLTTGDLKPLFDTLKPDSDPNSHRS |
| | | LSKEALASLEKVETAIAEQFVTHINYSLPLIFLIFNTALTPTGLFWQDNPIMWIHLPASPKKVLLPYYDAIADLIILGRDHSKKYFGIEPSTIIQPYSKSQIDWL |
| | | MQNTEMWPIACASFVGILDNHYPPNKLIQFCKLHTFVFPQIISKTPLNNALLVFTDGSSTGMAAYTLTDTTIKFQTNLNSAQLVELQALIAVLSAFPNQPL |
| | | NIYTDSAYLAHSIPLLETVAQIKHISETAKLFLQCQQLIYNRSIPFYIGHVRAHSGLPGPIAQGNQRADLATKIVASNINT |
| PERV_Q4VFZ2 | 8,099 | TLQLDDEYRLYSPLVKPDQNIQFWLEQFPQAWAETAGMGLAKQVPPQVIQLKASATPVSVRQYPLSKEAQEGIRPHVQRLIQQGILVPVQSPWNTPLL |
| | | PVRKPGTNDYRPVQDLREVNKRVQDIHPTVPNPYNLLCALPPQRSWYTVLDLKDAFFCLRLHPTSQPLFAFEWRDPGTGRTGQLTWTRLPQGFKNS |
| | | PTIFDEALHRDLANFRIQHPQVTLLQYVDDLLLAGATKQDCLEGTKALLLELSDLGYRASAKKAQICRREVTYLGYSLRDGQRWLTEARKKTVVQIPAPT |
| | | TAKQVREFLGTAGFCRLWIPGFATLAAPLYPLTKEKGEFSWAPEHQKAFDAIKKALLSAPALALPDVTKPFTLYVDERKGVARGVLTQTLGPWRRPVA |
| | | YLSKKLDPVASGWPVCLKAIAAVAILVKDADKLTLGQNITVIAPHALENIVRQPPDRWMTNARMTHYQSLLLTERVTFAPPAALNPATLLPEETDEPVTH |
| | | DCHQLLIEETGVRKDLTDIPLTGEVLTWFTDGSSYVVEGKRMAGAAVVDGTRTIWASSLPEGTSAQKAELMALTQALRLAEGKSINIYTDSRYAFATAH |
| | | VHGAIYKQRGLLTSAGREIKNKEEILSLLEALHLPKRLAIIHCPGHQKAKDPISRGNQMADRVAKQAAQGVNLL |
| PERV_Q4VFZ2 | 8,100 | TLQLDDEYRLYSPLVKPDQNIQFWLEQFPQAWAETAGMGLAKQVPPQVIQLKASATPVSVRQYPLSKEAQEGIRPHVQRLIQQGILVPVQSPWNTPLL |
| | | PVRKPGTNDYRPVQDLREVNKRVQDIHPTVPNPYNLLCALPPQRSWYTVLDLKDAFFCLRLHPTSQPLFAFEWRDPGTGRTGQLTWTRLPQGFKNS |
| | | PTIFDEALHRDLANFRIQHPQVTLLQYVDDLLLAGATKQDCLEGTKALLLELSDLGYRASAKKAQICRREVTYLGYSLRDGQRWLTEARKKTVVQIPAPT |
| | | TAKQVREFLGTAGFCRLWIPGFATLAAPLYPLTKEKGEFSWAPEHQKAFDAIKKALLSAPALALPDVTKPFTLYVDERKGVARGVLTQTLGPWRRPVA |
| | | YLSKKLDPVASGWPVCLKAIAAVAILVKDADKLTLGQNITVIAPHALENIVRQPPDRWMTNARMTHYQSLLLTERVTFAPPAALNPATLLPEETDEPVTH |
| | | DCHQLLIEETGVRKDLTDIPLTGEVLTWFTDGSSYVVEGKRMAGAAVVDGTRTIWASSLPEGTSAQKAELMALTQALRLAEGKSINIYTDSRYAFATAH |
| | | VHGAIYKQRGLLTSAGREIKNKEEILSLLEALHLPKRLAIIHCPGHQKAKDPISRGNQMADRVAKQAAQGVNLL |
| PERV_Q4VFZ2_3mut | 8,101 | TLQLDDEYRLYSPLVKPDQNIQFWLEQFPQAWAETAGMGLAKQVPPQVIQLKASATPVSVRQYPLSKEAQEGIRPHVQRLIQQGILVPVQSPWNTPLL |
| | | PVRKPGTNDYRPVQDLREVNKRVQDIHPTVPNPYNLLCALPPQRSWYTVLDLKDAFFCLRLHPTSQPLFAFEWRDPGTGRTGQLTWTRLPQGFKNS |
| | | PTIFNEALHRDLANFRIQHPQVTLLQYVDDLLLAGATKQDCLEGTKALLLELSDLGYRASAKKAQICRREVTYLGYSLRDGQRWLTEARKKTVVQIPAPT |
| | | TAKQVREFLGTAGFCRLWIPGFATLAAPLYPLTKPKGEFSWAPEHQKAFDAIKKALLSAPALALPDVTKPFTLYVDERKGVARGVLTQTLGPWRRPVA |
| | | YLSKKLDPVASGWPVCLKAIAAVAILVKDADKLTLGQNITVIAPHALENIVRQPPDRWMTNARMTHYQSLLLTERVTFAPPAALNPATLLPEETDEPVTH |
| | | DCHQLLIEETGVRKDLTDIPLTGEVLTWFTDGSSYVVEGKRMAGAAVVDGTRTIWASSLPEGTSAQKAELMALTQALRLAEGKSINIYTDSRYAFATAH |
| | | VHGAIYKQRGWLTSAGREIKNKEEILSLLEALHLPKRLAIIHCPGHQKAKDPISRGNQMADRVAKQAAQGVNLL |
| PERV_Q4VFZ2_3mut | 8,102 | TLQLDDEYRLYSPLVKPDQNIQFWLEQFPQAWAETAGMGLAKQVPPQVIQLKASATPVSVRQYPLSKEAQEGIRPHVQRLIQQGILVPVQSPWNTPLL |
| | | PVRKPGTNDYRPVQDLREVNKRVQDIHPTVPNPYNLLCALPPQRSWYTVLDLKDAFFCLRLHPTSQPLFAFEWRDPGTGRTGQLTWTRLPQGFKNS |
| | | PTIFNEALHRDLANFRIQHPQVTLLQYVDDLLLAGATKQDCLEGTKALLLELSDLGYRASAKKAQICRREVTYLGYSLRDGQRWLTEARKKTVVQIPAPT |
| | | TAKQVREFLGTAGFCRLWIPGFATLAAPLYPLTKPKGEFSWAPEHQKAFDAIKKALLSAPALALPDVTKPFTLYVDERKGVARGVLTQTLGPWRRPVA |
| | | YLSKKLDPVASGWPVCLKAIAAVAILVKDADKLTLGQNITVIAPHALENIVRQPPDRWMTNARMTHYQSLLLTERVTFAPPAALNPATLLPEETDEPVTH |
| | | DCHQLLIEETGVRKDLTDIPLTGEVLTWFTDGSSYVVEGKRMAGAAVVDGTRTIWASSLPEGTSAQKAELMALTQALRLAEGKSINIYTDSRYAFATAH |
| | | VHGAIYKQRGWLTSAGREIKNKEEILSLLEALHLPKRLAIIHCPGHQKAKDPISRGNQMADRVAKQAAQGVNLL |
| PERV_Q4VFZ2_3mutA_WS | 8,103 | LDDEYRLYSPLVKPDQNIQFWLEQFPQAWAETAGMGLAKQVPPQVIQLKASATPVSVRQYPLSKEAQEGIRPHVQRLIQQGILVPVQSPWNTPLLPVR |
| | | KPGTNDYRPVQDLREVNKRVQDIHPTVPNPYNLLCALPPQRSWYTVLDLKDAFFCLRLHPTSQPLFAFEWRDPGTGRTGQLTWTRLPQGFKNSPTIF |
| | | NEALHRDLANFRIQHPQVTLLQYVDDLLLAGATKQDCLEGTKALLLELSDLGYRASAKKAQICRREVTYLGYSLRDGQRWLTEARKKTVVQIPAPTTAK |
| | | QVREFLGKAGFCRLFIPGFATLAAPLYPLTKPKGEFSWAPEHQKAFDAIKKALLSAPALALPDVTKPFTLYVDERKGVARGVLTQTLGPWRRPVAYLSK |
| | | KLDPVASGWPVCLKAIAAVAILVKDADKLTLGQNITVIAPHALENIVRQPPDRWMTNARMTHYQSLLLTERVTFAPPAALNPATLLPEETDEPVTHDCHQ |
| | | LLIEETGVRKDLTDIPLTGEVLTWFTDGSSYVVEGKRMAGAAVVDGTRTIWASSLPEGTSAQKAELMALTQALRLAEGKSINIYTDSRYAFATAHVHGAI |
| | | YKQRGWLTSAGREIKNKEEILSLLEALHLPKRLAIIHCPGHQKAKDPISRGNQMADRVAKQAAQGVNLLP |
| PERV_Q4VFZ2_3mutA_WS | 8,104 | LDDEYRLYSPLVKPDQNIQFWLEQFPQAWAETAGMGLAKQVPPQVIQLKASATPVSVRQYPLSKEAQEGIRPHVQRLIQQGILVPVQSPWNTPLLPVR |
| | | KPGTNDYRPVQDLREVNKRVQDIHPTVPNPYNLLCALPPQRSWYTVLDLKDAFFCLRLHPTSQPLFAFEWRDPGTGRTGQLTWTRLPQGFKNSPTIF |
| | | NEALHRDLANFRIQHPQVTLLQYVDDLLLAGATKQDCLEGTKALLLELSDLGYRASAKKAQICRREVTYLGYSLRDGQRWLTEARKKTVVQIPAPTTAK |
| | | QVREFLGKAGFCRLFIPGFATLAAPLYPLTKPKGEFSWAPEHQKAFDAIKKALLSAPALALPDVTKPFTLYVDERKGVARGVLTQTLGPWRRPVAYLSK |
| | | KLDPVASGWPVCLKAIAAVAILVKDADKLTLGQNITVIAPHALENIVRQPPDRWMTNARMTHYQSLLLTERVTFAPPAALNPATLLPEETDEPVTHDCHQ |
| | | LLIEETGVRKDLTDIPLTGEVLTWFTDGSSYVVEGKRMAGAAVVDGTRTIWASSLPEGTSAQKAELMALTQALRLAEGKSINIYTDSRYAFATAHVHGAI |
| | | YKQRGWLTSAGREIKNKEEILSLLEALHLPKRLAIIHCPGHQKAKDPISRGNQMADRVAKQAAQGVNLLP |
| SFV1_P23074 | 8,105 | MDPLQLLQPLEAEIKGTKLKAHWNSGATITCVPEAFLEDERPIQTMLIKTIHGEKQQDVYYLTFKVQGRKVEAEVLASPYDYILLNPSDVPWLMKKPLQL |
| | | TVLVPLHEYQERLLQQTALPKEQKELLQKLFLKYDALWQHWENQVGHRRIKPHNIATGTLAPRPQKQYPINPKAKPSIQIVIDDLLKQGVLIQQNSTMNT |
| | | PVYPVPKPDGKWRMVLDYREVNKTIPLIAAQNQHSAGILSSIYRGKYKTTLDLTNGFWAHPITPESYWLTAFTWQGKQYCWTRLPQGFLNSPALFTAD |
| | | VVDLLKEIPNVQAYVDDIYISHDDPQEHLEQLEKIFSILLNAGYVVSLKKSEIAQREVEFLGFNITKEGRGLTDTFKQKLLNITPPKDLKQLQSILGLLNFAR |
| | | NFIPNYSELVKPLYTIVANANGKFISWTEDNSNQLQHIISVLNQADNLEERNPETRLIIKVNSSPSAGYIRYYNEGSKRPIMYVNYIFSKAEAKFTQTEKLL |
| | | TTMHKGLIKAMDLAMGQEILVYSPIVSMTKIQRTPLPERKALPVRWITWMTYLEDPRIQFHYDKSLPELQQIPNVTEDVIAKTKHPSEFAMVFYTDGSAIK |
| | | HPDVNKSHSAGMGIAQVQFIPEYKIVHQWSIPLGDHTAQLAEIAAVEFACKKALKISGPVLIVTDSFYVAESANKELPYWKSNGFLNNKKKPLRHVSKW |
| | | KSIAECLQLKPDIIIMHEKGHQQPMTTLHTEGNNLADKLATQGSYVVH |
| SFV1_P23074_2mut | 8,106 | MDPLQLLQPLEAEIKGTKLKAHWNSGATITCVPEAFLEDERPIQTMLIKTIHGEKQQDVYYLTFKVQGRKVEAEVLASPYDYILLNPSDVPWLMKKPLQL |
| | | TVLVPLHEYQERLLQQTALPKEQKELLQKLFLKYDALWQHWENQVGHRRIKPHNIATGTLAPRPQKQYPINPKAKPSIQIVIDDLLKQGVLIQQNSTMNT |
| | | PVYPVPKPDGKWRMVLDYREVNKTIPLIAAQNQHSAGILSSIYRGKYKTTLDLTNGFWAHPITPESYWLTAFTWQGKQYCWTRLPQGFLNSPALFNAD |
| | | VVDLLKEIPNVQAYVDDIYISHDDPQEHLEQLEKIFSILLNAGYVVSLKKSEIAQREVEFLGFNITKEGRGLTDTFKQKLLNITPPKDLKQLQSILGLLNFAR |
| | | NFIPNYSELVKPLYTIVAPANGKFISWTEDNSNQLQHIISVLNQADNLEERNPETRLIIKVNSSPSAGYIRYYNEGSKRPIMYVNYIFSKAEAKFTQTEKLLT |
| | | TMHKGLIKAMDLAMGQEILVYSPIVSMTKIQRTPLPERKALPVRWITWMTYLEDPRIQFHYDKSLPELQQIPNVTEDVIAKTKHPSEFAMVFYTDGSAIKH |
| | | PDVNKSHSAGMGIAQVQFIPEYKIVHQWSIPLGDHTAQLAEIAAVEFACKKALKISGPVLIVTDSFYVAESANKELPYWKSNGFLNNKKKPLRHVSKWK |
| | | SIAECLQLKPDIIIMHEKGHQQPMTTLHTEGNNLADKLATQGSYVVH |
| SFV1_P23074_2mutA | 8,107 | MDPLQLLQPLEAEIKGTKLKAHWNSGATITCVPEAFLEDERPIQTMLIKTIHGEKQQDVYYLTFKVQGRKVEAEVLASPYDYILLNPSDVPWLMKKPLQL |
| | | TVLVPLHEYQERLLQQTALPKEQKELLQKLFLKYDALWQHWENQVGHRRIKPHNIATGTLAPRPQKQYPINPKAKPSIQIVIDDLLKQGVLIQQNSTMNT |
| | | PVYPVPKPDGKWRMVLDYREVNKTIPLIAAQNQHSAGILSSIYRGKYKTTLDLTNGFWAHPITPESYWLTAFTWQGKQYCWTRLPQGFLNSPALFNAD |
| | | VVDLLKEIPNVQAYVDDIYISHDDPQEHLEQLEKIFSILLNAGYVVSLKKSEIAQREVEFLGFNITKEGRGLTDTFKQKLLNITPPKDLKQLQSILGKLNFAR |
| | | NFIPNYSELVKPLYTIVAPANGKFISWTEDNSNQLQHIISVLNQADNLEERNPETRLIIKVNSSPSAGYIRYYNEGSKRPIMYVNYIFSKAEAKFTQTEKLLT |
| | | TMHKGLIKAMDLAMGQEILVYSPIVSMTKIQRTPLPERKALPVRWITWMTYLEDPRIQFHYDKSLPELQQIPNVTEDVIAKTKHPSEFAMVFYTDGSAIKH |
| | | PDVNKSHSAGMGIAQVQFIPEYKIVHQWSIPLGDHTAQLAEIAAVEFACKKALKISGPVLIVTDSFYVAESANKELPYWKSNGFLNNKKKPLRHVSKWK |
| | | SIAECLQLKPDIIIMHEKGHQQPMTTLHTEGNNLADKLATQGSYVVH |
| SFV1_P23074-Pro | 8,108 | VPWLMKKPLQLTVLVPLHEYQERLLQQTALPKEQKELLQKLFLKYDALWQHWENQVGHRRIKPHNIATGTLAPRPQKQYPINPKAKPSIQIVIDDLLKQ |
| | | GVLIQQNSTMNTPVYPVPKPDGKWRMVLDYREVNKTIPLIAAQNQHSAGILSSIYRGKYKTTLDLTNGFWAHPITPESYWLTAFTWQGKQYCWTRLPQ |
| | | GFLNSPALFTADVVDLLKEIPNVQAYVDDIYISHDDPQEHLEQLEKIFSILLNAGYVVSLKKSEIAQREVEFLGFNITKEGRGLTDTFKQKLLNITPPKDLKQ |
| | | LQSILGLLNFARNFIPNYSELVKPLYTIVANANGKFISWTEDNSNQLQHIISVLNQADNLEERNPETRLIIKVNSSPSAGYIRYYNEGSKRPIMYVNYIFSKA |
| | | EAKFTQTEKLLTTMHKGLIKAMDLAMGQEILVYSPIVSMTKIQRTPLPERKALPVRWITWMTYLEDPRIQFHYDKSLPELQQIPNVTEDVIAKTKHPSEFA |
| | | MVFYTDGSAIKHPDVNKSHSAGMGIAQVQFIPEYKIVHQWSIPLGDHTAQLAEIAAVEFACKKALKISGPVLIVTDSFYVAESANKELPYWKSNGFLNNK |
| | | KKPLRHVSKWKSIAECLQLKPDIIIMHEKGHQQPMTTLHTEGNNLADKLATQGSYVVH |
| SFV1_P23074-Pro_2mut | 8,109 | VPWLMKKPLQLTVLVPLHEYQERLLQQTALPKEQKELLQKLFLKYDALWQHWENQVGHRRIKPHNIATGTLAPRPQKQYPINPKAKPSIQIVIDDLLKQ |
| | | GVLIQQNSTMNTPVYPVPKPDGKWRMVLDYREVNKTIPLIAAQNQHSAGILSSIYRGKYKTTLDLTNGFWAHPITPESYWLTAFTWQGKQYCWTRLPQ |
| | | GFLNSPALFNADVVDLLKEIPNVQAYVDDIYISHDDPQEHLEQLEKIFSILLNAGYVVSLKKSEIAQREVEFLGFNITKEGRGLTDTFKQKLLNITPPKDLK |
| | | QLQSILGLLNFARNFIPNYSELVKPLYTIVAPANGKFISWTEDNSNQLQHIISVLNQADNLEERNPETRLIIKVNSSPSAGYIRYYNEGSKRPIMYVNYIFSK |
| | | AEAKFTQTEKLLTTMHKGLIKAMDLAMGQEILVYSPIVSMTKIQRTPLPERKALPVRWITWMTYLEDPRIQFHYDKSLPELQQIPNVTEDVIAKTKHPSEF |
| | | AMVFYTDGSAIKHPDVNKSHSAGMGIAQVQFIPEYKIVHQWSIPLGDHTAQLAEIAAVEFACKKALKISGPVLIVTDSFYVAESANKELPYWKSNGFLNN |
| | | KKKPLRHVSKWKSIAECLQLKPDIIIMHEKGHQQPMTTLHTEGNNLADKLATQGSYVVH |
| SFV1_P23074-Pro_2mutA | 8,110 | VPWLMKKPLQLTVLVPLHEYQERLLQQTALPKEQKELLQKLFLKYDALWQHWENQVGHRRIKPHNIATGTLAPRPQKQYPINPKAKPSIQIVIDDLLKQ |
| | | GVLIQQNSTMNTPVYPVPKPDGKWRMVLDYREVNKTIPLIAAQNQHSAGILSSIYRGKYKTTLDLTNGFWAHPITPESYWLTAFTWQGKQYCWTRLPQ |
| | | GFLNSPALFNADVVDLLKEIPNVQAYVDDIYISHDDPQEHLEQLEKIFSILLNAGYVVSLKKSEIAQREVEFLGFNITKEGRGLTDTFKQKLLNITPPKDLK |
| | | QLQSILGKLNFARNFIPNYSELVKPLYTIVAPANGKFISWTEDNSNQLQHIISVLNQADNLEERNPETRLIIKVNSSPSAGYIRYYNEGSKRPIMYVNYIFSK |
| | | AEAKFTQTEKLLTTMHKGLIKAMDLAMGQEILVYSPIVSMTKIQRTPLPERKALPVRWITWMTYLEDPRIQFHYDKSLPELQQIPNVTEDVIAKTKHPSEF |
| | | AMVFYTDGSAIKHPDVNKSHSAGMGIAQVQFIPEYKIVHQWSIPLGDHTAQLAEIAAVEFACKKALKISGPVLIVTDSFYVAESANKELPYWKSNGFLNN |
| | | KKKPLRHVSKWKSIAECLQLKPDIIIMHEKGHQQPMTTLHTEGNNLADKLATQGSYVVH |
| SFV3L_P27401 | 8,111 | MDPLQLLQPLEAEIKGTKLKAHWNSGATITCVPQAFLEEEVPIKNIWIKTIHGEKEQPVYYLTFKIQGRKVEAEVISSPYDYILVSPSDIPWLMKKPLQLTT |
| | | LVPLQEYEERLLKQTMLTGSYKEKLQSLFLKYDALWQHWENQVGHRRIKPHHIATGTVNPRPQKQYPINPKAKASIQTVINDLLKQGVLIQQNSIMNTP |
| | | VYPVPKPDGKWRMVLDYREVNKTIPLIAAQNQHSAGILSSIFRGKYKTTLDLSNGFWAHSITPESYWLTAFTWLGQQYCWTRLPQGFLNSPALFTADV |
| | | VDLLKEVPNVQVYVDDIYISHDDPREHLEQLEKVFSLLLNAGYVVSLKKSEIAQHEVEFLGFNITKEGRGLTETFKQKLLNITPPRDLKQLQSILGLLNFAR |
| | | NFIPNFSELVKPLYNIIATANGKYITWTTDNSQQLQNIISMLNSAENLEERNPEVRLIMKVNTSPSAGYIRFYNEFAKRPIMYLNYVYTKAEVKFTNTEKLL |
| | | TTIHKGLIKALDLGMGQEILVYSPIVSMTKIQKTPLPERKALPIRWITWMSYLEDPRIQFHYDKTLPELQQVPTVTDDIIAKIKHPSEFSMVFYTDGSAIKHP |
| | | NVNKSHNAGMGIAQVQFKPEFTVINTWSIPLGDHTAQLAEVAAVEFACKKALKIDGPVLIVTDSFYVAESVNKELPYWQSNGFFNNKKKPLKHVSKWK |
| | | SIADCIQLKPDIIIIHEKGHQPTASTFHTEGNNLADKLATQGSYVVN |
| SFV3L_P27401_2mut | 8,112 | MDPLQLLQPLEAEIKGTKLKAHWNSGATITCVPQAFLEEEVPIKNIWIKTIHGEKEQPVYYLTFKIQGRKVEAEVISSPYDYILVSPSDIPWLMKKPLQLTT |
| | | LVPLQEYEERLLKQTMLTGSYKEKLQSLFLKYDALWQHWENQVGHRRIKPHHIATGTVNPRPQKQYPINPKAKASIQTVINDLLKQGVLIQQNSIMNTP |
| | | VYPVPKPDGKWRMVLDYREVNKTIPLIAAQNQHSAGILSSIFRGKYKTTLDLSNGFWAHSITPESYWLTAFTWLGQQYCWTRLPQGFLNSPALFNADV |
| | | VDLLKEVPNVQVYVDDIYISHDDPREHLEQLEKVFSLLLNAGYVVSLKKSEIAQHEVEFLGFNITKEGRGLTETFKQKLLNITPPRDLKQLQSILGLLNFAR |
| | | NFIPNFSELVKPLYNIIATAPGKYITWTTDNSQQLQNIISMLNSAENLEERNPEVRLIMKVNTSPSAGYIRFYNEFAKRPIMYLNYVYTKAEVKFTNTEKLL |
| | | TTIHKGLIKALDLGMGQEILVYSPIVSMTKIQKTPLPERKALPIRWITWMSYLEDPRIQFHYDKTLPELQQVPTVTDDIIAKIKHPSEFSMVFYTDGSAIKHP |
| | | NVNKSHNAGMGIAQVQFKPEFTVINTWSIPLGDHTAQLAEVAAVEFACKKALKIDGPVLIVTDSFYVAESVNKELPYWQSNGFFNNKKKPLKHVSKWK |
| | | SIADCIQLKPDIIIIHEKGHQPTASTFHTEGNNLADKLATQGSYVVN |
| SFV3L_P27401_2mutA | 8,113 | MDPLQLLQPLEAEIKGTKLKAHWNSGATITCVPQAFLEEEVPIKNIWIKTIHGEKEQPVYYLTFKIQGRKVEAEVISSPYDYILVSPSDIPWLMKKPLQLTT |
| | | LVPLQEYEERLLKQTMLTGSYKEKLQSLFLKYDALWQHWENQVGHRRIKPHHIATGTVNPRPQKQYPINPKAKASIQTVINDLLKQGVLIQQNSIMNTP |
| | | VYPVPKPDGKWRMVLDYREVNKTIPLIAAQNQHSAGILSSIFRGKYKTTLDLSNGFWAHSITPESYWLTAFTWLGQQYCWTRLPQGFLNSPALFNADV |
| | | VDLLKEVPNVQVYVDDIYISHDDPREHLEQLEKVFSLLLNAGYVVSLKKSEIAQHEVEFLGFNITKEGRGLTETFKQKLLNITPPRDLKQLQSILGKLNFA |
| | | RNFIPNFSELVKPLYNIIATAPGKYITWTTDNSQQLQNIISMLNSAENLEERNPEVRLIMKVNTSPSAGYIRFYNEFAKRPIMYLNYVYTKAEVKFTNTEKL |
| | | LTTIHKGLIKALDLGMGQEILVYSPIVSMTKIQKTPLPERKALPIRWITWMSYLEDPRIQFHYDKTLPELQQVPTVTDDIIAKIKHPSEFSMVFYTDGSAIKH |
| | | PNVNKSHNAGMGIAQVQFKPEFTVINTWSIPLGDHTAQLAEVAAVEFACKKALKIDGPVLIVTDSFYVAESVNKELPYWQSNGFFNNKKKPLKHVSKW |
| | | KSIADCIQLKPDIIIIHEKGHQPTASTFHTEGNNLADKLATQGSYVVN |
| SFV3L_P27401-Pro | 8,114 | IPWLMKKPLQLTTLVPLQEYEERLLKQTMLTGSYKEKLQSLFLKYDALWQHWENQVGHRRIKPHHIATGTVNPRPQKQYPINPKAKASIQTVINDLLKQ |
| | | GVLIQQNSIMNTPVYPVPKPDGKWRMVLDYREVNKTIPLIAAQNQHSAGILSSIFRGKYKTTLDLSNGFWAHSITPESYWLTAFTWLGQQYCWTRLPQ |
| | | GFLNSPALFTADVVDLLKEVPNVQVYVDDIYISHDDPREHLEQLEKVFSLLLNAGYVVSLKKSEIAQHEVEFLGFNITKEGRGLTETFKQKLLNITPPRDL |
| | | KQLQSILGLLNFARNFIPNFSELVKPLYNIIATANGKYITWTTDNSQQLQNIISMLNSAENLEERNPEVRLIMKVNTSPSAGYIRFYNEFAKRPIMYLNYVY |
| | | TKAEVKFTNTEKLLTTIHKGLIKALDLGMGQEILVYSPIVSMTKIQKTPLPERKALPIRWITWMSYLEDPRIQFHYDKTLPELQQVPTVTDDIIAKIKHPSEF |
| | | SMVFYTDGSAIKHPNVNKSHNAGMGIAQVQFKPEFTVINTWSIPLGDHTAQLAEVAAVEFACKKALKIDGPVLIVTDSFYVAESVNKELPYWQSNGFFN |
| | | NKKKPLKHVSKWKSIADCIQLKPDIIIIHEKGHQPTASTFHTEGNNLADKLATQGSYVVN |
| SFV3L_P27401-Pro_2mut | 8,115 | IPWLMKKPLQLTTLVPLQEYEERLLKQTMLTGSYKEKLQSLFLKYDALWQHWENQVGHRRIKPHHIATGTVNPRPQKQYPINPKAKASIQTVINDLLKQ |
| | | GVLIQQNSIMNTPVYPVPKPDGKWRMVLDYREVNKTIPLIAAQNQHSAGILSSIFRGKYKTTLDLSNGFWAHSITPESYWLTAFTWLGQQYCWTRLPQ |
| | | GFLNSPALFNADVVDLLKEVPNVQVYVDDIYISHDDPREHLEQLEKVFSLLLNAGYVVSLKKSEIAQHEVEFLGFNITKEGRGLTETFKQKLLNITPPRDL |
| | | KQLQSILGLLNFARNFIPNFSELVKPLYNIIATAPGKYITWTTDNSQQLQNIISMLNSAENLEERNPEVRLIMKVNTSPSAGYIRFYNEFAKRPIMYLNYVY |
| | | TKAEVKFTNTEKLLTTIHKGLIKALDLGMGQEILVYSPIVSMTKIQKTPLPERKALPIRWITWMSYLEDPRIQFHYDKTLPELQQVPTVTDDIIAKIKHPSEF |
| | | SMVFYTDGSAIKHPNVNKSHNAGMGIAQVQFKPEFTVINTWSIPLGDHTAQLAEVAAVEFACKKALKIDGPVLIVTDSFYVAESVNKELPYWQSNGFFN |
| | | NKKKPLKHVSKWKSIADCIQLKPDIIIIHEKGHQPTASTFHTEGNNLADKLATQGSYVVN |
| SFV3L_P27401-Pro_2mutA | 8,116 | IPWLMKKPLQLTTLVPLQEYEERLLKQTMLTGSYKEKLQSLFLKYDALWQHWENQVGHRRIKPHHIATGTVNPRPQKQYPINPKAKASIQTVINDLLKQ |
| | | GVLIQQNSIMNTPVYPVPKPDGKWRMVLDYREVNKTIPLIAAQNQHSAGILSSIFRGKYKTTLDLSNGFWAHSITPESYWLTAFTWLGQQYCWTRLPQ |
| | | GFLNSPALFNADVVDLLKEVPNVQVYVDDIYISHDDPREHLEQLEKVFSLLLNAGYVVSLKKSEIAQHEVEFLGFNITKEGRGLTETFKQKLLNITPPRDL |
| | | KQLQSILGKLNFARNFIPNFSELVKPLYNIIATAPGKYITWTTDNSQQLQNIISMLNSAENLEERNPEVRLIMKVNTSPSAGYIRFYNEFAKRPIMYLNYVY |
| | | TKAEVKFTNTEKLLTTIHKGLIKALDLGMGQEILVYSPIVSMTKIQKTPLPERKALPIRWITWMSYLEDPRIQFHYDKTLPELQQVPTVTDDIIAKIKHPSEF |
| | | SMVFYTDGSAIKHPNVNKSHNAGMGIAQVQFKPEFTVINTWSIPLGDHTAQLAEVAAVEFACKKALKIDGPVLIVTDSFYVAESVNKELPYWQSNGFFN |
| | | NKKKPLKHVSKWKSIADCIQLKPDIIIIHEKGHQPTASTFHTEGNNLADKLATQGSYVVN |
| SFVCP_Q87040 | 8,117 | MNPLQLLQPLPAEVKGTKLLAHWNSGATITCIPESFLEDEQPIKQTLIKTIHGEKQQNVYYLTFKVKGRKVEAEVIASPYEYILLSPTDVPWLTQQPLQLTI |
| | | LVPLQEYQDRILNKTALPEEQKQQLKALFTKYDNLWQHWENQVGHRKIRPHNIATGDYPPRPQKQYPINPKAKPSIQIVIDDLLKQGVLTPQNSTMNTP |
| | | VYPVPKPDGRWRMVLDYREVNKTIPLTAAQNQHSAGILATIVRQKYKTTLDLANGFWAHPITPDSYWLTAFTWQGKQYCWTRLPQGFLNSPALFTAD |
| | | AVDLLKEVPNVQVYVDDIYLSHDNPHEHIQQLEKVFQILLQAGYVVSLKKSEIGQRTVEFLGFNITKEGRGLTDTFKTKLLNVTPPKDLKQLQSILGLLNF |
| | | ARNFIPNFAELVQTLYNLIASSKGKYIEWTEDNTKQLNKVIEALNTASNLEERLPDQRLVIKVNTSPSAGYVRYYNESGKKPIMYLNYVFSKAELKFSMLE |
| | | KLLTTMHKALIKAMDLAMGQEILVYSPIVSMTKIQKTPLPERKALPIRWITWMTYLEDPRIQFHYDKTLPELKHIPDVYTSSIPPLKHPSQYEGVFCTDGSA |
| | | IKSPDPTKSNNAGMGIVHAIYNPEYKILNQWSIPLGHHTAQMAEIAAVEFACKKALKVPGPVLVITDSFYVAESANKELPYWKSNGFVNNKKEPLKHISK |
| | | WKSIAECLSIKPDITIQHEKGHQPINTSIHTEGNALADKLATQGSYVVN |
| SFVCP_Q87040_2mut | 8,118 | MNPLQLLQPLPAEVKGTKLLAHWNSGATITCIPESFLEDEQPIKQTLIKTIHGEKQQNVYYLTFKVKGRKVEAEVIASPYEYILLSPTDVPWLTQQPLQLTI |
| | | LVPLQEYQDRINKTALPEEQKQQLKALFTKYDNLWQHWENQVGHRKIRPHNIATGDYPPRPQKQYPINPKAKPSIQIVIDDLLKQGVLTPQNSTMNTP |
| | | VYPVPKPDGRWRMVLDYREVNKTIPLTAAQNQHSAGILATIVRQKYKTTLDLANGFWAHPITPDSYWLTAFTWQGKQYCWTRLPQGFLNSPALFNAD |
| | | AVDLLKEVPNVQVYVDDIYLSHDNPHEHIQQLEKVFQILLQAGYVVSLKKSEIGQRTVEFLGFNITKEGRGLTDTFKTKLLNVTPPKDLKQLQSILGLLNF |
| | | ARNFIPNFAELVQTLYNLIASSPGKYIEWTEDNTKQLNKVIEALNTASNLEERLPDQRLVIKVNTSPSAGYVRYYNESGKKPIMYLNYVFSKAELKFSMLE |
| | | KLLTTMHKALIKAMDLAMGQEILVYSPIVSMTKIQKTPLPERKALPIRWITWMTYLEDPRIQFHYDKTLPELKHIPDVYTSSIPPLKHPSQYEGVFCTDGSA |
| | | IKSPDPTKSNNAGMGIVHAIYNPEYKILNQWSIPLGHHTAQMAEIAAVEFACKKALKVPGPVLVITDSFYVAESANKELPYWKSNGFVNNKKEPLKHISK |
| | | WKSIAECLSIKPDITIQHEKGHQPINTSIHTEGNALADKLATQGSYVVN |
| SFVCP_Q87040_2mutA | 8,119 | MNPLQLLQPLPAEVKGTKLLAHWNSGATITCIPESFLEDEQPIKQTLIKTIHGEKQQNVYYLTFKVKGRKVEAEVIASPYEYILLSPTDVPWLTQQPLQLTI |
| | | LVPLQEYQDRILNKTALPEEQKQQLKALFTKYDNLWQHWENQVGHRKIRPHNIATGDYPPRPQKQYPINPKAKPSIQIVIDDLLKQGVLTPQNSTMNTP |
| | | VYPVPKPDGRWRMVLDYREVNKTIPLTAAQNQHSAGILATIVRQKYKTTLDLANGFWAHPITPDSYWLTAFTWQGKQYCWTRLPQGFLNSPALFNAD |
| | | AVDLLKEVPNVQVYVDDIYLSHDNPHEHIQQLEKVFQILLQAGYVVSLKKSEIGQRTVEFLGFNITKEGRGLTDTFKTKLLNVTPPKDLKQLQSILGKLNF |
| | | ARNFIPNFAELVQTLYNLIASSPGKYIEWTEDNTKQLNKVIEALNTASNLEERLPDQRLVIKVNTSPSAGYVRYYNESGKKPIMYLNYVFSKAELKFSMLE |
| | | KLLTTMHKALIKAMDLAMGQEILVYSPIVSMTKIQKTPLPERKALPIRWITWMTYLEDPRIQFHYDKTLPELKHIPDVYTSSIPPLKHPSQYEGVFCTDGSA |
| | | IKSPDPTKSNNAGMGIVHAIYNPEYKILNQWSIPLGHHTAQMAEIAAVEFACKKALKVPGPVLVITDSFYVAESANKELPYWKSNGFVNNKKEPLKHISK |
| | | WKSIAECLSIKPDITIQHEKGHQPINTSIHTEGNALADKLATQGSYVVN |
| SFVCP_Q87040-Pro | 8,120 | VPWLTQQPLQLTILVPLQEYQDRILNKTALPEEQKQQLKALFTKYDNLWQHWENQVGHRKIRPHNIATGDYPPRPQKQYPINPKAKPSIQIVIDDLLKQG |
| | | VLTPQNSTMNTPVYPVPKPDGRWRMVLDYREVNKTIPLTAAQNQHSAGILATIVRQKYKTTLDLANGFWAHPITPDSYWLTAFTWQGKQYCWTRLPQ |
| | | GFLNSPALFTADAVDLLKEVPNVQVYVDDIYLSHDNPHEHIQQLEKVFQILLQAGYVVSLKKSEIGQRTVEFLGFNITKEGRGLTDTFKTKLLNVTPPKDL |
| | | KQLQSILGLLNFARNFIPNFAELVQTLYNLIASSKGKYIEWTEDNTKQLNKVIEALNTASNLEERLPDQRLVIKVNTSPSAGYVRYYNESGKKPIMYLNYV |
| | | FSKAELKFSMLEKLLTTMHKALIKAMDLAMGQEILVYSPIVSMTKIQKTPLPERKALPIRWITWMTYLEDPRIQFHYDKTLPELKHIPDVYTSSIPPLKHPS |
| | | QYEGVFCTDGSAIKSPDPTKSNNAGMGIVHAIYNPEYKILNQWSIPLGHHTAQMAEIAAVEFACKKALKVPGPVLVITDSFYVAESANKELPYWKSNGF |
| | | VNNKKEPLKHISKWKSIAECLSIKPDITIQHEKGHQPINTSIHTEGNALADKLATQGSYVVN |
| SFVCP_Q87040-Pro_2mut | 8,121 | VPWLTQQPLQLTILVPLQEYQDRILNKTALPEEQKQQLKALFTKYDNLWQHWENQVGHRKIRPHNIATGDYPPRPQKQYPINPKAKPSIQIVIDDLLKQG |
| | | VLTPQNSTMNTPVYPVPKPDGRWRMVLDYREVNKTIPLTAAQNQHSAGILATIVRQKYKTTLDLANGFWAHPITPDSYWLTAFTWQGKQYCWTRLPQ |
| | | GFLNSPALFNADAVDLLKEVPNVQVYVDDIYLSHDNPHEHIQQLEKVFQILLQAGYVVSLKKSEIGQRTVEFLGFNITKEGRGLTDTFKTKLLNVTPPKDL |
| | | KQLQSILGLLNFARNFIPNFAELVQTLYNLIASSPGKYIEWTEDNTKQLNKVIEALNTASNLEERLPDQRLVIKVNTSPSAGYVRYYNESGKKPIMYLNYV |
| | | FSKAELKFSMLEKLLTTMHKALIKAMDLAMGQEILVYSPIVSMTKIQKTPLPERKALPIRWITWMTYLEDPRIQFHYDKTLPELKHIPDVYTSSIPPLKHPS |
| | | QYEGVFCTDGSAIKSPDPTKSNNAGMGIVHAIYNPEYKILNQWSIPLGHHTAQMAEIAAVEFACKKALKVPGPVLVITDSFYVAESANKELPYWKSNGF |
| | | VNNKKEPLKHISKWKSIAECLSIKPDITIQHEKGHQPINTSIHTEGNALADKLATQGSYVVN |
| SFVCP_Q87040-Pro_2mutA | 8,122 | VPWLTQQPLQLTILVPLQEYQDRILNKTALPEEQKQQLKALFTKYDNLWQHWENQVGHRKIRPHNIATGDYPPRPQKQYPINPKAKPSIQIVIDDLLKQG |
| | | VLTPQNSTMNTPVYPVPKPDGRWRMVLDYREVNKTIPLTAAQNQHSAGILATIVRQKYKTTLDLANGFWAHPITPDSYWLTAFTWQGKQYCWTRLPQ |
| | | GFLNSPALFNADAVDLLKEVPNVQVYVDDIYLSHDNPHEHIQQLEKVFQILLQAGYVVSLKKSEIGQRTVEFLGFNITKEGRGLTDTFKTKLLNVTPPKDL |
| | | KQLQSILGKLNFARNFIPNFAELVQTLYNLIASSPGKYIEWTEDNTKQLNKVIEALNTASNLEERLPDQRLVIKVNTSPSAGYVRYYNESGKKPIMYLNYV |
| | | FSKAELKFSMLEKLLTTMHKALIKAMDLAMGQEILVYSPIVSMTKIQKTPLPERKALPIRWITWMTYLEDPRIQFHYDKTLPELKHIPDVYTSSIPPLKHPS |
| | | QYEGVFCTDGSAIKSPDPTKSNNAGMGIVHAIYNPEYKILNQWSIPLGHHTAQMAEIAAVEFACKKALKVPGPVLVITDSFYVAESANKELPYWKSNGF |
| | | VNNKKEPLKHISKWKSIAECLSIKPDITIQHEKGHQPINTSIHTEGNALADKLATQGSYVVN |
| SMRVH_P03364 | 8,123 | PRSRAIDIPVPHADKISWKITDPVWVDQWPLTYEKTLAAIALVQEQLAAGHIEPTNSPWNTPIFIIKKKSGSWRLLQDLRAVNKVMVPMGALQPGLPSPV |
| | | AIPLNYHKIVIDLKDCFFTIPLHPEDRPYFAFSVPQINFQSPMPRYQWKVLPQGMANSPTLCQKFVAAAIAPVRSQWPEAYILHYMDDILLACDSAEAAK |
| | | ACYAHIISCLTSYGLKIAPDKVQVSEPFSYLGFELHHQQVFTPRVCLKTDHLKTLNDFQKLLGDIQWLRPYLKLPTSALVPLNNILKGDPNPLSVRALTPE |
| | | AKQSLALINKAIQNQSVQQISYNLPLVLLLLPTPHTPTAVFWQPNGTDPTKNGSPLLWLHLPASPSKVLLTYPSLLAMLIIKGRYTGRQLFGRDPHSIIIPY |
| | | TQDQLTWLLQTSDEWAIALSSFTGDIDNHYPSDPVIQFAKLHQFIFPKITKCAPIPQATLVFTDGSSNGIAAYVIDNQPISIKSPYLSAQLVELYAILQVFTV |
| | | LAHQPFNLYTDSAYIAQSVPLLETVPFIKSSTNATPLFSKLQQLILNRQHPFFIGHLRAHLNLPGPLAEGNALADAATQIFPIISD |
| SMRVH_P03364_2mut | 8,124 | PRSRAIDIPVPHADKISWKITDPVWVDQWPLTYEKTLAAIALVQEQLAAGHIEPTNSPWNTPIFIIKKKSGSWRLLQDLRAVNKVMVPMGALQPGLPSPV |
| | | AIPLNYHKIVIDLKDCFFTIPLHPEDRPYFAFSVPQINFQSPMPRYQWKVLPQGMANSPTLCQKFVAAAIAPVRSQWPEAYILHYMDDILLACDSAEAAK |
| | | ACYAHIISCLTSYGLKIAPDKVQVSEPFSYLGFELHHQQVFTPRVCLKTDHLKTLNDFQKLLGDIQWLRPYLKLPTSALVPLNNILKPDPNPLSVRALTPE |
| | | AKQSLALINKAIQNQSVQQISYNLPLVLLLLPTPHTPTAVFWQPNGTDPTKNGSPLLWLHLPASPSKVLLTYPSLLAMLIIKGRYTGRQLFGRDPHSIIIPY |
| | | TQDQLTWLLQTSDEWAIALSSFTGDIDNHYPSDPVIQFAKLHQFIFPKITKCAPIPQATLVFTDGSSNGIAAYVIDNQPISIKSPYLSAQLVELYAILQVFTV |
| | | LAHQPFNLYTDSAYIAQSVPLLETVPFIKSSTNATPLFSKLQQLILNRQHPFFIGHLRAHLNLPGPLAEGNALADAATQIFPIISD |
| SMRVH_P03364_2mutB | 8,125 | PRSRAIDIPVPHADKISWKITDPVWVDQWPLTYEKTLAAIALVQEQLAAGHIEPTNSPWNTPIFIIKKKSGSWRLLQDLRAVNKVMVPMGALQPGLPSPV |
| | | APPLNYHKIVIDLKDCFFTIPLHPEDRPYFAFSVPQINFQSPMPRYQWKVLPQGMANSPTLCQKFVAAAIAPVRSQWPEAYILHYMDDILLACDSAEAAK |
| | | ACYAHIISCLTSYGLKIAPDKVQVSEPFSYLGFELHHQQVFTPRVCLKTDHLKTLNDFQKLLGDIQWLRPYLKLPTSALVPLNNILKPDPNPLSVRALTPE |
| | | AKQSLALINKAIQNQSVQQISYNLPLVLLLLPTPHTPTAVFWQPNGTDPTKNGSPLLWLHLPASPSKVLLTYPSLLAMLIIKGRYTGRQLFGRDPHSIIIPY |
| | | TQDQLTWLLQTSDEWAIALSSFTGDIDNHYPSDPVIQFAKLHQFIFPKITKCAPIPQATLVFTDGSSNGIAAYVIDNQPISIKSPYLSAQLVELYAILQVFTV |
| | | LAHQPFNLYTDSAYIAQSVPLLETVPFIKSSTNATPLFSKLQQLILNRQHPFFIGHLRAHLNLPGPLAEGNALADAATQIFPIISD |
| SRV2_P51517 | 8,126 | LATAVDILAPQRYADPITWKSDEPVWVDQWPLTQEKLAAAQQLVQEQLQAGHIIESNSPWNTPIFVIKKKSGKWRLLQDLRAVNATMVLMGALQPGLP |
| | | SPVAIPQGYFKIVIDLKDCFFTIPLQPVDQKRFAFSLPSTNFKQPMKRYQWKVLPQGMANSPTLCQKYVAAAIEPVRKSWAQMYIIHYMDDILIAGKLGE |
| | | QVLQCFAQLKQALTTTGLQIAPEKVQLQDPYTYLGFQINGPKITNQKAVIRRDKLQTLNDFQKLLGDINWLRPYLHLTTGDLKPLFDILKGDSNPNSPRS |
| | | LSEAALASLQKVETAIAEQFVTQIDYTQPLTFLIFNTTLTPTGLFWQNNPVMWVHLPASPKKVLLPYYDAIADLIILGRDNSKKYFGLEPSTIIQPYSKSQIH |
| | | WLMQNTETWPIACASYAGNIDNHYPPNKLIQFCKLHAVVFPRIISKTPLDNALLVFTDGSSTGIAAYTFEKTTVRFKTSHTSAQLVELQALIAVLSAFPHR |
| | | ALNVYTDSAYLAHSIPLLETVSHIKHISDTAKFFLQCQQLIYNRSIPFYLGHIRAHSGLPGPLSQGNHITDLATKVVATTLTT |
| SRV2_P51517_2mutB | 8,127 | LATAVDILAPQRYADPITWKSDEPVWVDQWPLTQEKLAAAQQLVQEQLQAGHIIESNSPWNTPIFVIKKKSGKWRLLQDLRAVNATMVLMGALQPGLP |
| | | SPVAPPQGYFKIVIDLKDCFFTIPLQPVDQKRFAFSLPSTNFKQPMKRYQWKVLPQGMANSPTLCQKYVAAAIEPVRKSWAQMYIIHYMDDILIAGKLGE |
| | | QVLQCFAQLKQALTTTGLQIAPEKVQLQDPYTYLGFQINGPKITNQKAVIRRDKLQTLNDFQKLLGDINWLRPYLHLTTGDLKPLFDILKGDSNPNSPRS |
| | | LSEAALASLQKVETAIAEQFVTQIDYTQPLTFLIFNTTLTPTGLFWQNNPVMWVHLPASPKKVLLPYYDAIADLIILGRDNSKKYFGLEPSTIIQPYSKSQIH |
| | | WLMQNTETWPIACASYAGNIDNHYPPNKLIQFCKLHAVVFPRIISKTPLDNALLVFTDGSSTGIAAYTFEKTTVRFKTSHTSAQLVELQALIAVLSAFPHR |
| | | ALNVYTDSAYLAHSIPLLETVSHIKHISDTAKFFLQCQQLIYNRSIPFYLGHIRAHSGLPGPLSQGNHITDLATKVVATTLTT |
| WDSV_O92815 | 8,128 | SCQTKNTLNIDEYLLQFPDQLWASLPTDIGRMLVPPITIKIKDNASLPSIRQYPLPKDKTEGLRPLISSLENQGILIKCHSPCNTPIFPIKKAGRDEYRMIHD |
| | | LRAINNIVAPLTAVVASPTTVLSNLAPSLHWFTVIDLSNAFFSVPIHKDSQYLFAFTFEGHQYTWTVLPQGFIHSPTLFSQALYQSLHKIKFKISSEICIYMD |
| | | DVLIASKDRDTNLKDTAVMLQHLASEGHKVSKKKLQLCQQEVVYLGQLLTPEGRKILPDRKVTVSQFQQPTTIRQIRAFLGLVGYCRHWIPEFSIHSKFL |
| | | EKQLKKDTAEPFQLDDQQVEAFNKLKHAITTAPVLVVPDPAKPFQLYTSHSEHASIAVLTQKHAGRTRPIAFLSSKFDAIESGLPPCLKACASIHRSLTQA |
| | | DSFILGAPLIIYTTHAICTLLQRDRSQLVTASRFSKWEADLLRPELTFVACSAVSPAHLYMQSCENNIPPHDCVLLTHTISRPRPDLSDLPIPDPDMTLFSD |
| | | GSYTTGRGGAAVVMHRPVTDDFIIIHQQPGGASAQTAELLALAAACHLATDKTVNIYTDSRYAYGVVHDFGHLWMHRGFVTSAGTPIKNHKEIEYLLKQ |
| | | IMKPKQVSVIKIEAHTKGVSMEVRGNAAADEAAKNAVFLVQR |
| WDSV_O92815_2mut | 8,129 | SCQTKNTLNIDEYLLQFPDQLWASLPTDIGRMLVPPITIKIKDNASLPSIRQYPLPKDKTEGLRPLISSLENQGILIKCHSPCNTPIFPIKKAGRDEYRMIHD |
| | | LRAINNIVAPLTAVVASPTTVLSNLAPSLHWFTVIDLSNAFFSVPIHKDSQYLFAFTFEGHQYTWTVLPQGFIHSPTLFNQALYQSLHKIKFKISSEICIYMD |
| | | DVLIASKDRDTNLKDTAVMLQHLASEGHKVSKKKLQLCQQEVVYLGQLLTPEGRKILPDRKVTVSQFQQPTTIRQIRAFLGLVGYCRHWIPEFSIHSKFL |
| | | EKQLKPDTAEPFQLDDQQVEAFNKLKHAITTAPVLVVPDPAKPFQLYTSHSEHASIAVLTQKHAGRTRPIAFLSSKFDAIESGLPPCLKACASIHRSLTQA |
| | | DSFILGAPLIIYTTHAICTLLQRDRSQLVTASRFSKWEADLLRPELTFVACSAVSPAHLYMQSCENNIPPHDCVLLTHTISRPRPDLSDLPIPDPDMTLFSD |
| | | GSYTTGRGGAAVVMHRPVTDDFIIIHQQPGGASAQTAELLALAAACHLATDKTVNIYTDSRYAYGVVHDFGHLWMHRGFVTSAGTPIKNHKEIEYLLKQ |
| | | IMKPKQVSVIKIEAHTKGVSMEVRGNAAADEAAKNAVFLVQR |
| WDSV_O92815_2mutA | 8,130 | SCQTKNTLNIDEYLLQFPDQLWASLPTDIGRMLVPPITIKIKDNASLPSIRQYPLPKDKTEGLRPLISSLENQGILIKCHSPCNTPIFPIKKAGRDEYRMIHD |
| | | LRAINNIVAPLTAVVASPTTVLSNLAPSLHWFTVIDLSNAFFSVPIHKDSQYLFAFTFEGHQYTWTVLPQGFIHSPTLFNQALYQSLHKIKFKISSEICIYMD |
| | | DVLIASKDRDTNLKDTAVMLQHLASEGHKVSKKKLQLCQQEVVYLGQLLTPEGRKILPDRKVTVSQFQQPTTIRQIRAFLGKVGYCRHFIPEFSIHSKFL |
| | | EKQLKPDTAEPFQLDDQQVEAFNKLKHAITTAPVLVVPDPAKPFQLYTSHSEHASIAVLTQKHAGRTRPIAFLSSKFDAIESGLPPCLKACASIHRSLTQA |
| | | DSFILGAPLIIYTTHAICTLLQRDRSQLVTASRFSKWEADLLRPELTFVACSAVSPAHLYMQSCENNIPPHDCVLLTHTISRPRPDLSDLPIPDPDMTLFSD |
| | | GSYTTGRGGAAVVMHRPVTDDFIIIHQQPGGASAQTAELLALAAACHLATDKTVNIYTDSRYAYGVVHDFGHLWMHRGFVTSAGTPIKNHKEIEYLLKQ |
| | | IMKPKQVSVIKIEAHTKGVSMEVRGNAAADEAAKNAVFLVQR |
| WMSV_P03359 | 8,131 | VLNLEEEYRLHEKPVPSSIDPSWLQLFPTVWAERAGMGLANQVPPVVVELRSGASPVAVRQYPMSKEAREGIRPHIQRFLDLGVLVPCQSPWNTPLL |
| | | PVKKPGTNDYRPVQDLREINKRVQDIHPTVPNPYNLLSSLPPSHTWYSVLDLKDAFFCLKLHPNSQPLFAFEWRDPEKGNTGQLTWTRLPQGFKNSP |
| | | TLFDEALHRDLAPFRALNPQVVLLQYVDDLLVAAPTYRDCKEGTQKLLQELSKLGYRVSAKKAQLCQKEVTYLGYLLKEGKRWLTPARKATVMKIPPP |
| | | TTPRQVREFLGTAGFCRLWIPGFASLAAPLYPLTKESIPFIWTEEHQKAFDRIKEALLSAPALALPDLTKPFTLYVDERAGVARGVLTQTLGPWRRPVAY |
| | | LSKKLDPVASGWPTCLKAVAAVALLLKDADKLTLGQNVTVIASHSLESIVRQPPDRWMTNARMTHYQSLLLNERVSFAPPAVLNPATLLPVESEATPVH |
| | | RCSEILAEETGTRRDLKDQPLPGVPAWYTDGSSFIAEGKRRAGAAIVDGKRTVWASSLPEGTSAQKAELVALTQALRLAEGKDINIYTDSRYAFATAHI |
| | | HGAIYKQRGLLTSAGKDIKNKEEILALLEAIHLPKRVAIIHCPGHQKGNDPVATGNRRADEAAKQAALSTRVLAETTKP |
| WMSV_P03359_3mut | 8,132 | VLNLEEEYRLHEKPVPSSIDPSWLQLFPTVWAERAGMGLANQVPPVVVELRSGASPVAVRQYPMSKEAREGIRPHIQRFLDLGVLVPCQSPWNTPLL |
| | | PVKKPGTNDYRPVQDLREINKRVQDIHPTVPNPYNLLSSLPPSHTWYSVLDLKDAFFCLKLHPNSQPLFAFEWRDPEKGNTGQLTWTRLPQGFKNSP |
| | | TLFNEALHRDLAPFRALNPQVVLLQYVDDLLVAAPTYRDCKEGTQKLLQELSKLGYRVSAKKAQLCQKEVTYLGYLLKEGKRWLTPARKATVMKIPPP |
| | | TTPRQVREFLGTAGFCRLWIPGFASLAAPLYPLTKPSIPFIWTEEHQKAFDRIKEALLSAPALALPDLTKPFTLYVDERAGVARGVLTQTLGPWRRPVAY |
| | | LSKKLDPVASGWPTCLKAVAAVALLLKDADKLTLGQNVTVIASHSLESIVRQPPDRWMTNARMTHYQSLLLNERVSFAPPAVLNPATLLPVESEATPVH |
| | | RCSEILAEETGTRRDLKDQPLPGVPAWYTDGSSFIAEGKRRAGAAIVDGKRTVWASSLPEGTSAQKAELVALTQALRLAEGKDINIYTDSRYAFATAHI |
| | | HGAIYKQRGWLTSAGKDIKNKEEILALLEAIHLPKRVAIIHCPGHQKGNDPVATGNRRADEAAKQAALSTRVLAETTKP |
| WMSV_P03359_3mutA | 8,133 | VLNLEEEYRLHEKPVPSSIDPSWLQLFPTVWAERAGMGLANQVPPVVVELRSGASPVAVRQYPMSKEAREGIRPHIQRFLDLGVLVPCQSPWNTPLL |
| | | PVKKPGTNDYRPVQDLREINKRVQDIHPTVPNPYNLLSSLPPSHTWYSVLDLKDAFFCLKLHPNSQPLFAFEWRDPEKGNTGQLTWTRLPQGFKNSP |
| | | TLFNEALHRDLAPFRALNPQVVLLQYVDDLLVAAPTYRDCKEGTQKLLQELSKLGYRVSAKKAQLCQKEVTYLGYLLKEGKRWLTPARKATVMKIPPP |
| | | TTPRQVREFLGKAGFCRLFIPGFASLAAPLYPLTKPSIPFIWTEEHQKAFDRIKEALLSAPALALPDLTKPFTLYVDERAGVARGVLTQTLGPWRRPVAY |
| | | LSKKLDPVASGWPTCLKAVAAVALLLKDADKLTLGQNVTVIASHSLESIVRQPPDRWMTNARMTHYQSLLLNERVSFAPPAVLNPATLLPVESEATPVH |
| | | RCSEILAEETGTRRDLKDQPLPGVPAWYTDGSSFIAEGKRRAGAAIVDGKRTVWASSLPEGTSAQKAELVALTQALRLAEGKDINIYTDSRYAFATAHI |
| | | HGAIYKQRGWLTSAGKDIKNKEEILALLEAIHLPKRVAIIHCPGHQKGNDPVATGNRRADEAAKQAALSTRVLAETTKP |
| XMRV6_A1Z651 | 8,134 | TLNIEDEYRLHETSKEPDVPLGSTWLSDFPQAWAETGGMGLAVRQAPLIIPLKATSTPVSIKQYPMSQEARLGIKPHIQRLLDQGILVPCQSPWNTPLLP |
| | | VKKPGTNDYRPVQDLREVNKRVEDIHPTVPNPYNLLSGLPPSHQWYTVLDLKDAFFCLRLHPTSQPLFAFEWRDPEMGISGQLTWTRLPQGFKNSPT |
| | | LFDEALHRDLADFRIQHPDLILLQYVDDLLLAATSEQDCQRGTRALLQTLGNLGYRASAKKAQICQKQVKYLGYLLKEGQRWLTEARKETVMGQPTPK |
| | | TPRQLREFLGTAGFCRLWIPGFAEMAAPLYPLTKTGTLFNWGPDQQKAYQEIKQALLTAPALGLPDLTKPFELFVDEKQGYAKGVLTQKLGPWRRPVA |
| | | YLSKKLDPVAAGWPPCLRMVAAIAVLTKDAGKLTMGQPLVILAPHAVEALVKQPPDRWLSNARMTHYQAMLLDTDRVQFGPVVALNPATLLPLPEKEA |
| | | PHDCLEILAETHGTRPDLTDQPIPDADYTWYTDGSSFLQEGQRRAGAAVTTETEVIWARALPAGTSAQRAELIALTQALKMAEGKKLNVYTDSRYAFAT |
| | | AHVHGEIYRRRGLLTSEGREIKNKNEILALLKALFLPKRLSIIHCPGHQKGNSAEARGNRMADQAAREAAMKAVLETSTLL |
| XMRV6_A1Z651_3mut | 8,135 | TLNIEDEYRLHETSKEPDVPLGSTWLSDFPQAWAETGGMGLAVRQAPLIIPLKATSTPVSIKQYPMSQEARLGIKPHIQRLLDQGILVPCQSPWNTPLLP |
| | | VKKPGTNDYRPVQDLREVNKRVEDIHPTVPNPYNLLSGLPPSHQWYTVLDLKDAFFCLRLHPTSQPLFAFEWRDPEMGISGQLTWTRLPQGFKNSPT |
| | | LFNEALHRDLADFRIQHPDLILLQYVDDLLLAATSEQDCQRGTRALLQTLGNLGYRASAKKAQICQKQVKYLGYLLKEGQRWLTEARKETVMGQPTPK |
| | | TPRQLREFLGTAGFCRLWIPGFAEMAAPLYPLTKPGTLFNWGPDQQKAYQEIKQALLTAPALGLPDLTKPFELFVDEKQGYAKGVLTQKLGPWRRPV |
| | | AYLSKKLDPVAAGWPPCLRMVAAIAVLTKDAGKLTMGQPLVILAPHAVEALVKQPPDRWLSNARMTHYQAMLLDTDRVQFGPVVALNPATLLPLPEKE |
| | | APHDCLEILAETHGTRPDLTDQPIPDADYTWYTDGSSFLQEGQRRAGAAVTTETEVIWARALPAGTSAQRAELIALTQALKMAEGKKLNVYTDSRYAF |
| | | ATAHVHGEIYRRRGWLTSEGREIKNKNEILALLKALFLPKRLSIIHCPGHQKGNSAEARGNRMADQAAREAAMKAVLETSTLL |
| XMRV6_A1Z651_3mutA | 8,136 | TLNIEDEYRLHETSKEPDVPLGSTWLSDFPQAWAETGGMGLAVRQAPLIIPLKATSTPVSIKQYPMSQEARLGIKPHIQRLLDQGILVPCQSPWNTPLLP |
| | | VKKPGTNDYRPVQDLREVNKRVEDIHPTVPNPYNLLSGLPPSHQWYTVLDLKDAFFCLRLHPTSQPLFAFEWRDPEMGISGQLTWTRLPQGFKNSPT |
| | | LFNEALHRDLADFRIQHPDLILLQYVDDLLLAATSEQDCQRGTRALLQTLGNLGYRASAKKAQICQKQVKYLGYLLKEGQRWLTEARKETVMGQPTPK |
| | | TPRQLREFLGKAGFCRLFIPGFAEMAAPLYPLTKPGTLFNWGPDQQKAYQEIKQALLTAPALGLPDLTKPFELFVDEKQGYAKGVLTQKLGPWRRPVA |
| | | YLSKKLDPVAAGWPPCLRMVAAIAVLTKDAGKLTMGQPLVILAPHAVEALVKQPPDRWLSNARMTHYQAMLLDTDRVQFGPVVALNPATLLPLPEKEA |
| | | PHDCLEILAETHGTRPDLTDQPIPDADYTWYTDGSSFLQEGQRRAGAAVTTETEVIWARALPAGTSAQRAELIALTQALKMAEGKKLNVYTDSRYAFAT |
| | | AHVHGEIYRRRGWLTSEGREIKNKNEILALLKALFLPKRLSIIHCPGHQKGNSAEARGNRMADQAAREAAMKAVLETSTLL |

[0368] In some embodiments, reverse transcriptase domains are modified, for example by site-specific mutation. In some embodiments, reverse transcriptase domains are engineered to have improved properties, e.g. SuperScript IV (SSIV) reverse transcriptase derived from the MMLV RT. In some embodiments, the reverse transcriptase domain may be engineered to have lower error rates, e.g., as described in WO2001068895, incorporated herein by reference. In some embodiments, the reverse transcriptase domain may be engineered to be more thermostable. In some embodiments, the reverse transcriptase domain may be engineered to be more processive. In some embodiments, the reverse transcriptase domain may be engineered to have tolerance to inhibitors. In some embodiments, the reverse transcriptase domain may be engineered to be faster. In some embodiments, the reverse transcriptase domain may be engineered to better tolerate modified nucleotides in the RNA template. In some embodiments, the reverse transcriptase domain may be engineered to insert modified DNA nucleotides. In some embodiments, the reverse transcriptase domain is engineered to bind a template RNA. In some embodiments, one or more mutations are chosen from D200N, L603W, T330P, D524G, E562Q, D583N, P51L, S67R, E67K, T197A, H204R, E302K, F309N, W313F, L435G, N454K, H594Q, L671P, E69K, H8Y, T306K, or D653N in the RT domain of murine leukemia virus reverse transcriptase or a corresponding mutation at a corresponding position of another RT domain.

In some embodiments, a gene modifying polypeptide comprises the RT domain from a retroviral reverse transcriptase, e.g., a wild-type M-MLV RT, e.g., comprising the following sequence:

M-MLV (WT):
(SEQ ID NO: 5002)
TLNIEDEYRLHETSKEPDVSLGSTWLSDFPQAWAETGGMGLAVRQAPLII
PLKATSTPVSIKQYPMSQEARLGIKPHIQRLLDQGILVPCQSPWNTPLLP
VKKPGTNDYRPVQDLREVNKRVEDIHPTVPNPYNLLSGLPPSHQWYTVLD
LKDAFFCLRLHPTSQPLFAFEWRDPEMGISGQLTWTRLPQGFKNSPTLFD
EALHRDLADFRIQHPDLILLQYVDDLLLAATSELDCQQGTRALLQTLGNL
GYRASAKKAQICQKQVKYLGYLLKEGQRWLTEARKETVMGQPTPKTPRQL
REFLGTAGFCRLWIPGFAEMAAPLYPLTKTGTLFNWGPDQQKAYQEIKQA
LLTAPALGLPDLTKPFELFVDEKQGYAKGVLTQKLGPWRRPVAYLSKKLD
PVAAGWPPCLRMVAAIAVLTKDAGKLTMGQPLVILAPHAVEALVKQPPDR
WLSNARMTHYQALLLDTDRVQFGPVVALNPATLLPLPEEGLQHNCLDILA
EAHGTRPDLTDQPLPDADHTWYTDGSSLLQEGQRKAGAAVTTETEVIWAK
ALPAGTSAQRAELIALTQALKMAEGKKLNVYTDSRYAFATAHIHGEIYRR
RGLLTSEGKEIKNKDEILALLKALFLPKRLSIIHCPGHQKGHSAEARGNR
MADQAARKAAITETPDTSTLLI

[0369] In some embodiments, a gene modifying polypeptide comprises the RT domain from a retroviral reverse transcriptase, e.g., an M-MLV RT, e.g., comprising the following sequence:

(SEQ ID NO: 5003)
TLNIEDEHRLHETSKEPDVSLGSTWLSDFPQAWAETGGMGLAVRQAPLII
PLKATSTPVSIKQYPMSQEARLGIKPHIQRLLDQGILVPCQSPWNTPLLP
VKKPGTNDYRPVQDLREVNKRVEDIHPTVPNPYNLLSGLPPSHQWYTVLD
LKDAFFCLRLHPTSQPLFAFEWRDPEMGISGQLTWTRLPQGFKNSPTLFD
EALHRDLADFRIQHPDLILLQYVDDLLLAATSELDCQQGTRALLQTLGNL
GYRASAKKAQICQKQVKYLGYLLKEGQRWLTEARKETVMGQPTPKTPRQL
REFLGTAGFCRLWIPGFAEMAAPLYPLTKTGTLFNWGPDQQKAYQEIKQA
LLTAPALGLPDLTKPFELFVDEKQGYAKGVLTQKLGPWRRPVAYLSKKLD
PVAAGWPPCLRMVAAIAVLTKDAGKLTMGQPLVILAPHAVEALVKQPPDR
WLSNARMTHYQALLLDTDRVQFGPVVALNPATLLPLPEEGLQHNCLDILA
EAHGTRPDLTDQPLPDADHTWYTDGSSLLQEGQRKAGAAVTTETEVIWAK
ALPAGTSAQRAELIALTQALKMAEGKKLNVYTDSRYAFATAHIHGEIYRR
RGLLTSEGKEIKNKDEILALLKALFLPKRLSIIHCPGHQKGHSAEARGNR
MADQAARKAAITETPDTSTLL

[0370] In some embodiments, a gene modifying polypeptide comprises the RT domain from a retroviral reverse transcriptase comprising the sequence of amino acids 659-1329 of NP 057933. In embodiments, the gene modifying polypeptide further comprises one additional amino acid at the N-terminus of the sequence of amino acids 659-1329 of NP_057933, e.g., as shown below:

(SEQ ID NO: 5004)
TLNIEDEHRLHETSKEPDVSLGSTWLSDFPQAWAETGGMGLAVRQAPLII
PLKATSTPVSIKQYPMSQEARLGIKPHIQRLLDQGILVPCQSPWNTPLLP
VKKPGTNDYRPVQDLREVNKRVEDIHPTVPNPYNLLSGLPPSHQWYTVLD
LKDAFFCLRLHPTSQPLFAFEWRDPEMGISGQLTWTRLPQGFKNSPTLFD
EALHRDLADFRIQHPDLILLQYVDDLLLAATSELDCQQGTRALLQTLGNL
GYRASAKKAQICQKQVKYLGYLLKEGQRWLTEARKETVMGQPTPKTPRQL
REFLGTAGFCRLWIPGFAEMAAPLYPLTKTGTLFNWGPDQQKAYQEIKQA
LLTAPALGLPDLTKPFELFVDEKQGYAKGVLTQKLGPWRRPVAYLSKKLD
PVAAGWPPCLRMVAAIAVLTKDAGKLTMGQPLVILAPHAVEALVKQPPDR
WLSNARMTHYQALLLDTDRVQFGPVVALNPATLLPLPEEGLQHNCLDILA
EAHGTRPDLTDQPLPDADHTWYTDGSSLLQEGQRKAGAAVTTETEVIWAK
ALPAGTSAQRAELIALTQALKMAEGKKLNVYTDSRYAFATAHIHGEIYRR
RGLLTSEGKEIKNKDEILALLKALFLPKRLSIIHCPGHQKGHSAEARGNR
MADQAARKAA

Core RT (bold), annotated per above
RNAseH (underlined), annotated per above

[0371] In embodiments, the gene modifying polypeptide further comprises one additional amino acid at the C-terminus of the sequence of amino acids 659-1329 of NP 057933. In embodiments, the gene modifying polypeptide comprises an RNaseH1 domain (e.g., amino acids 1178-1318 of NP_057933).

[0372] In some embodiments, a retroviral reverse transcriptase domain, e.g., M-MLV RT, may comprise one or more mutations from a wild-type sequence that may improve features of the RT, e.g., thermostability, processivity, and/or template binding. In some embodiments, an M-ML V RT domain comprises, relative to the M-MLV (WT) sequence above, one or more mutations, e.g., selected from D200N, L603W, T330P, T306K, W313F, D524G, E562Q, D583N, P51L, S67R, E67K, T197A, H204R, E302K, F309N, L435G, N454K, H594Q, D653N, R110S, K103L, e.g., a combination of mutations, such as D200N, L603W, and T330P, optionally further including T306K and W313F. In some embodiments, an M-MLV RT used herein comprises the mutations D200N, L603W, T330P, T306K and W313F. In embodiments, the mutant M-MLV RT comprises the following amino acid sequence:

M-MLV (PE2):
(SEQ ID NO: 5005)
TLNIEDEYRLHETSKEPDVSLGSTWLSDFPQAWAETGGMGLAVRQAPLII
PLKATSTPVSIKQYPMSQEARLGIKPHIQRLLDQGILVPCQSPWNTPLLP
VKKPGTNDYRPVQDLREVNKRVEDIHPTVPNPYNLLSGLPPSHQWYTVLD
LKDAFFCLRLHPTSQPLFAFEWRDPEMGISGQLTWTRLPQGFKNSPTLFN
EALHRDLADFRIQHPDLILLQYVDDLLLAATSELDCQQGTRALLQTLGNL
GYRASAKKAQICQKQVKYLGYLLKEGQRWLTEARKETVMGQPTPKTPRQL
REFLGKAGFCRLFIPGFAEMAAPLYPLTKPGTLFNWGPDQQKAYQEIKQA
LLTAPALGLPDLTKPFELFVDEKQGYAKGVLTQKLGPWRRPVAYLSKKLD
PVAAGWPPCLRMVAAIAVLTKDAGKLTMGQPLVILAPHAVEALVKQPPDR
WLSNARMTHYQALLLDTDRVQFGPVVALNPATLLPLPEEGLQHNCLDILA
EAHGTRPDLTDQPLPDADHTWYTDGSSLLQEGQRKAGAAVTTETEVIWAK
ALPAGTSAQRAELIALTQALKMAEGKKLNVYTDSRYAFATAHIHGEIYRR
RGWLTSEGKEIKNKDEILALLKALFLPKRLSIIHCPGHQKGHSAEARGNR
MADQAARKAAITETPDTSTLLI

[0373] In some embodiments, a writing domain (e.g., RT domain) comprises an RNA-binding domain, e.g., that specifically binds to an RNA sequence. In some embodiments, a template RNA comprises an RNA sequence that is specifically bound by the RNA-binding domain of the writing domain.

[0374] In some embodiments, the reverse transcription domain only recognizes and reverse transcribes a specific template, e.g., a template RNA of the system. In some embodiments, the template comprises a sequence or structure that enables recognition and reverse transcription by a reverse transcription domain. In some embodiments, the template comprises a sequence or structure that enables association with an RNA-binding domain of a polypeptide component of a genome engineering system described herein. In some embodiments, the genome engineering system reverse preferably transcribes a template comprising an association sequence over a template lacking an association sequence.

[0375] The writing domain may also comprise DNA-dependent DNA polymerase activity, e.g., comprise enzymatic activity capable of writing DNA into the genome from a template DNA sequence. In some embodiments, DNA-dependent DNA polymerization is employed to complete second-strand synthesis of a target site edit. In some embodiments, the DNA-dependent DNA polymerase activity is provided by a DNA polymerase domain in the polypeptide. In some embodiments, the DNA-dependent DNA polymerase activity is provided by a reverse transcriptase domain that is also capable of DNA-dependent DNA polymerization, e.g., second-strand synthesis. In some embodiments, the DNA-dependent DNA polymerase activity is provided by a second polypeptide of the system. In some embodiments, the DNA-dependent DNA polymerase activity is provided by an endogenous host cell polymerase that is optionally recruited to the target site by a component of the genome engineering system.

[0376] In some embodiments, the reverse transcriptase domain has a lower probability of premature termination rate (Poff) in vitro relative to a reference reverse transcriptase domain. In some embodiments, the reference reverse transcriptase domain is a viral reverse transcriptase domain, e.g., the RT domain from M-MLV.

[0377] In some embodiments, the reverse transcriptase domain has a lower probability of premature termination rate (Poff) in vitro of less than about 5×10⁻³/nt, 5×10⁻⁴/nt, or 5×10⁻⁶/nt, e.g., as measured on a 1094 nt RNA. In embodiments, the in vitro premature termination rate is determined as described in Bibillo and Eickbush (2002) J Biol Chem 277(38):34836-34845 (incorporated by reference herein its entirety).

[0378] In some embodiments, the reverse transcriptase domain is able to complete at least about 30% or 50% of integrations in cells. The percent of complete integrations can be measured by dividing the number of substantially full-length integration events (e.g., genomic sites that comprise at least 98% of the expected integrated sequence) by the number of total (including substantially full-length and partial) integration events in a population of cells. In embodiments, the integrations in cells is determined (e.g., across the integration site) using long-read amplicon sequencing, e.g., as described in Karst et al. (2020) bioRxiv doi.org/10.1101/645903 (incorporated by reference herein in its entirety).

[0379] In embodiments, quantifying integrations in cells comprises counting the fraction of integrations that contain at least about 75%, 80%, 85%, 90%, 95%, 96%, 97%, 98%, 99%, or 100% of the DNA sequence corresponding to the template RNA (e.g., a template RNA having a length of at least 0.05, 0.1, 0.5, 0.6, 0.7, 0.8, 0.9, 1, 1.5, 2, 3, 4, or 5 kb, e.g., a length between 0.5-0.6, 0.6-0.7, 0.7-0.8, 0.8-0.9, 1.0-1.2, 1.2-1.4, 1.4-1.6, 1.6-1.8, 1.8-2.0, 2-3, 3-4, or 4-5 kb).

[0380] In some embodiments, the reverse transcriptase domain is capable of polymerizing dNTPs in vitro. In embodiments, the reverse transcriptase domain is capable of polymerizing dNTPs in vitro at a rate between 0.1-50 nt/sec (e.g., between 0.1-1, 1-10, or 10-50 nt/sec). In embodiments, polymerization of dNTPs by the reverse transcriptase domain is measured by a single-molecule assay, e.g., as described in Schwartz and Quake (2009) PNAS 106(48):20294-20299 (incorporated by reference in its entirety).

[0381] In some embodiments, the reverse transcriptase domain has an in vitro error rate (e.g., misincorporation of nucleotides) of between 1×10⁻³-1×10⁻⁴ or 1×10⁻⁴-1×10⁻⁵ substitutions/nt, e.g., as described in Yasukawa et al. (2017) Biochem Biophys Res Commun 492(2): 147-153 (incorporated herein by reference in its entirety). In some embodiments, the reverse transcriptase domain has an error rate (e.g., misincorporation of nucleotides) in cells (e.g., HEK293T cells) of between 1×10⁻³-1×10⁻⁴ or 1×10⁻⁴-1×10⁻⁵ substitutions/nt, e.g., by long-read amplicon sequencing, e.g., as described in Karst et al. (2020) bioRxiv doi.org/10.1101/645903 (incorporated by reference herein in its entirety).

[0382] In some embodiments, the reverse transcriptase domain is capable of performing reverse transcription of a target RNA in vitro. In some embodiments, the reverse transcriptase requires a primer of at least 3 nucleotides to initiate reverse transcription of a template. In some embodiments, reverse transcription of the target RNA is determined by detection of cDNA from the target RNA (e.g., when provided with a ssDNA primer, e.g., which anneals to the target with at least 3, 4, 5, 6, 7, 8, 9, or 10 nt at the 3′ end), e.g., as described in Bibillo and Eickbush (2002) J Biol Chem 277(38):34836-34845 (incorporated herein by reference in its entirety).

[0383] In some embodiments, the reverse transcriptase domain performs reverse transcription at least 5 or 10 times more efficiently (e.g., by cDNA production), e.g., when converting its RNA template to cDNA, for example, as compared to an RNA template lacking the protein binding motif (e.g., a 3′ UTR). In embodiments, efficiency of reverse transcription is measured as described in Yasukawa et al. (2017) Biochem Biophys Res Commun 492(2): 147-153 (incorporated by reference herein in its entirety).

[0384] In some embodiments, the reverse transcriptase domain specifically binds a specific RNA template with higher frequency (e.g., about 5 or 10-fold higher frequency) than any endogenous cellular RNA, e.g., when expressed in cells (e.g., HEK293T cells). In embodiments, frequency of specific binding between the reverse transcriptase domain and the template RNA are measured by CLIP-seq, e.g., as described in Lin and Miles (2019) Nucleic Acids Res 47(11):5490-5501 (incorporated herein by reference in its entirety).

[0385] In some embodiments, an RT domain (e.g., as listed in Table 6) comprises one or more mutations as listed in Table 2A below. In some embodiment, an RT domain as listed in Table 6 comprises one, two, three, four, five, or six of the mutations listed in the corresponding row of Table 2A below.

TABLE 2A
Exemplary RT domain mutations (relative to corresponding wild-type sequences as listed in the
corresponding row of Table 6)

| RT Domain Name | Mutation(s) | | | | | |
|---|---|---|---|---|---|---|
| AVIRE_P03360 | | | | | | |
| AVIRE_P03360_3mut | D200N | G330P | L605W | | | |
| AVIRE_P03360_3mutA | D200N | G330P | L605W | T306K | W313F | |
| BAEVM_P10272 | | | | | | |
| BAEVM_P10272_3mut | D198N | E328P | L602W | | | |
| BAEVM_P10272_3mutA | D198N | E328P | L602W | T304K | W311F | |
| BLVAU_P25059 | | | | | | |
| BLVAU_P25059_2mut | E159Q | G286P | | | | |
| BLVJ_P03361 | | | | | | |
| BLVJ_P03361_2mut | E159Q | L524W | | | | |
| BLVJ_P03361_2mutB | E159Q | L524W | 197P | | | |
| FFV_O93209 | D21N | | | | | |
| FFV_O93209_2mut | D21N | T293N | T419P | | | |
| FFV_O93209_2mutA | D21N | T293N | T419P | L393K | | |
| FFV_O93209-Pro | | | | | | |
| FFV_O93209-Pro_2mut | T207N | T333P | | | | |
| FFV_O93209-Pro_2mutA | T207N | T333P | L307K | | | |
| FLV_P10273 | | | | | | |
| FLV_P10273_3mut | D199N | L602W | | | | |
| FLV_P10273_3mutA | D199N | L602W | T305K | W312F | | |
| FOAMV_P14350 | D24N | | | | | |
| FOAMV_P14350_2mut | D24N | T296N | S420P | | | |
| FOAMV_P14350_2mutA | D24N | T296N | S420P | L396K | | |
| FOAMV_P14350-Pro | | | | | | |
| FOAMV_P14350-Pro_2mut | T207N | S331P | | | | |
| FOAMV_P14350-Pro_2mutA | T207N | S331P | L307K | | | |
| GALV_P21414 | | | | | | |
| GALV_P21414_3mut | D198N | E328P | L600W | | | |
| GALV_P21414_3mutA | D198N | E328P | L600W | T304K | W311F | |
| GHTL1A_P03362 | | | | | | |
| GHTL1A_P03362_2mut | E152Q | R279P | | | | |
| GHTL1A_P03362_2mutB | E152Q | R279P | L90P | | | |
| HTL1C_P14078 | | | | | | |
| HTL1C_P14078_2mut | E152Q | R279P | | | | |
| HTL1L_P0C211 | | | | | | |
| HTL1L_P0C211_2mut | E149Q | L527W | | | | |
| HTL1L_P0C211_2mutB | E149Q | L527W | L87P | | | |
| HTL32_Q0R5R2 | | | | | | |
| HTL32_Q0R5R2_2mut | E149Q | L526W | | | | |
| HTL32_Q0R5R2_2mutB | E149Q | L526W | L87P | | | |
| HTL3P_Q4U0X6 | | | | | | |
| HTL3P_Q4U0X6_2mut | E149Q | L526W | | | | |
| HTL3P_Q4U0X6_2mutB | E149Q | L526W | L87P | | | |
| HTLV2_P03363_2mut | E147Q | G274P | | | | |
| JSRV_P31623 | | | | | | |
| JSRV_P31623_2mutB | A100P | | | | | |
| KORV_Q9TTC1 | D32N | | | | | |
| KORV_Q9TTC1_3mut | D32N | D322N | E452P | L724W | | |
| KORV_Q9TTC1_3mutA | D32N | D322N | E452P | L724W | T428K | W435F |
| KORV_Q9TTC1-Pro | | | | | | |
| KORV_Q9TTC1-Pro_3mut | D231N | E361P | L633W | | | |
| KORV_Q9TTC1-Pro_3mutA | D231N | E361P | L633W | T337K | W344F | |
| MLVAV_P03356 | | | | | | |
| MLVAV_P03356_3mut | D200N | T330P | L603W | | | |
| MLVAV_P03356_3mutA | D200N | T330P | L603W | T306K | W313F | |
| MLVBM_Q7SVK7 | | | | | | |
| MLVBM_Q7SVK7 | | | | | | |
| MLVBM_Q7SVK7_3mut | D200N | T330P | L603W | | | |
| MLVBM_Q7SVK7_3mut | D200N | T330P | L603W | | | |
| MLVBM_Q7SVK7_3mutA_WS | D199N | T329P | L602W | T305K | W312F | |
| MLVBM_Q7SVK7_3mutA_WS | D199N | T329P | L602W | T305K | W312F | |
| MLVCB_P08361 | | | | | | |
| MLVCB_P08361_3mut | D200N | T330P | L603W | | | |
| MLVCB_P08361_3mutA | D200N | T330P | L603W | T306K | W313F | |
| MLVF5_P26810 | | | | | | |
| MLVF5_P26810_3mut | D200N | T330P | L603W | | | |
| MLVF5_P26810_3mutA | D200N | T330P | L603W | T306K | W313F | |
| MLVFF_P26809_3mut | D200N | T330P | L603W | | | |
| MLVFF_P26809_3mutA | D200N | T330P | L603W | T306K | W313F | |
| MLVMS_P03355 | | | | | | |
| MLVMS_P03355 | | | | | | |
| MLVMS_P03355_3mut | D200N | T330P | L603W | | | |
| MLVMS_P03355_3mut | D200N | T330P | L603W | | | |
| MLVMS_P03355_3mutA_WS | D200N | T330P | L603W | T306K | W313F | |
| MLVMS_P03355_3mutA_WS | D200N | T330P | L603W | T306K | W313F | |
| MLVMS_P03355_PLV919 | D200N | T330P | L603W | T306K | W313F | H8Y |
| MLVMS_P03355_PLV919 | D200N | T330P | L603W | T306K | W313F | H8Y |
| MLVRD_P11227 | | | | | | |
| MLVRD_P11227_3mut | D200N | T330P | L603W | | | |
| MMTVB_P03365 | D26N | | | | | |
| MMTVB_P03365 | D26N | | | | | |
| MMTVB_P03365_2mut | D26N | G401P | | | | |
| MMTVB_P03365_2mut_WS | G400P | | | | | |
| MMTVB_P03365_2mut_WS | G400P | | | | | |
| MMTVB_P03365_2mutB | D26N | G401P | V215P | | | |
| MMTVB_P03365_2mutB | D26N | G401P | V215P | | | |
| MMTVB_P03365_2mutB_WS | G400P | V212P | | | | |
| MMTVB_P03365_2mutB_WS | G400P | V212P | | | | |
| MMTVB_P03365_WS | | | | | | |
| MMTVB_P03365_WS | | | | | | |
| MMTVB_P03365-Pro | | | | | | |
| MMTVB_P03365-Pro | | | | | | |
| MMTVB_P03365-Pro_2mut | G309P | | | | | |
| MMTVB_P03365-Pro_2mut | G309P | | | | | |
| MMTVB_P03365-Pro_2mutB | G309P | V123P | | | | |
| MMTVB_P03365-Pro_2mutB | G309P | V123P | | | | |
| MPMV_P07572 | | | | | | |
| MPMV_P07572_2mutB | G289P | I103P | | | | |
| PERV_Q4VFZ2 | | | | | | |
| PERV Q4VFZ2 | | | | | | |
| PERV_Q4VFZ2_3mut | D199N | E329P | L602W | | | |
| PERV_Q4VFZ2_3mut | D199N | E329P | L602W | | | |
| PERV_Q4VFZ2_3mutA_WS | D196N | E326P | L599W | T302K | W309F | |
| PERV_Q4VFZ2_3mutA_WS | D196N | E326P | L599W | T302K | W309F | |
| SFV1_P23074 | D24N | | | | | |
| SFV1_P23074_2mut | D24N | T296N | N420P | | | |
| SFV1_P23074_2mutA | D24N | T296N | N420P | L396K | | |
| SFV1_P23074-Pro | | | | | | |
| SFV1_P23074-Pro_2mut | T207N | N331P | | | | |
| SFV1_P23074-Pro_2mutA | T207N | N331P | L307K | | | |
| SFV3L_P27401 | D24N | | | | | |
| SFV3L_P27401_2mut | D24N | T296N | N422P | | | |
| SFV3L_P27401_2mutA | D24N | T296N | N422P | L396K | | |
| SFV3L_P27401-Pro | | | | | | |
| SFV3L_P27401-Pro_2mut | T307N | N333P | | | | |
| SFV3L_P27401-Pro_2mutA | T307N | N333P | L307K | | | |
| SFVCP_Q87040 | D24N | | | | | |
| SFVCP_Q87040_2mut | D24N | T296N | K422P | | | |
| SFVCP_Q87040_2mutA | D24N | T296N | K422P | L396K | | |
| SFVCP_Q87040-Pro | | | | | | |
| SFVCP_Q87040-Pro_2mut | T207N | K333P | | | | |
| SFVCP_Q87040-Pro_2mutA | T207N | K333P | L307K | | | |
| SMRVH_P03364 | | | | | | |
| SMRVH_P03364_2mut | G288P | | | | | |
| SMRVH_P03364_2mutB | G288P | I102P | | | | |
| SRV2_P51517 | | | | | | |
| SRV2_P51517_2mutB | I103P | | | | | |
| WDSV_O92815 | | | | | | |
| WDSV_O92815_2mut | S183N | K312P | | | | |
| WDSV_O92815_2mutA | S183N | K312P | L288K | W295F | | |
| WMSV_P03359 | | | | | | |
| WMSV_P03359_3mut | D198N | E328P | L600W | | | |
| WMSV_P03359_3mutA | D198N | E328P | L600W | T304K | W311F | |
| XMRV6_A1Z651 | | | | | | |
| XMRV6_A1Z651_3mut | D200N | T330P | L603W | | | |
| XMRV6_A1Z651_3mutA | D200N | T330P | L603W | T306K | W313F | |

### Template Nucleic Acid Binding Domain

[0386] The gene modifying polypeptide typically contains regions capable of associating with the template nucleic acid (e.g., template RNA). In some embodiments, the template nucleic acid binding domain is an RNA binding domain. In some embodiments, the RNA binding domain is a modular domain that can associate with RNA molecules containing specific signatures, e.g., structural motifs. In other embodiments, the template nucleic acid binding domain (e.g., RNA binding domain) is contained within the reverse transcription domain, e.g., the reverse transcriptase-derived component has a known signature for RNA preference.

[0387] In other embodiments, the template nucleic acid binding domain (e.g., RNA binding domain) is contained within the target DNA binding domain. For example, in some embodiments, the DNA binding domain is a CRISPR-associated protein that recognizes the structure of a template nucleic acid (e.g., template RNA) comprising a gRNA. In some embodiments, a gene modifying polypeptide comprises a DNA-binding domain comprising a CRISPR-associated protein that associates with a gRNA scaffold that allows the DNA-binding domain to bind a target genomic DNA sequence. In some embodiments, the gRNA scaffold and gRNA spacer is comprised within the template nucleic acid (e.g., template RNA), thus the DNA-binding domain is also the template nucleic acid binding domain. In some embodiments, the polypeptide possesses RNA binding function in multiple domains, e.g., can bind a gRNA structure in a CRISPR-associated DNA binding domain and an additional sequence or structure in a reverse transcriptase domain.

[0388] In some embodiments, the RNA binding domain is capable of binding to a template RNA with greater affinity than a reference RNA binding domain. In some embodiments, the reference RNA binding domain is an RNA binding domain from Cas9 of S. pyogenes. In some embodiments, the RNA binding domain is capable of binding to a template RNA with an affinity between 100 pM—10 nM (e.g., between 100 pM-1 nM or 1 nM—10 nM). In some embodiments, the affinity of a RNA binding domain for its template RNA is measured in vitro, e.g., by thermophoresis, e.g., as described in Asmari et al. Methods 146:107-119 (2018) (incorporated by reference herein in its entirety). In some embodiments, the affinity of a RNA binding domain for its template RNA is measured in cells (e.g., by FRET or CLIP-Seq).

[0389] In some embodiments, the RNA binding domain is associated with the template RNA in vitro at a frequency at least about 5-fold or 10-fold higher than with a scrambled RNA. In some embodiments, the frequency of association between the RNA binding domain and the template RNA or scrambled RNA is measured by CLIP-seq, e.g., as described in Lin and Miles (2019) Nucleic Acids Res 47(11): 5490-5501 (incorporated by reference herein in its entirety). In some embodiments, the RNA binding domain is associated with the template RNA in cells (e.g., in HEK293T cells) at a frequency at least about 5-fold or 10-fold higher than with a scrambled RNA. In some embodiments, the frequency of association between the RNA binding domain and the template RNA or scrambled RNA is measured by CLIP-seq, e.g., as described in Lin and Miles (2019), supra.

### Endonuclease Domains and DNA Binding Domains

[0390] In some embodiments, a gene modifying polypeptide possesses the function of DNA target site cleavage via an endonuclease domain. In some embodiments, a gene modifying polypeptide comprises a DNA binding domain, e.g., for binding to a target nucleic acid. In some embodiments, a domain (e.g., a Cas domain) of the gene modifying polypeptide comprises two or more smaller domains, e.g., a DNA binding domain and an endonuclease domain. It is understood that when a DNA binding domain (e.g., a Cas domain) is said to bind to a target nucleic acid sequence, in some embodiments, the binding is mediated by a gRNA.

[0391] In some embodiments, a domain has two functions. For example, in some embodiments, the endonuclease domain is also a DNA-binding domain. In some embodiments, the endonuclease domain is also a template nucleic acid (e.g., template RNA) binding domain. For example, in some embodiments, a polypeptide comprises a CRISPR-associated endonuclease domain that binds a template RNA comprising a gRNA, binds a target DNA sequence (e.g., with complementarity to a portion of the gRNA), and cuts the target DNA sequence. In some embodiments, an endonuclease domain or endonuclease/DNA-binding domain from a heterologous source can be used or can be modified (e.g., by insertion, deletion, or substitution of one or more residues) in a gene modifying system described herein.

[0392] In some embodiments, a nucleic acid encoding the endonuclease domain or endonuclease/DNA binding domain is altered from its natural sequence to have altered codon usage, e.g. improved for human cells. In some embodiments, the endonuclease element is a heterologous endonuclease element, such as a Cas endonuclease (e.g., Cas9), a type-II restriction endonuclease (e.g., Fok1), a meganuclease (e.g., I-Scel), or other endonuclease domain.

[0393] In certain aspects, the DNA-binding domain of a gene modifying polypeptide described herein is selected, designed, or constructed for binding to a desired host DNA target sequence. In certain embodiments, the DNA-binding domain of the polypeptide is a heterologous DNA-binding element. In some embodiments the heterologous DNA binding element is a zinc-finger element or a TAL effector element, e.g., a zinc-finger or TAL polypeptide or functional fragment thereof. In some embodiments the heterologous DNA binding element is a sequence-guided DNA binding element, such as Cas9, Cpf1, or other CRISPR-related protein that has been altered to have no endonuclease activity. In some embodiments the heterologous DNA binding element retains endonuclease activity. In some embodiments, the heterologous DNA binding element retains partial endonuclease activity to cleave ssDNA, e.g., possesses nickase activity. In specific embodiments, the heterologous DNA-binding domain can be any one or more of Cas9, TAL domain, ZF domain, Myb domain, combinations thereof, or multiples thereof.

[0394] In some embodiments, DNA-binding domains are modified, for example by site-specific mutation, increasing or decreasing DNA-binding elements (for example, number and/or specificity of zinc fingers), etc., to alter DNA-binding specificity and affinity. In some embodiments a nucleic acid sequence encoding the DNA binding domain is altered from its natural sequence to have altered codon usage, e.g. improved for human cells. In embodiments, the DNA binding domain comprises one or more modifications relative to a wild-type DNA binding domain, e.g., a modification via directed evolution, e.g., phage-assisted continuous evolution (PACE).

[0395] In some embodiments, the DNA binding domain comprises a meganuclease domain (e.g., as described herein, e.g., in the endonuclease domain section), or a functional fragment thereof. In some embodiments, the meganuclease domain possesses endonuclease activity, e.g., double-strand cleavage and/or nickase activity. In other embodiments, the meganuclease domain has reduced activity, e.g., lacks endonuclease activity, e.g., the meganuclease is catalytically inactive. In some embodiments, a catalytically inactive meganuclease is used as a DNA binding domain, e.g., as described in Fonfara et al. Nucleic Acids Res 40(2):847-860 (2012), incorporated herein by reference in its entirety.

[0396] In some embodiments, a gene modifying polypeptide comprises a modification to a DNA-binding domain, e.g., relative to the wild-type polypeptide. In some embodiments, the DNA-binding domain comprises an addition, deletion, replacement, or modification to the amino acid sequence of the original DNA-binding domain. In some embodiments, the DNA-binding domain is modified to include a heterologous functional domain that binds specifically to a target nucleic acid (e.g., DNA) sequence of interest. In some embodiments, the functional domain replaces at least a portion (e.g., the entirety of) the prior DNA-binding domain of the polypeptide. In some embodiments, the functional domain comprises a zinc finger (e.g., a zinc finger that specifically binds to the target nucleic acid (e.g., DNA) sequence of interest. In some embodiments, the functional domain comprises a Cas domain (e.g., a Cas domain that specifically binds to the target nucleic acid (e.g., DNA) sequence of interest. In some embodiments, the Cas domain comprises a Cas9 or a mutant or variant thereof (e.g., as described herein). In embodiments, the Cas domain is associated with a guide RNA (gRNA), e.g., as described herein. In embodiments, the Cas domain is directed to a target nucleic acid (e.g., DNA) sequence of interest by the gRNA. In embodiments, the Cas domain is encoded in the same nucleic acid (e.g., RNA) molecule as the gRNA. In embodiments, the Cas domain is encoded in a different nucleic acid (e.g., RNA) molecule from the gRNA.

[0397] In some embodiments, the DNA binding domain is capable of binding to a target sequence (e.g., a dsDNA target sequence) with greater affinity than a reference DNA binding domain. In some embodiments, the reference DNA binding domain is a DNA binding domain from Cas9 of S. pyogenes. In some embodiments, the DNA binding domain is capable of binding to a target sequence (e.g., a dsDNA target sequence) with an affinity between 100 pM-10 nM (e.g., between 100 pM-1 nM or 1 nM-10 nM).

[0398] In some embodiments, the affinity of a DNA binding domain for its target sequence (e.g., dsDNA target sequence) is measured in vitro, e.g., by thermophoresis, e.g., as described in Asmari et al. Methods 146:107-119 (2018) (incorporated by reference herein in its entirety).

[0399] In embodiments, the DNA binding domain is capable of binding to its target sequence (e.g., dsDNA target sequence), e.g, with an affinity between 100 pM-10 nM (e.g., between 100 pM-1 nM or 1 nM-10 nM) in the presence of a molar excess of scrambled sequence competitor dsDNA, e.g., of about 100-fold molar excess.

[0400] In some embodiments, the DNA binding domain is found associated with its target sequence (e.g., dsDNA target sequence) more frequently than any other sequence in the genome of a target cell, e.g., human target cell, e.g., as measured by ChIP-seq (e.g., in HEK293T cells), e.g., as described in He and Pu (2010) Curr. Protoc Mol Biol Chapter 21 (incorporated herein by reference in its entirety). In some embodiments, the DNA binding domain is found associated with its target sequence (e.g., dsDNA target sequence) at least about 5-fold or 10-fold, more frequently than any other sequence in the genome of a target cell, e.g., as measured by ChIP-seq (e.g., in HEK293T cells), e.g., as described in He and Pu (2010), supra.

[0401] In some embodiments, the endonuclease domain has nickase activity and cleaves one strand of a target DNA. In some embodiments, nickase activity reduces the formation of double-stranded breaks at the target site. In some embodiments, the endonuclease domain creates a staggered nick structure in the first and second strands of a target DNA. In some embodiments, a staggered nick structure generates free 3′ overhangs at the target site. In some embodiments, free 3′ overhangs at the target site improve editing efficiency, e.g., by enhancing access and annealing of a 3′ homology region of a template nucleic acid. In some embodiments, a staggered nick structure reduces the formation of double-stranded breaks at the target site.

[0402] In some embodiments, the endonuclease domain cleaves both strands of a target DNA, e.g., results in blunt-end cleavage of a target with no ssDNA overhangs on either side of the cut-site. The amino acid sequence of an endonuclease domain of a gene modifying system described herein may be at least about 50%, at least about 60%, at least about 70%, at least about 80%, at least about 85%, at least about 90%, at least about 95%, at least about 96%, at least about 97%, at least about 98%, at least about 99% identical to the amino acid sequence of an endonuclease domain described herein, e.g., an endonuclease domain from Table 8.

[0403] In certain embodiments, the heterologous endonuclease is Fok1 or a functional fragment thereof. In certain embodiments, the heterologous endonuclease is a Holliday junction resolvase or homolog thereof, such as the Holliday junction resolving enzyme from Sulfolobus solfataricus-Ssol Hje (Govindaraju et al., Nucleic Acids Research 44:7, 2016). In certain embodiments, the heterologous endonuclease is the endonuclease of the large fragment of a spliceosomal protein, such as Prp8 (Mahbub et al., Mobile DNA 8:16, 2017). In certain embodiments, the heterologous endonuclease is derived from a CRISPR-associated protein, e.g., Cas9. In certain embodiments, the heterologous endonuclease is engineered to have only ssDNA cleavage activity, e.g., only nickase activity, e.g., be a Cas9 nickase, e.g., SpCas9 with D10A, H840A, or N863A mutations. Table 8 provides exemplary Cas proteins and mutations associated with nickase activity. In still other embodiments, homologous endonuclease domains are modified, for example by site-specific mutation, to alter DNA endonuclease activity. In still other embodiments, endonuclease domains are modified to reduce DNA-sequence specificity, e.g., by truncation to remove domains that confer DNA-sequence specificity or mutation to inactivate regions conferring DNA-sequence specificity.

[0404] In some embodiments, the endonuclease domain has nickase activity and does not form double-stranded breaks. In some embodiments, the endonuclease domain forms single-stranded breaks at a higher frequency than double-stranded breaks, e.g., at least 90%, 95%, 96%, 97%, 98%, or 99% of the breaks are single-stranded breaks, or less than 10%, 5%, 4%, 3%, 2%, or 1% of the breaks are double-stranded breaks. In some embodiments, the endonuclease forms substantially no double-stranded breaks. In some embodiments, the endonuclease does not form detectable levels of double-stranded breaks.

[0405] In some embodiments, the endonuclease domain has nickase activity that nicks the target site DNA of the first strand; e.g., in some embodiments, the endonuclease domain cuts the genomic DNA of the target site near to the site of alteration on the strand that will be extended by the writing domain. In some embodiments, the endonuclease domain has nickase activity that nicks the target site DNA of the first strand and does not nick the target site DNA of the second strand. For example, when a polypeptide comprises a CRISPR-associated endonuclease domain having nickase activity, in some embodiments, said CRISPR-associated endonuclease domain nicks the target site DNA strand containing the PAM site (e.g., and does not nick the target site DNA strand that does not contain the PAM site). As a further example, when a polypeptide comprises a CRISPR-associated endonuclease domain having nickase activity, in some embodiments, said CRISPR-associated endonuclease domain nicks the target site DNA strand not containing the PAM site (e.g., and does not nick the target site DNA strand that contains the PAM site).

[0406] In some other embodiments, the endonuclease domain has nickase activity that nicks the target site DNA of the first strand and the second strand. Without wishing to be bound by theory, after a writing domain (e.g., RT domain) of a polypeptide described herein polymerizes (e.g., reverse transcribes) from the heterologous object sequence of a template nucleic acid (e.g., template RNA), the cellular DNA repair machinery must repair the nick on the first DNA strand. The target site DNA now contains two different sequences for the first DNA strand: one corresponding to the original genomic DNA (e.g., having a free 5′ end) and a second corresponding to that polymerized from the heterologous object sequence (e.g., having a free 3′ end). It is thought that the two different sequences equilibrate with one another, first one hybridizing the second strand, then the other, and which sequence the cellular DNA repair apparatus incorporates into its repaired target site may be a stochastic process. Without wishing to be bound by theory, it is thought that introducing an additional nick to the second-strand may bias the cellular DNA repair machinery to adopt the heterologous object sequence-based sequence more frequently than the original genomic sequence (Anzalone et al. Nature 576:149-157 (2019)). In some embodiments, the additional nick is positioned at least 10, 15, 20, 25, 30, 35, 40, 45, 50, 55, 60, 65, 70, 75, 80, 85, 90, 95, 100, 105, 110, 115, 120, 125, 130, 135, 140, 145, or 150 nucleotides 5′ or 3′ of the target site modification (e.g., the insertion, deletion, or substitution) or to the nick on the first strand.

[0407] Alternatively or additionally, without wishing to be bound by theory, it is thought that an additional nick to the second strand may promote second-strand synthesis. In some embodiments, where the gene modifying system has inserted or substituted a portion of the first strand, synthesis of a new sequence corresponding to the insertion/substitution in the second strand is necessary.

[0408] In some embodiments, the polypeptide comprises a single domain having endonuclease activity (e.g., a single endonuclease domain) and said domain nicks both the first strand and the second strand. For example, in such an embodiment the endonuclease domain may be a CRISPR-associated endonuclease domain, and the template nucleic acid (e.g., template RNA) comprises a gRNA spacer that directs nicking of the first strand and an additional gRNA spacer that directs nicking of the second strand. In some embodiments, the polypeptide comprises a plurality of domains having endonuclease activity, and a first endonuclease domain nicks the first strand and a second endonuclease domain nicks the second strand (optionally, the first endonuclease domain does not (e.g., cannot) nick the second strand and the second endonuclease domain does not (e.g., cannot) nick the first strand).

[0409] In some embodiments, the endonuclease domain is capable of nicking a first strand and a second strand. In some embodiments, the first and second strand nicks occur at the same position in the target site but on opposite strands. In some embodiments, the second strand nick occurs in a staggered location, e.g., upstream or downstream, from the first nick. In some embodiments, the endonuclease domain generates a target site deletion if the second strand nick is upstream of the first strand nick. In some embodiments, the endonuclease domain generates a target site duplication if the second strand nick is downstream of the first strand nick. In some embodiments, the endonuclease domain generates no duplication and/or deletion if the first and second strand nicks occur in the same position of the target site. In some embodiments, the endonuclease domain has altered activity depending on protein conformation or RNA-binding status, e.g., which promotes the nicking of the first or second strand (e.g., as described in Christensen et al. PNAS 2006; incorporated by reference herein in its entirety).

[0410] In some embodiments, the endonuclease domain comprises a meganuclease, or a functional fragment thereof. In some embodiments, the endonuclease domain comprises a homing endonuclease, or a functional fragment thereof. In some embodiments, the endonuclease domain comprises a meganuclease from the LAGLIDADG (SEQ ID NO: 22002), GIY-YIG, HNH, His-Cys Box, or PD-(D/E) XK families, or a functional fragment or variant thereof, e.g., which possess conserved amino acid motifs, e.g., as indicated in the family names. In some embodiments, the endonuclease domain comprises a meganuclease, or fragment thereof, chosen from, e.g., I-SmaMI (Uniprot F7WD42), I-Scel (Uniprot P03882), I-AniI (Uniprot P03880), I-Dmol (Uniprot P21505), I-Crel (Uniprot P05725), I-TevI (Uniprot P13299), I-Onul (Uniprot Q4VWW5), or I-Bmol (Uniprot Q9ANR6). In some embodiments, the meganuclease is naturally monomeric, e.g., I-Scel, I-TevI, or dimeric, e.g., I-Crel, in its functional form. For example, the LAGLIDADG (SEQ ID NO: 22002) meganucleases with a single copy of the LAGLIDADG (SEQ ID NO: 22002) motif generally form homodimers, whereas members with two copies of the LAGLIDADG (SEQ ID NO: 22002) motif are generally found as monomers. In some embodiments, a meganuclease that normally forms as a dimer is expressed as a fusion, e.g., the two subunits are expressed as a single ORF and, optionally, connected by a linker, e.g., an I-Crel dimer fusion (Rodriguez-Fornes et al. Gene Therapy 2020; incorporated by reference herein in its entirety). In some embodiments, a meganuclease, or a functional fragment thereof, is altered to favor nickase activity for one strand of a double-stranded DNA molecule, e.g., I-Scel (K1221 and/or K223I) (Niu et al. J Mol Biol 2008), I-AniI (K227M) (McConnell Smith et al. PNAS 2009), I-Dmol (Q42A and/or K120M) (Molina et al. J Biol Chem 2015). In some embodiments, a meganuclease or functional fragment thereof possessing this preference for single-strand cleavage is used as an endonuclease domain, e.g., with nickase activity. In some embodiments, an endonuclease domain comprises a meganuclease, or a functional fragment thereof, which naturally targets or is engineered to target a safe harbor site, e.g., an I-Crel targeting SH6 site (Rodriguez-Fornes et al., supra). In some embodiments, an endonuclease domain comprises a meganuclease, or a functional fragment thereof, with a sequence tolerant catalytic domain, e.g., I-TevI recognizing the minimal motif CNNNG (Kleinstiver et al. PNAS 2012). In some embodiments, a target sequence tolerant catalytic domain is fused to a DNA binding domain, e.g., to direct activity, e.g., by fusing I-TevI to: (i) zinc fingers to create Tev-ZFEs (Kleinstiver et al. PNAS 2012), (ii) other meganucleases to create MegaTevs (Wolfs et al. Nucleic Acids Res 2014), and/or (iii) Cas9 to create TevCas9 (Wolfs et al. PNAS 2016).

[0411] In some embodiments, the endonuclease domain comprises a restriction enzyme, e.g., a Type IIS or Type IIP restriction enzyme. In some embodiments, the endonuclease domain comprises a Type IIS restriction enzyme, e.g., FokI, or a fragment or variant thereof. In some embodiments, the endonuclease domain comprises a Type IIP restriction enzyme, e.g., PvuII, or a fragment or variant thereof. In some embodiments, a dimeric restriction enzyme is expressed as a fusion such that it functions as a single chain, e.g., a FokI dimer fusion (Minczuk et al. Nucleic Acids Res 36(12):3926-3938 (2008)).

[0412] The use of additional endonuclease domains is described, for example, in Guha and Edgell Int J Mol Sci 18(22):2565 (2017), which is incorporated herein by reference in its entirety.

[0413] In some embodiments, a gene modifying polypeptide comprises a modification to an endonuclease domain, e.g., relative to a wild-type Cas protein. In some embodiments, the endonuclease domain comprises an addition, deletion, replacement, or modification to the amino acid sequence of the wild-type Cas protein. In some embodiments, the endonuclease domain is modified to include a heterologous functional domain that binds specifically to and/or induces endonuclease cleavage of a target nucleic acid (e.g., DNA) sequence of interest. In some embodiments, the endonuclease domain comprises a zinc finger. In embodiments, the endonuclease domain comprising the Cas domain is associated with a guide RNA (gRNA), e.g., as described herein. In some embodiments, the endonuclease domain is modified to include a functional domain that does not target a specific target nucleic acid (e.g., DNA) sequence. In embodiments, the endonuclease domain comprises a Fok1 domain.

[0414] In some embodiments, the endonuclease domain is associated with the target dsDNA in vitro at a frequency at least about 5-fold or 10-fold higher than with a scrambled dsDNA. In some embodiments, the endonuclease domain is associated with the target dsDNA in vitro at a frequency at least about 5-fold or 10-fold higher than with a scrambled dsDNA, e.g., in a cell (e.g., a HEK293T cell). In some embodiments, the frequency of association between the endonuclease domain and the target DNA or scrambled DNA is measured by ChIP-seq, e.g., as described in He and Pu (2010) Curr. Protoc Mol Biol Chapter 21 (incorporated by reference herein in its entirety).

[0415] In some embodiments, the endonuclease domain can catalyze the formation of a nick at a target sequence, e.g., to an increase of at least about 5-fold or 10-fold relative to a non-target sequence (e.g., relative to any other genomic sequence in the genome of the target cell). In some embodiments, the level of nick formation is determined using NickSeq, e.g., as described in Elacqua et al. (2019) bioRxiv doi.org/10.1101/867937 (incorporated herein by reference in its entirety).

[0416] In some embodiments, the endonuclease domain is capable of nicking DNA in vitro. In embodiments, the nick results in an exposed base. In embodiments, the exposed base can be detected using a nuclease sensitivity assay, e.g., as described in Chaudhry and Weinfeld (1995) Nucleic Acids Res 23(19):3805-3809 (incorporated by reference herein in its entirety). In embodiments, the level of exposed bases (e.g., detected by the nuclease sensitivity assay) is increased by at least 10%, 50%, or more relative to a reference endonuclease domain. In some embodiments, the reference endonuclease domain is an endonuclease domain from Cas9 of S. pyogenes.

[0417] In some embodiments, the endonuclease domain is capable of nicking DNA in a cell. In embodiments, the endonuclease domain is capable of nicking DNA in a HEK293T cell. In embodiments, an unrepaired nick that undergoes replication in the absence of Rad51 results in increased NHEJ rates at the site of the nick, which can be detected, e.g., by using a Rad51 inhibition assay, e.g., as described in Bothmer et al. (2017) Nat Commun 8:13905 (incorporated by reference herein in its entirety). In embodiments, NHEJ rates are increased above 0-5%. In embodiments, NHEJ rates are increased to 20-70% (e.g., between 30%-60% or 40-50%), e.g., upon Rad51 inhibition.

[0418] In some embodiments, the endonuclease domain releases the target after cleavage. In some embodiments, release of the target is indicated indirectly by assessing for multiple turnovers by the enzyme, e.g., as described in Yourik at al. RNA 25(1):35-44 (2019) (incorporated herein by reference in its entirety) and shown in FIG. 2. In some embodiments, the kₑₓₚ of an endonuclease domain is 1×10⁻³-1×10⁻⁵ min-1 as measured by such methods.

[0419] In some embodiments, the endonuclease domain has a catalytic efficiency (k_{cat}/Kₘ) greater than about 1×10⁸ s⁻¹ M⁻¹ in vitro. In embodiments, the endonuclease domain has a catalytic efficiency greater than about 1×10⁵, 1×10⁶, 1×10⁷, or 1×10⁸, s⁻¹ M⁻¹ in vitro. In embodiments, catalytic efficiency is determined as described in Chen et al. (2018) Science 360(6387):436-439 (incorporated herein by reference in its entirety). In some embodiments, the endonuclease domain has a catalytic efficiency (k_{cat}/Kₘ) greater than about 1×10⁸ s-1 M-1 in cells. In embodiments, the endonuclease domain has a catalytic efficiency greater than about 1×10⁵, 1×10⁶, 1×10⁷, or 1×10⁸ s⁻¹ M⁻¹ in cells.

### Gene Modifying Polypeptides Comprising Cas Domains

[0420] In some embodiments, a gene modifying polypeptide described herein comprises a Cas domain. In some embodiments, the Cas domain can direct the gene modifying polypeptide to a target site specified by a gRNA spacer, thereby modifying a target nucleic acid sequence in “cis”. In some embodiments, a gene modifying polypeptide is fused to a Cas domain. In some embodiments, a gene modifying polypeptide comprises a CRISPR/Cas domain (also referred to herein as a CRISPR-associated protein). In some embodiments, a CRISPR/Cas domain comprises a protein involved in the clustered regulatory interspaced short palindromic repeat (CRISPR) system, e.g., a Cas protein, and optionally binds a guide RNA, e.g., single guide RNA (sgRNA).

[0421] CRISPR systems are adaptive defense systems originally discovered in bacteria and archaea. CRISPR systems use RNA-guided nucleases termed CRISPR-associated or “Cas” endonucleases (e.g., Cas9 or Cpf1) to cleave foreign DNA. For example, in a typical CRISPR-Cas system, an endonuclease is directed to a target nucleotide sequence (e.g., a site in the genome that is to be sequence-edited) by sequence-specific, non-coding “guide RNAs” that target single- or double-stranded DNA sequences. Three classes (I-III) of CRISPR systems have been identified. The class II CRISPR systems use a single Cas endonuclease (rather than multiple Cas proteins). One class II CRISPR system includes a type II Cas endonuclease such as Cas9, a CRISPR RNA (“crRNA”), and a trans-activating crRNA (“tracrRNA”). The crRNA contains a “spacer” sequence, a typically about 20-nucleotide RNA sequence that corresponds to a target DNA sequence (“protospacer”). In the wild-type system, and in some engineered systems, crRNA also contains a region that binds to the tracrRNA to form a partially double-stranded structure that is cleaved by RNase III, resulting in a crRNA/tracrRNA hybrid molecule. A crRNA/tracrRNA hybrid then directs the Cas endonuclease to recognize and cleave a target DNA sequence. A target DNA sequence is generally adjacent to a “protospacer adjacent motif” (“PAM”) that is specific for a given Cas endonuclease and required for cleavage activity at a target site matching the spacer of the crRNA. CRISPR endonucleases identified from various prokaryotic species have unique PAM sequence requirements, e.g., as listed for exemplary Cas enzymes in Table 7; examples of PAM sequences include 5′-NGG (Streptococcus pyogenes), 5′-NNAGAA (Streptococcus thermophilus CRISPR1), 5′-NGGNG (Streptococcus thermophilus CRISPR3), and 5′-NNNGATT (Neisseria meningiditis). Some endonucleases, e.g., Cas9 endonucleases, are associated with G-rich PAM sites, e.g., 5′-NGG, and perform blunt-end cleaving of the target DNA at a location 3 nucleotides upstream from (5′ from) the PAM site. Another class II CRISPR system includes the type V endonuclease Cpf1, which is smaller than Cas9; examples include AsCpf1 (from Acidaminococcus sp.) and LbCpf1 (from Lachnospiraceae sp.). Cpf1-associated CRISPR arrays are processed into mature crRNAs without the requirement of a tracrRNA; in other words, a Cpf1 system, in some embodiments, comprises only Cpf1 nuclease and a crRNA to cleave a target DNA sequence. Cpf1 endonucleases, are typically associated with T-rich PAM sites, e.g., 5′-TTN. Cpf1 can also recognize a 5′-CTA PAM motif. Cpf1 typically cleaves a target DNA by introducing an offset or staggered double-strand break with a 4- or 5-nucleotide 5′ overhang, for example, cleaving a target DNA with a 5-nucleotide offset or staggered cut located 18 nucleotides downstream from (3′ from) from a PAM site on the coding strand and 23 nucleotides downstream from the PAM site on the complimentary strand; the 5-nucleotide overhang that results from such offset cleavage allows more precise genome editing by DNA insertion by homologous recombination than by insertion at blunt-end cleaved DNA. See, e.g., Zetsche et al. (2015) Cell, 163:759-771.

[0422] A variety of CRISPR associated (Cas) genes or proteins can be used in the technologies provided by the present disclosure and the choice of Cas protein will depend upon the particular conditions of the method. Specific examples of Cas proteins include class II systems including Cas1, Cas2, Cas3, Cas4, Cas5, Cas6, Cas7, Cas8, Cas9, Cas10, Cpf1, C2C1, or C2C3. In some embodiments, a Cas protein, e.g., a Cas9 protein, may be from any of a variety of prokaryotic species. In some embodiments a particular Cas protein, e.g., a particular Cas9 protein, is selected to recognize a particular protospacer-adjacent motif (PAM) sequence. In some embodiments, a DNA-binding domain or endonuclease domain includes a sequence targeting polypeptide, such as a Cas protein, e.g., Cas9. In certain embodiments a Cas protein, e.g., a Cas9 protein, may be obtained from a bacteria or archaea or synthesized using known methods. In certain embodiments, a Cas protein may be from a gram-positive bacteria or a gram-negative bacteria. In certain embodiments, a Cas protein may be from a Streptococcus (e.g., a S. pyogenes, or a S. thermophilus), a Francisella (e.g., an F. novicida), a Staphylococcus (e.g., an S. aureus), an Acidaminococcus (e.g., an Acidaminococcus sp. BV3L6), a Neisseria (e.g., an N. meningitidis), a Cryptococcus, a Corynebacterium, a Haemophilus, a Eubacterium, a Pasteurella, a Prevotella, a Veillonella, or a Marinobacter.

[0423] In some embodiments, a gene modifying polypeptide may comprise the amino acid sequence of SEQ ID NO: 4000 below, or a sequence having at least 70%, 75%, 80%, 85%, 90%, 95%, 96%, 97%, 98%, 99% identity thereto. In embodiments, the amino acid sequence of SEQ ID NO: 4000 below, or the sequence having at least 70%, 75%, 80%, 85%, 90%, 95%, 96%, 97%, 98%, 99% identity thereto, is positioned at the N-terminal end of the gene modifying polypeptide. In embodiments, the amino acid sequence of SEQ ID NO: 4000 below, or the sequence having at least 70%, 75%, 80%, 85%, 90%, 95%, 96%, 97%, 98%, 99% identity thereto, is positioned within 1, 2, 3, 4, 5, 6, 7, 8, 9, 10, 15, 20, 25, or 30 amino acids of the N-terminal end of the gene modifying polypeptide.

Exemplary N-terminal NLS-Cas9 domain
(SEQ ID NO: 4000)
MPAAKRVKLDGGDKKYSIGLDIGTNSVGWAVITDEYKVPSKKFKVLGNTD
RHSIKKNLIGALLFDSGETAEATRLKRTARRRYTRRKNRICYLQEIFSNE
MAKVDDSFFHRLEESFLVEEDKKHERHPIFGNIVDEVAYHEKYPTIYHLR
KKLVDSTDKADLRLIYLALAHMIKFRGHFLIEGDLNPDNSDVDKLFIQLV
QTYNQLFEENPINASGVDAKAILSARLSKSRRLENLIAQLPGEKKNGLFG
NLIALSLGLTPNFKSNFDLAEDAKLQLSKDTYDDDLDNLLAQIGDQYADL
FLAAKNLSDAILLSDILRVNTEITKAPLSASMIKRYDEHHQDLTLLKALV
RQQLPEKYKEIFFDQSKNGYAGYIDGGASQEEFYKFIKPILEKMDGTEEL
LVKLNREDLLRKQRTFDNGSIPHQIHLGELHAILRRQEDFYPFLKDNREK
IEKILTFRIPYYVGPLARGNSRFAWMTRKSEETITPWNFEEVVDKGASAQ
SFIERMTNFDKNLPNEKVLPKHSLLYEYFTVYNELTKVKYVTEGMRKPAF
LSGEQKKAIVDLLFKTNRKVTVKQLKEDYFKKIECFDSVEISGVEDRFNA
SLGTYHDLLKIIKDKDFLDNEENEDILEDIVLTLTLFEDREMIEERLKTY
AHLFDDKVMKQLKRRRYTGWGRLSRKLINGIRDKQSGKTILDFLKSDGFA
NRNFMQLIHDDSLTFKEDIQKAQVSGQGDSLHEHIANLAGSPAIKKGILQ
TVKVVDELVKVMGRHKPENIVIEMARENQTTQKGQKNSRERMKRIEEGIK
ELGSQILKEHPVENTQLQNEKLYLYYLQNGRDMYVDQELDINRLSDYDVD
HIVPQSFLKDDSIDNKVLTRSDKARGKSDNVPSEEVVKKMKNYWRQLLNA
KLITQRKFDNLTKAERGGLSELDKAGFIKRQLVETRQITKHVAQILDSRM
NTKYDENDKLIREVKVITLKSKLVSDFRKDFQFYKVREINNYHHAHDAYL
NAVVGTALIKKYPKLESEFVYGDYKVYDVRKMIAKSEQEIGKATAKYFFY
SNIMNFFKTEITLANGEIRKRPLIETNGETGEIVWDKGRDFATVRKVLSM
PQVNIVKKTEVQTGGFSKESILPKRNSDKLIARKKDWDPKKYGGFDSPTV
AYSVLVVAKVEKGKSKKLKSVKELLGITIMERSSFEKNPIDFLEAKGYKE
VKKDLIIKLPKYSLFELENGRKRMLASAGELQKGNELALPSKYVNFLYLA
SHYEKLKGSPEDNEQKQLFVEQHKHYLDEIIEQISEFSKRVILADANLDK
VLSAYNKHRDKPIREQAENIIHLFTLTNLGAPAAFKYFDTTIDRKRYTST
KEVLDATLIHQSITGLYETRIDLSQLGGDGG

[0424] In some embodiments, a gene modifying polypeptide may comprise the amino acid sequence of SEQ ID NO: 4001 below, or a sequence having at least 70%, 75%, 80%, 85%, 90%, 95%, 96%, 97%, 98%, 99% identity thereto. In embodiments, the amino acid sequence of SEQ ID NO: 4001 below, or the sequence having at least 70%, 75%, 80%, 85%, 90%, 95%, 96%, 97%, 98%, 99% identity thereto, is positioned at the C-terminal end of the gene modifying polypeptide. In embodiments, the amino acid sequence of SEQ ID NO: 4001 below, or the sequence having at least 70%, 75%, 80%, 85%, 90%, 95%, 96%, 97%, 98%, 99% identity thereto, is positioned within 1, 2, 3, 4, 5, 6, 7, 8, 9, 10, 15, 20, 25, or 30 amino acids of the C-terminal end of the gene modifying polypeptide.

Exemplary C-terminal sequence comprising an NLS
(SEQ ID NO: 4001)
AGKRTADGSEFEKRTADGSEFESPKKKAKVE
Exemplary benchmarking sequence
(SEQ ID NO: 4002)
MPAAKRVKLDGGDKKYSIGLDIGTNSVGWAVITDEYKVPSKKFKVLGNTD
RHSIKKNLIGALLFDSGETAEATRLKRTARRRYTRRKNRICYLQEIFSNE
MAKVDDSFFHRLEESFLVEEDKKHERHPIFGNIVDEVAYHEKYPTIYHLR
KKLVDSTDKADLRLIYLALAHMIKFRGHFLIEGDLNPDNSDVDKLFIQLV
QTYNQLFEENPINASGVDAKAILSARLSKSRRLENLIAQLPGEKKNGLFG
NLIALSLGLTPNFKSNFDLAEDAKLQLSKDTYDDDLDNLLAQIGDQYADL
FLAAKNLSDAILLSDILRVNTEITKAPLSASMIKRYDEHHQDLTLLKALV
RQQLPEKYKEIFFDQSKNGYAGYIDGGASQEEFYKFIKPILEKMDGTEEL
LVKLNREDLLRKQRTFDNGSIPHQIHLGELHAILRRQEDFYPFLKDNREK
IEKILTFRIPYYVGPLARGNSRFAWMTRKSEETITPWNFEEVVDKGASAQ
SFIERMTNFDKNLPNEKVLPKHSLLYEYFTVYNELTKVKYVTEGMRKPAF
LSGEQKKAIVDLLFKTNRKVTVKQLKEDYFKKIECFDSVEISGVEDRFNA
SLGTYHDLLKIIKDKDFLDNEENEDILEDIVLTLTLFEDREMIEERLKTY
AHLFDDKVMKQLKRRRYTGWGRLSRKLINGIRDKQSGKTILDFLKSDGFA
NRNFMQLIHDDSLTFKEDIQKAQVSGQGDSLHEHIANLAGSPAIKKGILQ
TVKVVDELVKVMGRHKPENIVIEMARENQTTQKGQKNSRERMKRIEEGIK
ELGSQILKEHPVENTQLQNEKLYLYYLQNGRDMYVDQELDINRLSDYDVD
HIVPQSFLKDDSIDNKVLTRSDKARGKSDNVPSEEVVKKMKNYWRQLLNA
KLITQRKFDNLTKAERGGLSELDKAGFIKRQLVETRQITKHVAQILDSRM
NTKYDENDKLIREVKVITLKSKLVSDFRKDFQFYKVREINNYHHAHDAYL
NAVVGTALIKKYPKLESEFVYGDYKVYDVRKMIAKSEQEIGKATAKYFFY
SNIMNFFKTEITLANGEIRKRPLIETNGETGEIVWDKGRDFATVRKVLSM
PQVNIVKKTEVQTGGFSKESILPKRNSDKLIARKKDWDPKKYGGFDSPTV
AYSVLVVAKVEKGKSKKLKSVKELLGITIMERSSFEKNPIDFLEAKGYKE
VKKDLIIKLPKYSLFELENGRKRMLASAGELQKGNELALPSKYVNFLYLA
SHYEKLKGSPEDNEQKQLFVEQHKHYLDEIIEQISEFSKRVILADANLDK
VLSAYNKHRDKPIREQAENIIHLFTLTNLGAPAAFKYFDTTIDRKRYTST
KEVLDATLIHQSITGLYETRIDLSQLGGDGGSGGSSGGSSGSETPGTSES
ATPESSGGSSGGSSGGTLNIEDEYRLHETSKEPDVSLGSTWLSDFPQAWA
ETGGMGLAVRQAPLIIPLKATSTPVSIKQYPMSQEARLGIKPHIQRLLDQ
GILVPCQSPWNTPLLPVKKPGTNDYRPVQDLREVNKRVEDIHPTVPNPYN
LLSGLPPSHQWYTVLDLKDAFFCLRLHPTSQPLFAFEWRDPEMGISGQLT
WTRLPQGFKNSPTLFNEALHRDLADFRIQHPDLILLQYVDDLLLAATSEL
DCQQGTRALLQTLGNLGYRASAKKAQICQKQVKYLGYLLKEGQRWLTEAR
KETVMGQPTPKTPRQLREFLGKAGFCRLFIPGFAEMAAPLYPLTKPGTLF
NWGPDQQKAYQEIKQALLTAPALGLPDLTKPFELFVDEKQGYAKGVLTQK
LGPWRRPVAYLSKKLDPVAAGWPPCLRMVAAIAVLTKDAGKLTMGQPLVI
LAPHAVEALVKQPPDRWLSNARMTHYQALLLDTDRVQFGPVVALNPATLL
PLPEEGLQHNCLDILAEAHGTRPDLTDQPLPDADHTWYTDGSSLLQEGQR
KAGAAVTTETEVIWAKALPAGTSAQRAELIALTQALKMAEGKKLNVYTDS
RYAFATAHIHGEIYRRRGWLTSEGKEIKNKDEILALLKALFLPKRLSIIH
CPGHQKGHSAEARGNRMADQAARKAAITETPDTSTLLIENSSPSGGSKRT
ADGSEFEAGKRTADGSEFEKRTADGSEFESPKKKAKVE

[0425] In some embodiments, a gene modifying polypeptide may comprise a Cas domain as listed in Table 7 or 8, or a functional fragment thereof, or a sequence having at least 70%, 75%, 80%, 85%, 90%, 95%, 96%, 97%, 98%, 99% identity thereto.

TABLE 7
CRISPR/Cas Proteins, Species, and Mutations

| | | | # of | | Mutations to alter PAM | Mutations to make |
|---|---|---|---|---|---|---|
| Name | Enzyme | Species | AAs | PAM | recognition | catalytically dead |
| FnCas9 | Cas9 | Francisella | 1629 | 5′-NGG-3′ | Wt | D11A/H969A/N995A |
| | | novicida | | | | |
| FnCas9 | Cas9 | Francisella | 1629 | 5′-YG-3′ | E1369R/E1449H/R1556A | D11A/H969A/N995A |
| RHA | | novicida | | | | |
| SaCas9 | Cas9 | Staphylococcus | 1053 | 5′-NNGRRT-3′ | Wt | D10A/H557A |
| | | aureus | | | | |
| SaCas9 | Cas9 | Staphylococcus | 1053 | 5′-NNNRRT-3′ | E782K/N968K/R1015H | D10A/H557A |
| KKH | | aureus | | | | |
| SpCas9 | Cas9 | Streptococcus | 1368 | 5′-NGG-3′ | Wt | D10A/D839A/H840A/N863A |
| | | pyogenes | | | | |
| SpCas9 | Cas9 | Streptococcus | 1368 | 5′-NGA-3′ | D1135V/R1335Q/T1337R | D10A/D839A/H840A/N863A |
| VQR | | pyogenes | | | | |
| AsCpf1 | Cpf1 | Acidaminococcus | 1307 | 5′-TYCV-3′ | S542R/K607R | E993A |
| RR | | sp. BV3L6 | | | | |
| AsCpf1 | Cpf1 | Acidaminococcus | 1307 | 5′-TATV-3′ | S542R/K548V/N552R | E993A |
| RVR | | sp. BV3L6 | | | | |
| FnCpf1 | Cpf1 | Francisella | 1300 | 5′-NTTN-3′ | Wt | D917A/E1006A/D1255A |
| | | novicida | | | | |
| NmCas9 | Cas9 | Neisseria | 1082 | 5′-NNNGATT-3′ | Wt | D16A/D587A/H588A/N611A |
| | | meningitidis | | | | |

TABLE 8
Amino Acid Sequences of CRISPR/Cas Proteins, Species, and Mutations

| | | | SEQ | Nick- | Nick- | Nick- |
|---|---|---|---|---|---|---|
| | Parental | | ID | ase | ase | ase |
| Variant | Host(s) | Protein Sequence | NO: | (HNH) | (HNH) | (RuvC) |
| Nme2Cas9 | Neisseria | MAAFKPNPINYILGLDIGIASVGWAMVEIDEEENPIRLIDLGVRVFERAEVPK | 9,001 | N611A | H588A | D16A |
| | meningitidis | TGDSLAMARRLARSVRRLTRRRAHRLLRARRLLKREGVLQAADFDENGLIKS | | | | |
| | | LPNTPWQLRAAALDRKLTPLEWSAVLLHLIKHRGYLSQRKNEGETADKELG | | | | |
| | | ALLKGVANNAHALQTGDFRTPAELALNKFEKESGHIRNQRGDYSHTFSRKD | | | | |
| | | LQAELILLFEKQKEFGNPHVSGGLKEGIETLLMTQRPALSGDAVQKMLGHCT | | | | |
| | | FEPAEPKAAKNTYTAERFIWLTKLNNLRILEQGSERPLTDTERATLMDEPYRK | | | | |
| | | SKLTYAQARKLLGLEDTAFFKGLRYGKDNAEASTLMEMKAYHAISRALEKEG | | | | |
| | | LKDKKSPLNLSSELQDEIGTAFSLFKTDEDITGRLKDRVQPEILEALLKHISFDKF | | | | |
| | | VQISLKALRRIVPLMEQGKRYDEACAEIYGDHYGKKNTEEKIYLPPIPADEIRN | | | | |
| | | PVVLRALSQARKVINGVVRRYGSPARIHIETAREVGKSFKDRKEIEKRQEENR | | | | |
| | | KDREKAAAKFREYFPNFVGEPKSKDILKLRLYEQQHGKCLYSGKEINLVRLNE | | | | |
| | | KGYVEIDHALPFSRTWDDSFNNKVLVLGSENQNKGNQTPYEYFNGKDNSR | | | | |
| | | EWQEFKARVETSRFPRSKKQRILLQKFDEDGFKECNLNDTRYVNRFLCQFVA | | | | |
| | | DHILLTGKGKRRVFASNGQITNLLRGFWGLRKVRAENDRHHALDAVVVACS | | | | |
| | | TVAMQQKITRFVRYKEMNAFDGKTIDKETGKVLHQKTHFPQPWEFFAQEV | | | | |
| | | MIRVFGKPDGKPEFEEADTPEKLRTLLAEKLSSRPEAVHEYVTPLFVSRAPNR | | | | |
| | | KMSGAHKDTLRSAKRFVKHNEKISVKRVWLTEIKLADLENMVNYKNGREIEL | | | | |
| | | YEALKARLEAYGGNAKQAFDPKDNPFYKKGGQLVKAVRVEKTQESGVLLNK | | | | |
| | | KNAYTIADNGDMVRVDVFCKVDKKGKNQYFIVPIYAWQVAENILPDIDCKG | | | | |
| | | YRIDDSYTFCFSLHKYDLIAFQKDEKSKVEFAYYINCDSSNGRFYLAWHDKGS | | | | |
| | | KEQQFRISTQNLVLIQKYQVNELGKEIRPCRLKKRPPVR | | | | |
| PpnCas9 | Pasteurella | MQNNPLNYILGLDLGIASIGWAVVEIDEESSPIRLIDVGVRTFERAEVAKTGE | 9,002 | N605A | H582A | D13A |
| | pneumotropica | SLALSRRLARSSRRLIKRRAERLKKAKRLLKAEKILHSIDEKLPINVWQLRVKGL | | | | |
| | | KEKLERQEWAAVLLHLSKHRGYLSQRKNEGKSDNKELGALLSGIASNHQML | | | | |
| | | QSSEYRTPAEIAVKKFQVEEGHIRNQRGSYTHTFSRLDLLAEMELLFQRQAEL | | | | |
| | | GNSYTSTTLLENLTALLMWQKPALAGDAILKMLGKCTFEPSEYKAAKNSYSA | | | | |
| | | ERFVWLTKLNNLRILENGTERALNDNERFALLEQPYEKSKLTYAQVRAMLAL | | | | |
| | | SDNAIFKGVRYLGEDKKTVESKTTLIEMKFYHQIRKTLGSAELKKEWNELKGN | | | | |
| | | SDLLDEIGTAFSLYKTDDDICRYLEGKLPERVLNALLENLNFDKFIQLSLKALHQ | | | | |
| | | ILPLMLQGQRYDEAVSAIYGDHYGKKSTETTRLLPTIPADEIRNPVVLRTLTQA | | | | |
| | | RKVINAVVRLYGSPARIHIETAREVGKSYQDRKKLEKQQEDNRKQRESAVKK | | | | |
| | | FKEMFPHFVGEPKGKDILKMRLYELQQAKCLYSGKSLELHRLLEKGYVEVDH | | | | |
| | | ALPFSRTWDDSFNNKVLVLANENQNKGNLTPYEWLDGKNNSERWQHFVV | | | | |
| | | RVQTSGFSYAKKQRILNHKLDEKGFIERNLNDTRYVARFLCNFIADNMLLVG | | | | |
| | | KGKRNVFASNGQITALLRHRWGLQKVREQNDRHHALDAVVVACSTVAMQ | | | | |
| | | QKITRFVRYNEGNVFSGERIDRETGEIIPLHFPSPWAFFKENVEIRIFSENPKLE | | | | |
| | | LENRLPDYPQYNHEWVQPLFVSRMPTRKMTGQGHMETVKSAKRLNEGLS | | | | |
| | | VLKVPLTQLKLSDLERMVNRDREIALYESLKARLEQFGNDPAKAFAEPFYKKG | | | | |
| | | GALVKAVRLEQTQKSGVLVRDGNGVADNASMVRVDVFTKGGKYFLVPIYT | | | | |
| | | WQVAKGILPNRAATQGKDENDWDIMDEMATFQFSLCQNDLIKLVTKKKTI | | | | |
| | | FGYFNGLNRATSNINIKEHDLDKSKGKLGIYLEVGVKLAISLEKYQVDELGKNI | | | | |
| | | RPCRPTKRQHVR | | | | |
| SauCas9 | Staphylococcus | MKRNYILGLDIGITSVGYGIIDYETRDVIDAGVRLFKEANVENNEGRRSKRGA | 9,003 | N580A | H557A | D10A |
| | aureus | RRLKRRRRHRIQRVKKLLFDYNLLTDHSELSGINPYEARVKGLSQKLSEEEFSA | | | | |
| | | ALLHLAKRRGVHNVNEVEEDTGNELSTKEQISRNSKALEEKYVAELQLERLKK | | | | |
| | | DGEVRGSINRFKTSDYVKEAKQLLKVQKAYHQLDQSFIDTYIDLLETRRTYYE | | | | |
| | | GPGEGSPFGWKDIKEWYEMLMGHCTYFPEELRSVKYAYNADLYNALNDLN | | | | |
| | | NLVITRDENEKLEYYEKFQIIENVFKQKKKPTLKQIAKEILVNEEDIKGYRVTST | | | | |
| | | GKPEFTNLKVYHDIKDITARKEIIENAELLDQIAKILTIYQSSEDIQEELTNLNSE | | | | |
| | | LTQEEIEQISNLKGYTGTHNLSLKAINLILDELWHTNDNQIAIFNRLKLVPKKV | | | | |
| | | DLSQQKEIPTTLVDDFILSPVVKRSFIQSIKVINAIIKKYGLPNDIIIELAREKNSK | | | | |
| | | DAQKMINEMQKRNRQTNERIEEIIRTTGKENAKYLIEKIKLHDMQEGKCLYS | | | | |
| | | LEAIPLEDLLNNPFNYEVDHIIPRSVSFDNSFNNKVLVKQEENSKKGNRTPFQ | | | | |
| | | YLSSSDSKISYETFKKHILNLAKGKGRISKTKKEYLLEERDINRFSVQKDFINRNL | | | | |
| | | VDTRYATRGLMNLLRSYFRVNNLDVKVKSINGGFTSFLRRKWKFKKERNKG | | | | |
| | | YKHHAEDALIIANADFIFKEWKKLDKAKKVMENQMFEEKQAESMPEIETEQ | | | | |
| | | EYKEIFITPHQIKHIKDFKDYKYSHRVDKKPNRELINDTLYSTRKDDKGNTLIVN | | | | |
| | | NLNGLYDKDNDKLKKLINKSPEKLLMYHHDPQTYQKLKLIMEQYGDEKNPL | | | | |
| | | YKYYEETGNYLTKYSKKDNGPVIKKIKYYGNKLNAHLDITDDYPNSRNKVVKL | | | | |
| | | SLKPYRFDVYLDNGVYKFVTVKNLDVIKKENYYEVNSKCYEEAKKLKKISNQA | | | | |
| | | EFIASFYNNDLIKINGELYRVIGVNNDLLNRIEVNMIDITYREYLENMNDKRPP | | | | |
| | | RIIKTIASKTQSIKKYSTDILGNLYEVKSKKHPQIIKKG | | | | |
| SauCas9- | Staphylococcus | MKRNYILGLDIGITSVGYGIIDYETRDVIDAGVRLFKEANVENNEGRRSKRGA | 9,004 | N580A | H557A | D10A |
| KKH | aureus | RRLKRRRRHRIQRVKKLLFDYNLLTDHSELSGINPYEARVKGLSQKLSEEEFSA | | | | |
| | | ALLHLAKRRGVHNVNEVEEDTGNELSTKEQISRNSKALEEKYVAELQLERLKK | | | | |
| | | DGEVRGSINRFKTSDYVKEAKQLLKVQKAYHQLDQSFIDTYIDLLETRRTYYE | | | | |
| | | GPGEGSPFGWKDIKEWYEMLMGHCTYFPEELRSVKYAYNADLYNALNDLN | | | | |
| | | NLVITRDENEKLEYYEKFQIIENVFKQKKKPTLKQIAKEILVNEEDIKGYRVTST | | | | |
| | | GKPEFTNLKVYHDIKDITARKEIIENAELLDQIAKILTIYQSSEDIQEELTNLNSE | | | | |
| | | LTQEEIEQISNLKGYTGTHNLSLKAINLILDELWHTNDNQIAIFNRLKLVPKKV | | | | |
| | | DLSQQKEIPTTLVDDFILSPVVKRSFIQSIKVINAIIKKYGLPNDIIIELAREKNSK | | | | |
| | | DAQKMINEMQKRNRQTNERIEEIIRTTGKENAKYLIEKIKLHDMQEGKCLYS | | | | |
| | | LEAIPLEDLLNNPFNYEVDHIIPRSVSFDNSFNNKVLVKQEENSKKGNRTPFQ | | | | |
| | | YLSSSDSKISYETFKKHILNLAKGKGRISKTKKEYLLEERDINRFSVQKDFINRNL | | | | |
| | | VDTRYATRGLMNLLRSYFRVNNLDVKVKSINGGFTSFLRRKWKFKKERNKG | | | | |
| | | YKHHAEDALIIANADFIFKEWKKLDKAKKVMENQMFEEKQAESMPEIETEQ | | | | |
| | | EYKEIFITPHQIKHIKDFKDYKYSHRVDKKPNRKLINDTLYSTRKDDKGNTLIV | | | | |
| | | NNLNGLYDKDNDKLKKLINKSPEKLLMYHHDPQTYQKLKLIMEQYGDEKNP | | | | |
| | | LYKYYEETGNYLTKYSKKDNGPVIKKIKYYGNKLNAHLDITDDYPNSRNKVVK | | | | |
| | | LSLKPYRFDVYLDNGVYKFVTVKNLDVIKKENYYEVNSKCYEEAKKLKKISNQ | | | | |
| | | AEFIASFYKNDLIKINGELYRVIGVNNDLLNRIEVNMIDITYREYLENMNDKRP | | | | |
| | | PHIIKTIASKTQSIKKYSTDILGNLYEVKSKKHPQIIKKG | | | | |
| SauriCas9 | Staphylococcus | MQENQQKQNYILGLDIGITSVGYGLIDSKTREVIDAGVRLFPEADSENNSNR | 9,005 | N588A | H565A | D15A |
| | auricularis | RSKRGARRLKRRRIHRLNRVKDLLADYQMIDLNNVPKSTDPYTIRVKGLREPL | | | | |
| | | TKEEFAIALLHIAKRRGLHNISVSMGDEEQDNELSTKQQLQKNAQQLQDKY | | | | |
| | | VCELQLERLTNINKVRGEKNRFKTEDFVKEVKQLCETQRQYHNIDDQFIQQY | | | | |
| | | IDLVSTRREYFEGPGNGSPYGWDGDLLKWYEKLMGRCTYFPEELRSVKYAYS | | | | |
| | | ADLFNALNDLNNLVVTRDDNPKLEYYEKYHIIENVFKQKKNPTLKQIAKEIGV | | | | |
| | | QDYDIRGYRITKSGKPQFTSFKLYHDLKNIFEQAKYLEDVEMLDEIAKILTIYQ | | | | |
| | | DEISIKKALDQLPELLTESEKSQIAQLTGYTGTHRLSLKCIHIVIDELWESPENQ | | | | |
| | | MEIFTRLNLKPKKVEMSEIDSIPTTLVDEFILSPVVKRAFIQSIKVINAVINRFGL | | | | |
| | | PEDIIIELAREKNSKDRRKFINKLQKQNEATRKKIEQLLAKYGNTNAKYMIEKI | | | | |
| | | KLHDMQEGKCLYSLEAIPLEDLLSNPTHYEVDHIIPRSVSFDNSLNNKVLVKQ | | | | |
| | | SENSKKGNRTPYQYLSSNESKISYNQFKQHILNLSKAKDRISKKKRDMLLEER | | | | |
| | | DINKFEVQKEFINRNLVDTRYATRELSNLLKTYFSTHDYAVKVKTINGGFTNH | | | | |
| | | LRKVWDFKKHRNHGYKHHAEDALVIANADFLFKTHKALRRTDKILEQPGLE | | | | |
| | | VNDTTVKVDTEEKYQELFETPKQVKNIKQFRDFKYSHRVDKKPNRQLINDTL | | | | |
| | | YSTREIDGETYVVQTLKDLYAKDNEKVKKLFTERPQKILMYQHDPKTFEKLM | | | | |
| | | TILNQYAEAKNPLAAYYEDKGEYVTKYAKKGNGPAIHKIKYIDKKLGSYLDVS | | | | |
| | | NKYPETQNKLVKLSLKSFRFDIYKCEQGYKMVSIGYLDVLKKDNYYYIPKDKYE | | | | |
| | | AEKQKKKIKESDLFVGSFYYNDLIMYEDELFRVIGVNSDINNLVELNMVDITY | | | | |
| | | KDFCEVNNVTGEKRIKKTIGKRVVLIEKYTTDILGNLYKTPLPKKPQLIFKRGEL | | | | |
| Sauri- | Staphylococcus | MQENQQKQNYILGLDIGITSVGYGLIDSKTREVIDAGVRLFPEADSENNSNR | 9,006 | N588A | H565A | D15A |
| Cas9-KKH | auricularis | RSKRGARRLKRRRIHRLNRVKDLLADYQMIDLNNVPKSTDPYTIRVKGLREPL | | | | |
| | | TKEEFAIALLHIAKRRGLHNISVSMGDEEQDNELSTKQQLQKNAQQLQDKY | | | | |
| | | VCELQLERLTNINKVRGEKNRFKTEDFVKEVKQLCETQRQYHNIDDQFIQQY | | | | |
| | | IDLVSTRREYFEGPGNGSPYGWDGDLLKWYEKLMGRCTYFPEELRSVKYAYS | | | | |
| | | ADLFNALNDLNNLVVTRDDNPKLEYYEKYHIIENVFKQKKNPTLKQIAKEIGV | | | | |
| | | QDYDIRGYRITKSGKPQFTSFKLYHDLKNIFEQAKYLEDVEMLDEIAKILTIYQ | | | | |
| | | DEISIKKALDQLPELLTESEKSQIAQLTGYTGTHRLSLKCIHIVIDELWESPENQ | | | | |
| | | MEIFTRLNLKPKKVEMSEIDSIPTTLVDEFILSPVVKRAFIQSIKVINAVINRFGL | | | | |
| | | PEDIIIELAREKNSKDRRKFINKLQKQNEATRKKIEQLLAKYGNTNAKYMIEKI | | | | |
| | | KLHDMQEGKCLYSLEAIPLEDLLSNPTHYEVDHIIPRSVSFDNSLNNKVLVKQ | | | | |
| | | SENSKKGNRTPYQYLSSNESKISYNQFKQHILNLSKAKDRISKKKRDMLLEER | | | | |
| | | DINKFEVQKEFINRNLVDTRYATRELSNLLKTYFSTHDYAVKVKTINGGFTNH | | | | |
| | | LRKVWDFKKHRNHGYKHHAEDALVIANADFLFKTHKALRRTDKILEQPGLE | | | | |
| | | VNDTTVKVDTEEKYQELFETPKQVKNIKQFRDFKYSHRVDKKPNRKLINDTL | | | | |
| | | YSTREIDGETYVVQTLKDLYAKDNEKVKKLFTERPQKILMYQHDPKTFEKLM | | | | |
| | | TILNQYAEAKNPLAAYYEDKGEYVTKYAKKGNGPAIHKIKYIDKKLGSYLDVS | | | | |
| | | NKYPETQNKLVKLSLKSFRFDIYKCEQGYKMVSIGYLDVLKKDNYYYIPKDKYE | | | | |
| | | AEKQKKKIKESDLFVGSFYKNDLIMYEDELFRVIGVNSDINNLVELNMVDITY | | | | |
| | | KDFCEVNNVTGEKHIKKTIGKRVVLIEKYTTDILGNLYKTPLPKKPQLIFKRGEL | | | | |
| ScaCas9- | Streptococcus | MEKKYSIGLDIGTNSVGWAVITDDYKVPSKKFKVLGNTNRKSIKKNLMGALL | 9,007 | N872A | H849A | D10A |
| Sc++ | canis | FDSGETAEATRLKRTARRRYTRRKNRIRYLQEIFANEMAKLDDSFFQRLEESF | | | | |
| | | LVEEDKKNERHPIFGNLADEVAYHRNYPTIYHLRKKLADSPEKADLRLIYLALA | | | | |
| | | HIIKFRGHFLIEGKLNAENSDVAKLFYQLIQTYNQLFEESPLDEIEVDAKGILSA | | | | |
| | | RLSKSKRLEKLIAVFPNEKKNGLFGNIIALALGLTPNFKSNFDLTEDAKLQLSKD | | | | |
| | | TYDDDLDELLGQIGDQYADLFSAAKNLSDAILLSDILRSNSEVTKAPLSASMV | | | | |
| | | KRYDEHHQDLALLKTLVRQQFPEKYAEIFKDDTKNGYAGYVGADKKLRKRS | | | | |
| | | GKLATEEEFYKFIKPILEKMDGAEELLAKLNRDDLLRKQRTFDNGSIPHQIHLK | | | | |
| | | ELHAILRRQEEFYPFLKENREKIEKILTFRIPYYVGPLARGNSRFAWLTRKSEEA | | | | |
| | | ITPWNFEEVVDKGASAQSFIERMTNFDEQLPNKKVLPKHSLLYEYFTVYNEL | | | | |
| | | TKVKYVTERMRKPEFLSGEQKKAIVDLLFKTNRKVTVKQLKEDYFKKIECFDS | | | | |
| | | VEIIGVEDRFNASLGTYHDLLKIIKDKDFLDNEENEDILEDIVLTLTLFEDREMIE | | | | |
| | | ERLKTYAHLFDDKVMKQLKRRHYTGWGRLSRKMINGIRDKQSGKTILDFLKS | | | | |
| | | DGFSNRNFMQLIHDDSLTFKEEIEKAQVSGQGDSLHEQIADLAGSPAIKKGIL | | | | |
| | | QTVKIVDELVKVMGHKPENIVIEMARENQTTTKGLQQSRERKKRIEEGIKELE | | | | |
| | | SQILKENPVENTQLQNEKLYLYYLQNGRDMYVDQELDINRLSDYDVDHIVP | | | | |
| | | QSFIKDDSIDNKVLTRSVENRGKSDNVPSEEVVKKMKNYWRQLLNAKLITQ | | | | |
| | | RKFDNLTKAERGGLSEADKAGFIKRQLVETRQITKHVARILDSRMNTKRDKN | | | | |
| | | DKPIREVKVITLKSKLVSDFRKDFQLYKVRDINNYHHAHDAYLNAVVGTALIK | | | | |
| | | KYPKLESEFVYGDYKVYDVRKMIAKSEQEIGKATAKRFFYSNIMNFFKTEVKL | | | | |
| | | ANGEIRKRPLIETNGETGEVVWNKEKDFATVRKVLAMPQVNIVKKTEVQTG | | | | |
| | | GFSKESILSKRESAKLIPRKKGWDTRKYGGFGSPTVAYSILVVAKVEKGKAKKL | | | | |
| | | KSVKVLVGITIMEKGSYEKDPIGFLEAKGYKDIKKELIFKLPKYSLFELENGRRR | | | | |
| | | MLASAKELQKANELVLPQHLVRLLYYTQNISATTGSNNLGYIEQHREEFKEIF | | | | |
| | | EKIIDFSEKYILKNKVNSNLKSSFDEQFAVSDSILLSNSFVSLLKYTSFGASGGFT | | | | |
| | | FLDLDVKQGRLRYQTVTEVLDATLIYQSITGLYETRTDLSQLGGD | | | | |
| SpyCas9 | Streptococcus | MDKKYSIGLDIGTNSVGWAVITDEYKVPSKKFKVLGNTDRHSIKKNLIGALLF | 9,008 | N863A | H840A | D10A |
| | pyogenes | DSGETAEATRLKRTARRRYTRRKNRICYLQEIFSNEMAKVDDSFFHRLEESFL | | | | |
| | | VEEDKKHERHPIFGNIVDEVAYHEKYPTIYHLRKKLVDSTDKADLRLIYLALAH | | | | |
| | | MIKFRGHFLIEGDLNPDNSDVDKLFIQLVQTYNQLFEENPINASGVDAKAILS | | | | |
| | | ARLSKSRRLENLIAQLPGEKKNGLFGNLIALSLGLTPNFKSNFDLAEDAKLQLS | | | | |
| | | KDTYDDDLDNLLAQIGDQYADLFLAAKNLSDAILLSDILRVNTEITKAPLSAS | | | | |
| | | MIKRYDEHHQDLTLLKALVRQQLPEKYKEIFFDQSKNGYAGYIDGGASQEEF | | | | |
| | | YKFIKPILEKMDGTEELLVKLNREDLLRKQRTFDNGSIPHQIHLGELHAILRRQ | | | | |
| | | EDFYPFLKDNREKIEKILTFRIPYYVGPLARGNSRFAWMTRKSEETITPWNFE | | | | |
| | | EVVDKGASAQSFIERMTNFDKNLPNEKVLPKHSLLYEYFTVYNELTKVKYVTE | | | | |
| | | GMRKPAFLSGEQKKAIVDLLFKTNRKVTVKQLKEDYFKKIECFDSVEISGVED | | | | |
| | | RFNASLGTYHDLLKIIKDKDFLDNEENEDILEDIVLTLTLFEDREMIEERLKTYA | | | | |
| | | HLFDDKVMKQLKRRRYTGWGRLSRKLINGIRDKQSGKTILDFLKSDGFANR | | | | |
| | | NFMQLIHDDSLTFKEDIQKAQVSGQGDSLHEHIANLAGSPAIKKGILQTVKV | | | | |
| | | VDELVKVMGRHKPENIVIEMARENQTTQKGQKNSRERMKRIEEGIKELGSQ | | | | |
| | | ILKEHPVENTQLQNEKLYLYYLQNGRDMYVDQELDINRLSDYDVDHIVPQSF | | | | |
| | | LKDDSIDNKVLTRSDKNRGKSDNVPSEEVVKKMKNYWRQLLNAKLITQRKF | | | | |
| | | DNLTKAERGGLSELDKAGFIKRQLVETRQITKHVAQILDSRMNTKYDENDKLI | | | | |
| | | REVKVITLKSKLVSDFRKDFQFYKVREINNYHHAHDAYLNAVVGTALIKKYPK | | | | |
| | | LESEFVYGDYKVYDVRKMIAKSEQEIGKATAKYFFYSNIMNFFKTEITLANGEI | | | | |
| | | RKRPLIETNGETGEIVWDKGRDFATVRKVLSMPQVNIVKKTEVQTGGFSKES | | | | |
| | | ILPKRNSDKLIARKKDWDPKKYGGFDSPTVAYSVLVVAKVEKGKSKKLKSVKE | | | | |
| | | LLGITIMERSSFEKNPIDFLEAKGYKEVKKDLIIKLPKYSLFELENGRKRMLASA | | | | |
| | | GELQKGNELALPSKYVNFLYLASHYEKLKGSPEDNEQKQLFVEQHKHYLDEII | | | | |
| | | EQISEFSKRVILADANLDKVLSAYNKHRDKPIREQAENIIHLFTLTNLGAPAAF | | | | |
| | | KYFDTTIDRKRYTSTKEVLDATLIHQSITGLYETRIDLSQLGGD | | | | |
| SpyCas9- | Streptococcus | MDKKYSIGLDIGTNSVGWAVITDEYKVPSKKFKVLGNTDRHSIKKNLIGALLF | 9,009 | N863A | H840A | D10A |
| NG | pyogenes | DSGETAEATRLKRTARRRYTRRKNRICYLQEIFSNEMAKVDDSFFHRLEESFL | | | | |
| | | VEEDKKHERHPIFGNIVDEVAYHEKYPTIYHLRKKLVDSTDKADLRLIYLALAH | | | | |
| | | MIKFRGHFLIEGDLNPDNSDVDKLFIQLVQTYNQLFEENPINASGVDAKAILS | | | | |
| | | ARLSKSRRLENLIAQLPGEKKNGLFGNLIALSLGLTPNFKSNFDLAEDAKLQLS | | | | |
| | | KDTYDDDLDNLLAQIGDQYADLFLAAKNLSDAILLSDILRVNTEITKAPLSAS | | | | |
| | | MIKRYDEHHQDLTLLKALVRQQLPEKYKEIFFDQSKNGYAGYIDGGASQEEF | | | | |
| | | YKFIKPILEKMDGTEELLVKLNREDLLRKQRTFDNGSIPHQIHLGELHAILRRQ | | | | |
| | | EDFYPFLKDNREKIEKILTFRIPYYVGPLARGNSRFAWMTRKSEETITPWNFE | | | | |
| | | EVVDKGASAQSFIERMTNFDKNLPNEKVLPKHSLLYEYFTVYNELTKVKYVTE | | | | |
| | | GMRKPAFLSGEQKKAIVDLLFKTNRKVTVKQLKEDYFKKIECFDSVEISGVED | | | | |
| | | RFNASLGTYHDLLKIIKDKDFLDNEENEDILEDIVLTLTLFEDREMIEERLKTYA | | | | |
| | | HLFDDKVMKQLKRRRYTGWGRLSRKLINGIRDKQSGKTILDFLKSDGFANR | | | | |
| | | NFMQLIHDDSLTFKEDIQKAQVSGQGDSLHEHIANLAGSPAIKKGILQTVKV | | | | |
| | | VDELVKVMGRHKPENIVIEMARENQTTQKGQKNSRERMKRIEEGIKELGSQ | | | | |
| | | ILKEHPVENTQLQNEKLYLYYLQNGRDMYVDQELDINRLSDYDVDHIVPQSF | | | | |
| | | LKDDSIDNKVLTRSDKNRGKSDNVPSEEVVKKMKNYWRQLLNAKLITQRKF | | | | |
| | | DNLTKAERGGLSELDKAGFIKRQLVETRQITKHVAQILDSRMNTKYDENDKLI | | | | |
| | | REVKVITLKSKLVSDFRKDFQFYKVREINNYHHAHDAYLNAVVGTALIKKYPK | | | | |
| | | LESEFVYGDYKVYDVRKMIAKSEQEIGKATAKYFFYSNIMNFFKTEITLANGEI | | | | |
| | | RKRPLIETNGETGEIVWDKGRDFATVRKVLSMPQVNIVKKTEVQTGGFSKES | | | | |
| | | IRPKRNSDKLIARKKDWDPKKYGGFVSPTVAYSVLVVAKVEKGKSKKLKSVKE | | | | |
| | | LLGITIMERSSFEKNPIDFLEAKGYKEVKKDLIIKLPKYSLFELENGRKRMLASA | | | | |
| | | RFLQKGNELALPSKYVNFLYLASHYEKLKGSPEDNEQKQLFVEQHKHYLDEII | | | | |
| | | EQISEFSKRVILADANLDKVLSAYNKHRDKPIREQAENIIHLFTLTNLGAPRAF | | | | |
| | | KYFDTTIDRKVYRSTKEVLDATLIHQSITGLYETRIDLSQLGGD | | | | |
| SpyCas9- | Streptococcus | MDKKYSIGLDIGTNSVGWAVITDEYKVPSKKFKVLGNTDRHSIKKNLIGALLF | 9,010 | N863A | H840A | D10A |
| SpRY | pyogenes | DSGETAERTRLKRTARRRYTRRKNRICYLQEIFSNEMAKVDDSFFHRLEESFL | | | | |
| | | VEEDKKHERHPIFGNIVDEVAYHEKYPTIYHLRKKLVDSTDKADLRLIYLALAH | | | | |
| | | MIKFRGHFLIEGDLNPDNSDVDKLFIQLVQTYNQLFEENPINASGVDAKAILS | | | | |
| | | ARLSKSRRLENLIAQLPGEKKNGLFGNLIALSLGLTPNFKSNFDLAEDAKLQLS | | | | |
| | | KDTYDDDLDNLLAQIGDQYADLFLAAKNLSDAILLSDILRVNTEITKAPLSAS | | | | |
| | | MIKRYDEHHQDLTLLKALVRQQLPEKYKEIFFDQSKNGYAGYIDGGASQEEF | | | | |
| | | YKFIKPILEKMDGTEELLVKLNREDLLRKQRTFDNGSIPHQIHLGELHAILRRQ | | | | |
| | | EDFYPFLKDNREKIEKILTFRIPYYVGPLARGNSRFAWMTRKSEETITPWNFE | | | | |
| | | EVVDKGASAQSFIERMTNFDKNLPNEKVLPKHSLLYEYFTVYNELTKVKYVTE | | | | |
| | | GMRKPAFLSGEQKKAIVDLLFKTNRKVTVKQLKEDYFKKIECFDSVEISGVED | | | | |
| | | RFNASLGTYHDLLKIIKDKDFLDNEENEDILEDIVLTLTLFEDREMIEERLKTYA | | | | |
| | | HLFDDKVMKQLKRRRYTGWGRLSRKLINGIRDKQSGKTILDFLKSDGFANR | | | | |
| | | NFMQLIHDDSLTFKEDIQKAQVSGQGDSLHEHIANLAGSPAIKKGILQTVKV | | | | |
| | | VDELVKVMGRHKPENIVIEMARENQTTQKGQKNSRERMKRIEEGIKELGSQ | | | | |
| | | ILKEHPVENTQLQNEKLYLYYLQNGRDMYVDQELDINRLSDYDVDHIVPQSF | | | | |
| | | LKDDSIDNKVLTRSDKNRGKSDNVPSEEVVKKMKNYWRQLLNAKLITQRKF | | | | |
| | | DNLTKAERGGLSELDKAGFIKRQLVETRQITKHVAQILDSRMNTKYDENDKLI | | | | |
| | | REVKVITLKSKLVSDFRKDFQFYKVREINNYHHAHDAYLNAVVGTALIKKYPK | | | | |
| | | LESEFVYGDYKVYDVRKMIAKSEQEIGKATAKYFFYSNIMNFFKTEITLANGEI | | | | |
| | | RKRPLIETNGETGEIVWDKGRDFATVRKVLSMPQVNIVKKTEVQTGGFSKES | | | | |
| | | IRPKRNSDKLIARKKDWDPKKYGGFLWPTVAYSVLVVAKVEKGKSKKLKSVK | | | | |
| | | ELLGITIMERSSFEKNPIDFLEAKGYKEVKKDLIIKLPKYSLFELENGRKRMLAS | | | | |
| | | AKQLQKGNELALPSKYVNFLYLASHYEKLKGSPEDNEQKQLFVEQHKHYLDE | | | | |
| | | IIEQISEFSKRVILADANLDKVLSAYNKHRDKPIREQAENIIHLFTLTRLGAPRAF | | | | |
| | | KYFDTTIDPKQYRSTKEVLDATLIHQSITGLYETRIDLSQLGGD | | | | |
| St1Cas9 | Streptococcus | MSDLVLGLDIGIGSVGVGILNKVTGEIIHKNSRIFPAAQAENNLVRRTNRQG | 9,011 | N622A | H599A | D9A |
| | thermophilus | RRLARRKKHRRVRLNRLFEESGLITDFTKISINLNPYQLRVKGLTDELSNEELFI | | | | |
| | | ALKNMVKHRGISYLDDASDDGNSSVGDYAQIVKENSKQLETKTPGQIQLER | | | | |
| | | YQTYGQLRGDFTVEKDGKKHRLINVFPTSAYRSEALRILQTQQEFNPQITDEF | | | | |
| | | INRYLEILTGKRKYYHGPGNEKSRTDYGRYRTSGETLDNIFGILIGKCTFYPDEF | | | | |
| | | RAAKASYTAQEFNLLNDLNNLTVPTETKKLSKEQKNQIINYVKNEKAMGPAK | | | | |
| | | LFKYIAKLLSCDVADIKGYRIDKSGKAEIHTFEAYRKMKTLETLDIEQMDRETL | | | | |
| | | DKLAYVLTLNTEREGIQEALEHEFADGSFSQKQVDELVQFRKANSSIFGKGW | | | | |
| | | HNFSVKLMMELIPELYETSEEQMTILTRLGKQKTTSSSNKTKYIDEKLLTEEIY | | | | |
| | | NPVVAKSVRQAIKIVNAAIKEYGDFDNIVIEMARETNEDDEKKAIQKIQKAN | | | | |
| | | KDEKDAAMLKAANQYNGKAELPHSVFHGHKQLATKIRLWHQQGERCLYT | | | | |
| | | GKTISIHDLINNSNQFEVDHILPLSITFDDSLANKVLVYATANQEKGQRTPYQ | | | | |
| | | ALDSMDDAWSFRELKAFVRESKTLSNKKKEYLLTEEDISKFDVRKKFIERNLV | | | | |
| | | DTRYASRVVLNALQEHFRAHKIDTKVSVVRGQFTSQLRRHWGIEKTRDTYH | | | | |
| | | HHAVDALIIAASSQLNLWKKQKNTLVSYSEDQLLDIETGELISDDEYKESVFK | | | | |
| | | APYQHFVDTLKSKEFEDSILFSYQVDSKFNRKISDATIYATRQAKVGKDKADE | | | | |
| | | TYVLGKIKDIYTQDGYDAFMKIYKKDKSKFLMYRHDPQTFEKVIEPILENYPN | | | | |
| | | KQINEKGKEVPCNPFLKYKEEHGYIRKYSKKGNGPEIKSLKYYDSKLGNHIDIT | | | | |
| | | PKDSNNKVVLQSVSPWRADVYFNKTTGKYEILGLKYADLQFEKGTGTYKISQ | | | | |
| | | EKYNDIKKKEGVDSDSEFKFTLYKNDLLLVKDTETKEQQLFRFLSRTMPKQKH | | | | |
| | | YVELKPYDKQKFEGGEALIKVLGNVANSGQCKKGLGKSNISIYKVRTDVLGN | | | | |
| | | QHIIKNEGDKPKLDF | | | | |
| BlatCas9 | Brevibacillus | MAYTMGIDVGIASCGWAIVDLERQRIIDIGVRTFEKAENPKNGEALAVPRRE | 9,012 | N607A | H584A | D8A |
| | laterosporus | ARSSRRRLRRKKHRIERLKHMFVRNGLAVDIQHLEQTLRSQNEIDVWQLRV | | | | |
| | | DGLDRMLTQKEWLRVLIHLAQRRGFQSNRKTDGSSEDGQVLVNVTENDRL | | | | |
| | | MEEKDYRTVAEMMVKDEKFSDHKRNKNGNYHGVVSRSSLLVEIHTLFETQ | | | | |
| | | RQHHNSLASKDFELEYVNIWSAQRPVATKDQIEKMIGTCTFLPKEKRAPKAS | | | | |
| | | WHFQYFMLLQTINHIRITNVQGTRSLNKEEIEQVVNMALTKSKVSYHDTRKI | | | | |
| | | LDLSEEYQFVGLDYGKEDEKKKVESKETIIKLDDYHKLNKIFNEVELAKGETWE | | | | |
| | | ADDYDTVAYALTFFKDDEDIRDYLQNKYKDSKNRLVKNLANKEYTNELIGKV | | | | |
| | | STLSFRKVGHLSLKALRKIIPFLEQGMTYDKACQAAGFDFQGISKKKRSVVLP | | | | |
| | | VIDQISNPVVNRALTQTRKVINALIKKYGSPETIHIETARELSKTFDERKNITKD | | | | |
| | | YKENRDKNEHAKKHLSELGIINPTGLDIVKYKLWCEQQGRCMYSNQPISFER | | | | |
| | | LKESGYTEVDHIIPYSRSMNDSYNNRVLVMTRENREKGNQTPFEYMGNDT | | | | |
| | | QRWYEFEQRVTTNPQIKKEKRQNLLLKGFTNRRELEMLERNLNDTRYITKYL | | | | |
| | | SHFISTNLEFSPSDKKKKVVNTSGRITSHLRSRWGLEKNRGQNDLHHAMDAI | | | | |
| | | VIAVTSDSFIQQVTNYYKRKERRELNGDDKFPLPWKFFREEVIARLSPNPKEQ | | | | |
| | | IEALPNHFYSEDELADLQPIFVSRMPKRSITGEAHQAQFRRVVGKTKEGKNIT | | | | |
| | | AKKTALVDISYDKNGDFNMYGRETDPATYEAIKERYLEFGGNVKKAFSTDLH | | | | |
| | | KPKKDGTKGPLIKSVRIMENKTLVHPVNKGKGVVYNSSIVRTDVFQRKEKYY | | | | |
| | | LLPVYVTDVTKGKLPNKVIVAKKGYHDWIEVDDSFTFLFSLYPNDLIFIRQNPK | | | | |
| | | KKISLKKRIESHSISDSKEVQEIHAYYKGVDSSTAAIEFIIHDGSYYAKGVGVQN | | | | |
| | | LDCFEKYQVDILGNYFKVKGEKRLELETSDSNHKGKDVNSIKSTSR | | | | |
| cCas9-v16 | Staphylococcus | MKRNYILGLDIGITSVGYGIIDYETRDVIDAGVRLFKEANVENNEGRRSKRGA | 9,013 | N580A | H557A | D10A |
| | aureus | RRLKRRRRHRIQRVKKLLFDYNLLTDHSELSGINPYEARVKGLSQKLSEEEFSA | | | | |
| | | ALLHLAKRRGVHNVNEVEEDTGNELSTKEQISRNSKALEEKYVAELQLERLKK | | | | |
| | | DGEVRGSINRFKTSDYVKEAKQLLKVQKAYHQLDQSFIDTYIDLLETRRTYYE | | | | |
| | | GPGEGSPFGWKDIKEWYEMLMGHCTYFPEELRSVKYAYNADLYNALNDLN | | | | |
| | | NLVITRDENEKLEYYEKFQIIENVFKQKKKPTLKQIAKEILVNEEDIKGYRVTST | | | | |
| | | GKPEFTNLKVYHDIKDITARKEIIENAELLDQIAKILTIYQSSEDIQEELTNLNSE | | | | |
| | | LTQEEIEQISNLKGYTGTHNLSLKAINLILDELWHTNDNQIAIFNRLKLVPKKV | | | | |
| | | DLSQQKEIPTTLVDDFILSPVVKRSFIQSIKVINAIIKKYGLPNDIIIELAREKNSK | | | | |
| | | DAQKMINEMQKRNRQTNERIEEIIRTTGKENAKYLIEKIKLHDMQEGKCLYS | | | | |
| | | LEAIPLEDLLNNPFNYEVDHIIPRSVSFDNSFNNKVLVKQEENSKKGNRTPFQ | | | | |
| | | YLSSSDSKISYETFKKHILNLAKGKGRISKTKKEYLLEERDINRFSVQKDFINRNL | | | | |
| | | VDTRYATRGLMNLLRSYFRVNNLDVKVKSINGGFTSFLRRKWKFKKERNKG | | | | |
| | | YKHHAEDALIIANADFIFKEWKKLDKAKKVMENQMFEEKQAESMPEIETEQ | | | | |
| | | EYKEIFITPHQIKHIKDFKDYKYSHRVDKKPNRKLINDTLYSTRKDDKGNTLIV | | | | |
| | | NNLNGLYDKDNDKLKKLINKSPEKLLMYHHDPQTYQKLKLIMEQYGDEKNP | | | | |
| | | LYKYYEETGNYLTKYSKKDNGPVIKKIKYYGNKLNAHLDITDDYPNSRNKVVK | | | | |
| | | LSLKPYRFDVYLDNGVYKFVTVKNLDVIKKENYYEVNSKCYEEAKKLKKISNQ | | | | |
| | | AEFIASFYKNDLIKINGELYRVIGVNSDKNNLIEVNMIDITYREYLENMNDKRP | | | | |
| | | PHIIKTIASKTQSIKKYSTDILGNLYEVKSKKHPQIIKKG | | | | |
| cCas9-v17 | Staphylococcus | MKRNYILGLDIGITSVGYGIIDYETRDVIDAGVRLFKEANVENNEGRRSKRGA | 9,014 | N580A | H557A | D10A |
| | aureus | RRLKRRRRHRIQRVKKLLFDYNLLTDHSELSGINPYEARVKGLSQKLSEEEFSA | | | | |
| | | ALLHLAKRRGVHNVNEVEEDTGNELSTKEQISRNSKALEEKYVAELQLERLKK | | | | |
| | | DGEVRGSINRFKTSDYVKEAKQLLKVQKAYHQLDQSFIDTYIDLLETRRTYYE | | | | |
| | | GPGEGSPFGWKDIKEWYEMLMGHCTYFPEELRSVKYAYNADLYNALNDLN | | | | |
| | | NLVITRDENEKLEYYEKFQIIENVFKQKKKPTLKQIAKEILVNEEDIKGYRVTST | | | | |
| | | GKPEFTNLKVYHDIKDITARKEIIENAELLDQIAKILTIYQSSEDIQEELTNLNSE | | | | |
| | | LTQEEIEQISNLKGYTGTHNLSLKAINLILDELWHTNDNQIAIFNRLKLVPKKV | | | | |
| | | DLSQQKEIPTTLVDDFILSPVVKRSFIQSIKVINAIIKKYGLPNDIIIELAREKNSK | | | | |
| | | DAQKMINEMQKRNRQTNERIEEIIRTTGKENAKYLIEKIKLHDMQEGKCLYS | | | | |
| | | LEAIPLEDLLNNPFNYEVDHIIPRSVSFDNSFNNKVLVKQEENSKKGNRTPFQ | | | | |
| | | YLSSSDSKISYETFKKHILNLAKGKGRISKTKKEYLLEERDINRFSVQKDFINRNL | | | | |
| | | VDTRYATRGLMNLLRSYFRVNNLDVKVKSINGGFTSFLRRKWKFKKERNKG | | | | |
| | | YKHHAEDALIIANADFIFKEWKKLDKAKKVMENQMFEEKQAESMPEIETEQ | | | | |
| | | EYKEIFITPHQIKHIKDFKDYKYSHRVDKKPNRKLINDTLYSTRKDDKGNTLIV | | | | |
| | | NNLNGLYDKDNDKLKKLINKSPEKLLMYHHDPQTYQKLKLIMEQYGDEKNP | | | | |
| | | LYKYYEETGNYLTKYSKKDNGPVIKKIKYYGNKLNAHLDITDDYPNSRNKVVK | | | | |
| | | LSLKPYRFDVYLDNGVYKFVTVKNLDVIKKENYYEVNSKCYEEAKKLKKISNQ | | | | |
| | | AEFIASFYKNDLIKINGELYRVIGVNNSTRNIVELNMIDITYREYLENMNDKRP | | | | |
| | | PHIIKTIASKTQSIKKYSTDILGNLYEVKSKKHPQIIKKG | | | | |
| cCas9-v21 | Staphylococcus | MKRNYILGLDIGITSVGYGIIDYETRDVIDAGVRLFKEANVENNEGRRSKRGA | 9,015 | N580A | H557A | D10A |
| | aureus | RRLKRRRRHRIQRVKKLLFDYNLLTDHSELSGINPYEARVKGLSQKLSEEEFSA | | | | |
| | | ALLHLAKRRGVHNVNEVEEDTGNELSTKEQISRNSKALEEKYVAELQLERLKK | | | | |
| | | DGEVRGSINRFKTSDYVKEAKQLLKVQKAYHQLDQSFIDTYIDLLETRRTYYE | | | | |
| | | GPGEGSPFGWKDIKEWYEMLMGHCTYFPEELRSVKYAYNADLYNALNDLN | | | | |
| | | NLVITRDENEKLEYYEKFQIIENVFKQKKKPTLKQIAKEILVNEEDIKGYRVTST | | | | |
| | | GKPEFTNLKVYHDIKDITARKEIIENAELLDQIAKILTIYQSSEDIQEELTNLNSE | | | | |
| | | LTQEEIEQISNLKGYTGTHNLSLKAINLILDELWHTNDNQIAIFNRLKLVPKKV | | | | |
| | | DLSQQKEIPTTLVDDFILSPVVKRSFIQSIKVINAIIKKYGLPNDIIIELAREKNSK | | | | |
| | | DAQKMINEMQKRNRQTNERIEEIIRTTGKENAKYLIEKIKLHDMQEGKCLYS | | | | |
| | | LEAIPLEDLLNNPFNYEVDHIIPRSVSFDNSFNNKVLVKQEENSKKGNRTPFQ | | | | |
| | | YLSSSDSKISYETFKKHILNLAKGKGRISKTKKEYLLEERDINRFSVQKDFINRNL | | | | |
| | | VDTRYATRGLMNLLRSYFRVNNLDVKVKSINGGFTSFLRRKWKFKKERNKG | | | | |
| | | YKHHAEDALIIANADFIFKEWKKLDKAKKVMENQMFEEKQAESMPEIETEQ | | | | |
| | | EYKEIFITPHQIKHIKDFKDYKYSHRVDKKPNRKLINDTLYSTRKDDKGNTLIV | | | | |
| | | NNLNGLYDKDNDKLKKLINKSPEKLLMYHHDPQTYQKLKLIMEQYGDEKNP | | | | |
| | | LYKYYEETGNYLTKYSKKDNGPVIKKIKYYGNKLNAHLDITDDYPNSRNKVVK | | | | |
| | | LSLKPYRFDVYLDNGVYKFVTVKNLDVIKKENYYEVNSKCYEEAKKLKKISNQ | | | | |
| | | AEFIASFYKNDLIKINGELYRVIGVNSDDRNIIELNMIDITYREYLENMNDKRP | | | | |
| | | PHIIKTIASKTQSIKKYSTDILGNLYEVKSKKHPQIIKKG | | | | |
| cCas9-v42 | Staphylococcus | MKRNYILGLDIGITSVGYGIIDYETRDVIDAGVRLFKEANVENNEGRRSKRGA | 9,016 | N580A | H557A | D10A |
| | aureus | RRLKRRRRHRIQRVKKLLFDYNLLTDHSELSGINPYEARVKGLSQKLSEEEFSA | | | | |
| | | ALLHLAKRRGVHNVNEVEEDTGNELSTKEQISRNSKALEEKYVAELQLERLKK | | | | |
| | | DGEVRGSINRFKTSDYVKEAKQLLKVQKAYHQLDQSFIDTYIDLLETRRTYYE | | | | |
| | | GPGEGSPFGWKDIKEWYEMLMGHCTYFPEELRSVKYAYNADLYNALNDLN | | | | |
| | | NLVITRDENEKLEYYEKFQIIENVFKQKKKPTLKQIAKEILVNEEDIKGYRVTST | | | | |
| | | GKPEFTNLKVYHDIKDITARKEIIENAELLDQIAKILTIYQSSEDIQEELTNLNSE | | | | |
| | | LTQEEIEQISNLKGYTGTHNLSLKAINLILDELWHTNDNQIAIFNRLKLVPKKV | | | | |
| | | DLSQQKEIPTTLVDDFILSPVVKRSFIQSIKVINAIIKKYGLPNDIIIELAREKNSK | | | | |
| | | DAQKMINEMQKRNRQTNERIEEIIRTTGKENAKYLIEKIKLHDMQEGKCLYS | | | | |
| | | LEAIPLEDLLNNPFNYEVDHIIPRSVSFDNSFNNKVLVKQEENSKKGNRTPFQ | | | | |
| | | YLSSSDSKISYETFKKHILNLAKGKGRISKTKKEYLLEERDINRFSVQKDFINRNL | | | | |
| | | VDTRYATRGLMNLLRSYFRVNNLDVKVKSINGGFTSFLRRKWKFKKERNKG | | | | |
| | | YKHHAEDALIIANADFIFKEWKKLDKAKKVMENQMFEEKQAESMPEIETEQ | | | | |
| | | EYKEIFITPHQIKHIKDFKDYKYSHRVDKKPNRKLINDTLYSTRKDDKGNTLIV | | | | |
| | | NNLNGLYDKDNDKLKKLINKSPEKLLMYHHDPQTYQKLKLIMEQYGDEKNP | | | | |
| | | LYKYYEETGNYLTKYSKKDNGPVIKKIKYYGNKLNAHLDITDDYPNSRNKVVK | | | | |
| | | LSLKPYRFDVYLDNGVYKFVTVKNLDVIKKENYYEVNSKCYEEAKKLKKISNQ | | | | |
| | | AEFIASFYKNDLIKINGELYRVIGVNNNRLNKIELNMIDITYREYLENMNDKRP | | | | |
| | | PHIIKTIASKTQSIKKYSTDILGNLYEVKSKKHPQIIKKG | | | | |
| CdiCas9 | Corynebacterium | MKYHVGIDVGTFSVGLAAIEVDDAGMPIKTLSLVSHIHDSGLDPDEIKSAVT | 9,017 | N597A | H573A | D8A |
| | diphtheriae | RLASSGIARRTRRLYRRKRRRLQQLDKFIQRQGWPVIELEDYSDPLYPWKVR | | | | |
| | | AELAASYIADEKERGEKLSVALRHIARHRGWRNPYAKVSSLYLPDGPSDAFK | | | | |
| | | AIREEIKRASGQPVPETATVGQMVTLCELGTLKLRGEGGVLSARLQQSDYAR | | | | |
| | | EIQEICRMQEIGQELYRKIIDVVFAAESPKGSASSRVGKDPLQPGKNRALKAS | | | | |
| | | DAFQRYRIAALIGNLRVRVDGEKRILSVEEKNLVFDHLVNLTPKKEPEWVTIA | | | | |
| | | EILGIDRGQLIGTATMTDDGERAGARPPTHDTNRSIVNSRIAPLVDWWKTA | | | | |
| | | SALEQHAMVKALSNAEVDDFDSPEGAKVQAFFADLDDDVHAKLDSLHLPV | | | | |
| | | GRAAYSEDTLVRLTRRMLSDGVDLYTARLQEFGIEPSWTPPTPRIGEPVGNP | | | | |
| | | AVDRVLKTVSRWLESATKTWGAPERVIIEHVREGFVTEKRAREMDGDMRR | | | | |
| | | RAARNAKLFQEMQEKLNVQGKPSRADLWRYQSVQRQNCQCAYCGSPITF | | | | |
| | | SNSEMDHIVPRAGQGSTNTRENLVAVCHRCNQSKGNTPFAIWAKNTSIEG | | | | |
| | | VSVKEAVERTRHWVTDTGMRSTDFKKFTKAVVERFQRATMDEEIDARSME | | | | |
| | | SVAWMANELRSRVAQHFASHGTTVRVYRGSLTAEARRASGISGKLKFFDGV | | | | |
| | | GKSRLDRRHHAIDAAVIAFTSDYVAETLAVRSNLKQSQAHRQEAPQWREFT | | | | |
| | | GKDAEHRAAWRVWCQKMEKLSALLTEDLRDDRVVVMSNVRLRLGNGSA | | | | |
| | | HKETIGKLSKVKLSSQLSVSDIDKASSEALWCALTREPGFDPKEGLPANPERHI | | | | |
| | | RVNGTHVYAGDNIGLFPVSAGSIALRGGYAELGSSFHHARVYKITSGKKPAF | | | | |
| | | AMLRVYTIDLLPYRNQDLFSVELKPQTMSMRQAEKKLRDALATGNAEYLG | | | | |
| | | WLVVDDELVVDTSKIATDQVKAVEAELGTIRRWRVDGFFSPSKLRLRPLQM | | | | |
| | | SKEGIKKESAPELSKIIDRPGWLPAVNKLFSDGNVTVVRRDSLGRVRLESTAH | | | | |
| | | LPVTWKVQ | | | | |
| CjeCas9 | Campylobacter | MARILAFDIGISSIGWAFSENDELKDCGVRIFTKVENPKTGESLALPRRLARSA | 9,018 | N582A | H559A | D8A |
| | jejuni | RKRLARRKARLNHLKHLIANEFKLNYEDYQSFDESLAKAYKGSLISPYELRFRA | | | | |
| | | LNELLSKQDFARVILHIAKRRGYDDIKNSDDKEKGAILKAIKQNEEKLANYQS | | | | |
| | | VGEYLYKEYFQKFKENSKEFTNVRNKKESYERCIAQSFLKDELKLIFKKQREFG | | | | |
| | | FSFSKKFEEEVLSVAFYKRALKDFSHLVGNCSFFTDEKRAPKNSPLAFMFVAL | | | | |
| | | TRIINLLNNLKNTEGILYTKDDLNALLNEVLKNGTLTYKQTKKLLGLSDDYEFK | | | | |
| | | GEKGTYFIEFKKYKEFIKALGEHNLSQDDLNEIAKDITLIKDEIKLKKALAKYDLN | | | | |
| | | QNQIDSLSKLEFKDHLNISFKALKLVTPLMLEGKKYDEACNELNLKVAINEDK | | | | |
| | | KDFLPAFNETYYKDEVTNPVVLRAIKEYRKVLNALLKKYGKVHKINIELAREVG | | | | |
| | | KNHSQRAKIEKEQNENYKAKKDAELECEKLGLKINSKNILKLRLFKEQKEFCAY | | | | |
| | | SGEKIKISDLQDEKMLEIDHIYPYSRSFDDSYMNKVLVFTKQNQEKLNQTPFE | | | | |
| | | AFGNDSAKWQKIEVLAKNLPTKKQKRILDKNYKDKEQKNFKDRNLNDTRYI | | | | |
| | | ARLVLNYTKDYLDFLPLSDDENTKLNDTQKGSKVHVEAKSGMLTSALRHTW | | | | |
| | | GFSAKDRNNHLHHAIDAVIIAYANNSIVKAFSDFKKEQESNSAELYAKKISELD | | | | |
| | | YKNKRKFFEPFSGFRQKVLDKIDEIFVSKPERKKPSGALHEETFRKEEEFYQSY | | | | |
| | | GGKEGVLKALELGKIRKVNGKIVKNGDMFRVDIFKHKKTNKFYAVPIYTMDF | | | | |
| | | ALKVLPNKAVARSKKGEIKDWILMDENYEFCFSLYKDSLILIQTKDMQEPEFV | | | | |
| | | YYNAFTSSTVSLIVSKHDNKFETLSKNQKILFKNANEKEVIAKSIGIQNLKVFEK | | | | |
| | | YIVSALGEVTKAEFRQREDFKK | | | | |
| GeoCas9 | Geobacillus | MRYKIGLDIGITSVGWAVMNLDIPRIEDLGVRIFDRAENPQTGESLALPRRLA | 9,019 | N605A | H582A | D8A |
| | stearothermo- | RSARRRLRRRKHRLERIRRLVIREGILTKEELDKLFEEKHEIDVWQLRVEALDR | | | | |
| | philus | KLNNDELARVLLHLAKRRGFKSNRKSERSNKENSTMLKHIEENRAILSSYRTV | | | | |
| | | GEMIVKDPKFALHKRNKGENYTNTIARDDLEREIRLIFSKQREFGNMSCTEEF | | | | |
| | | ENEYITIWASQRPVASKDDIEKKVGFCTFEPKEKRAPKATYTFQSFIAWEHIN | | | | |
| | | KLRLISPSGARGLTDEERRLLYEQAFQKNKITYHDIRTLLHLPDDTYFKGIVYDR | | | | |
| | | GESRKQNENIRFLELDAYHQIRKAVDKVYGKGKSSSFLPIDFDTFGYALTLFKD | | | | |
| | | DADIHSYLRNEYEQNGKRMPNLANKVYDNELIEELLNLSFTKFGHLSLKALRS | | | | |
| | | ILPYMEQGEVYSSACERAGYTFTGPKKKQKTMLLPNIPPIANPVVMRALTQA | | | | |
| | | RKVVNAIIKKYGSPVSIHIELARDLSQTFDERRKTKKEQDENRKKNETAIRQL | | | | |
| | | MEYGLTLNPTGHDIVKFKLWSEQNGRCAYSLQPIEIERLLEPGYVEVDHVIPY | | | | |
| | | SRSLDDSYTNKVLVLTRENREKGNRIPAEYLGVGTERWQQFETFVLTNKQFS | | | | |
| | | KKKRDRLLRLHYDENEETEFKNRNLNDTRYISRFFANFIREHLKFAESDDKQK | | | | |
| | | VYTVNGRVTAHLRSRWEFNKNREESDLHHAVDAVIVACTTPSDIAKVTAFY | | | | |
| | | QRREQNKELAKKTEPHFPQPWPHFADELRARLSKHPKESIKALNLGNYDDQ | | | | |
| | | KLESLQPVFVSRMPKRSVTGAAHQETLRRYVGIDERSGKIQTVVKTKLSEIKL | | | | |
| | | DASGHFPMYGKESDPRTYEAIRQRLLEHNNDPKKAFQEPLYKPKKNGEPGP | | | | |
| | | VIRTVKIIDTKNQVIPLNDGKTVAYNSNIVRVDVFEKDGKYYCVPVYTMDIM | | | | |
| | | KGILPNKAIEPNKPYSEWKEMTEDYTFRFSLYPNDLIRIELPREKTVKTAAGEE | | | | |
| | | INVKDVFVYYKTIDSANGGLELISHDHRFSLRGVGSRTLKRFEKYQVDVLGNI | | | | |
| | | YKVRGEKRVGLASSAHSKPGKTIRPLQSTRD | | | | |
| iSpyMac- | Streptococcus | MDKKYSIGLDIGTNSVGWAVITDEYKVPSKKFKVLGNTDRHSIKKNLIGALLF | 9,020 | N863A | H840A | D10A |
| Cas9 | spp. | DSGETAEATRLKRTARRRYTRRKNRICYLQEIFSNEMAKVDDSFFHRLEESFL | | | | |
| | | VEEDKKHERHPIFGNIVDEVAYHEKYPTIYHLRKKLVDSTDKADLRLIYLALAH | | | | |
| | | MIKFRGHFLIEGDLNPDNSDVDKLFIQLVQTYNQLFEENPINASGVDAKAILS | | | | |
| | | ARLSKSRKLENLIAQLPGEKKNGLFGNLIALSLGLTPNFKSNFDLAEDAKLQLS | | | | |
| | | KDTYDDDLDNLLAQIGDQYADLFLAAKNLSDAILLSDILRVNTEITKAPLSAS | | | | |
| | | MIKRYDEHHQDLTLLKALVRQQLPEKYKEIFFDQSKNGYAGYIDGGASQEEF | | | | |
| | | YKFIKPILEKMDGTEELLVKLKREDLLRKQRTFDNGSIPHQIHLGELHAILRRQ | | | | |
| | | EDFYPFLKDNREKIEKILTFRIPYYVGPLARGNSRFAWMTRKSEETITPWNFE | | | | |
| | | EVVDKGASAQSFIERMTNFDKNLPNEKVLPKHSLLYEYFTVYNELTKVKYVTE | | | | |
| | | GMRKPAFLSGEQKKAIVDLLFKTNRKVTVKQLKEDYFKKIECFDSVEISGVED | | | | |
| | | RFNASLGTYHDLLKIIKDKDFLDNEENEDILEDIVLTLTLFEDREMIEERLKTYA | | | | |
| | | HLFDDKVMKQLKRRRYTGWGRLSRKLINGIRDKQSGKTILDFLKSDGFANR | | | | |
| | | NFMQLIHDDSLTFKEDIQKAQVSGQGDSLHEHIANLAGSPAIKKGILQTVKV | | | | |
| | | VDELVKVMGRHKPENIVIEMARENQTTQKGQKNSRERMKRIEEGIKELGSQ | | | | |
| | | ILKEHPVENTQLQNEKLYLYYLQNGRDMYVDQELDINRLSDYDVDHIVPQSF | | | | |
| | | LKDDSIDNKVLTRSDKNRGKSDNVPSEEVVKKMKNYWRQLLNAKLITQRKF | | | | |
| | | DNLTKAERGGLSELDKAGFIKRQLVETRQITKHVAQILDSRMNTKYDENDKLI | | | | |
| | | REVKVITLKSKLVSDFRKDFQFYKVREINNYHHAHDAYLNAVVGTALIKKYPK | | | | |
| | | LESEFVYGDYKVYDVRKMIAKSEQEIGKATAKYFFYSNIMNFFKTEITLANGEI | | | | |
| | | RKRPLIETNGETGEIVWDKGRDFATVRKVLSMPQVNIVKKTEIQTVGQNGG | | | | |
| | | LFDDNPKSPLEVTPSKLVPLKKELNPKKYGGYQKPTTAYPVLLITDTKQLIPISV | | | | |
| | | MNKKQFEQNPVKFLRDRGYQQVGKNDFIKLPKYTLVDIGDGIKRLWASSKEI | | | | |
| | | HKGNQLVVSKKSQILLYHAHHLDSDLSNDYLQNHNQQFDVLFNEISFSKKC | | | | |
| | | KLGKEHIQKIENVYSNKKNSASIEELAESFIKLLGFTQLGATSPFNFLGVKLNQ | | | | |
| | | KQYKGKKDYILPCTEGTLIRQSITGLYETRVDLSKIGEDSGGSGGSKRTADGSE | | | | |
| | | FES | | | | |
| NmeCas9 | Neisseria | MAAFKPNSINYILGLDIGIASVGWAMVEIDEEENPIRLIDLGVRVFERAEVPK | 9,021 | N611A | H588A | D16A |
| | meningitidis | TGDSLAMARRLARSVRRLTRRRAHRLLRTRRLLKREGVLQAANFDENGLIKS | | | | |
| | | LPNTPWQLRAAALDRKLTPLEWSAVLLHLIKHRGYLSQRKNEGETADKELG | | | | |
| | | ALLKGVAGNAHALQTGDFRTPAELALNKFEKESGHIRNQRSDYSHTFSRKDL | | | | |
| | | QAELILLFEKQKEFGNPHVSGGLKEGIETLLMTQRPALSGDAVQKMLGHCTF | | | | |
| | | EPAEPKAAKNTYTAERFIWLTKLNNLRILEQGSERPLTDTERATLMDEPYRKS | | | | |
| | | KLTYAQARKLLGLEDTAFFKGLRYGKDNAEASTLMEMKAYHAISRALEKEGL | | | | |
| | | KDKKSPLNLSPELQDEIGTAFSLFKTDEDITGRLKDRIQPEILEALLKHISFDKFV | | | | |
| | | QISLKALRRIVPLMEQGKRYDEACAEIYGDHYGKKNTEEKIYLPPIPADEIRNP | | | | |
| | | VVLRALSQARKVINGVVRRYGSPARIHIETAREVGKSFKDRKEIEKRQEENRK | | | | |
| | | DREKAAAKFREYFPNFVGEPKSKDILKLRLYEQQHGKCLYSGKEINLGRLNEK | | | | |
| | | GYVEIDHALPFSRTWDDSFNNKVLVLGSENQNKGNQTPYEYFNGKDNSRE | | | | |
| | | WQEFKARVETSRFPRSKKQRILLQKFDEDGFKERNLNDTRYVNRFLCQFVA | | | | |
| | | DRMRLTGKGKKRVFASNGQITNLLRGFWGLRKVRAENDRHHALDAVVVA | | | | |
| | | CSTVAMQQKITRFVRYKEMNAFDGKTIDKETGEVLHQKTHFPQPWEFFAQ | | | | |
| | | EVMIRVFGKPDGKPEFEEADTLEKLRTLLAEKLSSRPEAVHEYVTPLFVSRAP | | | | |
| | | NRKMSGQGHMETVKSAKRLDEGVSVLRVPLTQLKLKDLEKMVNREREPKL | | | | |
| | | YEALKARLEAHKDDPAKAFAEPFYKYDKAGNRTQQVKAVRVEQVQKTGVW | | | | |
| | | VRNHNGIADNATMVRVDVFEKGDKYYLVPIYSWQVAKGILPDRAVVQGKD | | | | |
| | | EEDWQLIDDSFNFKFSLHPNDLVEVITKKARMFGYFASCHRGTGNINIRIHD | | | | |
| | | LDHKIGKNGILEGIGVKTALSFQKYQIDELGKEIRPCRLKKRPPVR | | | | |
| ScaCas9 | Streptococcus | MEKKYSIGLDIGTNSVGWAVITDDYKVPSKKFKVLGNTNRKSIKKNLMGALL | 9,022 | N872A | H849A | D10A |
| | canis | FDSGETAEATRLKRTARRRYTRRKNRIRYLQEIFANEMAKLDDSFFQRLEESF | | | | |
| | | LVEEDKKNERHPIFGNLADEVAYHRNYPTIYHLRKKLADSPEKADLRLIYLALA | | | | |
| | | HIIKFRGHFLIEGKLNAENSDVAKLFYQLIQTYNQLFEESPLDEIEVDAKGILSA | | | | |
| | | RLSKSKRLEKLIAVFPNEKKNGLFGNIIALALGLTPNFKSNFDLTEDAKLQLSKD | | | | |
| | | TYDDDLDELLGQIGDQYADLFSAAKNLSDAILLSDILRSNSEVTKAPLSASMV | | | | |
| | | KRYDEHHQDLALLKTLVRQQFPEKYAEIFKDDTKNGYAGYVGIGIKHRKRTT | | | | |
| | | KLATQEEFYKFIKPILEKMDGAEELLAKLNRDDLLRKQRTFDNGSIPHQIHLKE | | | | |
| | | LHAILRRQEEFYPFLKENREKIEKILTFRIPYYVGPLARGNSRFAWLTRKSEEAI | | | | |
| | | TPWNFEEVVDKGASAQSFIERMTNFDEQLPNKKVLPKHSLLYEYFTVYNELT | | | | |
| | | KVKYVTERMRKPEFLSGEQKKAIVDLLFKTNRKVTVKQLKEDYFKKIECFDSV | | | | |
| | | EIIGVEDRFNASLGTYHDLLKIIKDKDFLDNEENEDILEDIVLTLTLFEDREMIEE | | | | |
| | | RLKTYAHLFDDKVMKQLKRRHYTGWGRLSRKMINGIRDKQSGKTILDFLKS | | | | |
| | | DGFSNRNFMQLIHDDSLTFKEEIEKAQVSGQGDSLHEQIADLAGSPAIKKGIL | | | | |
| | | QTVKIVDELVKVMGHKPENIVIEMARENQTTTKGLQQSRERKKRIEEGIKELE | | | | |
| | | SQILKENPVENTQLQNEKLYLYYLQNGRDMYVDQELDINRLSDYDVDHIVP | | | | |
| | | QSFIKDDSIDNKVLTRSVENRGKSDNVPSEEVVKKMKNYWRQLLNAKLITQ | | | | |
| | | RKFDNLTKAERGGLSEADKAGFIKRQLVETRQITKHVARILDSRMNTKRDKN | | | | |
| | | DKPIREVKVITLKSKLVSDFRKDFQLYKVRDINNYHHAHDAYLNAVVGTALIK | | | | |
| | | KYPKLESEFVYGDYKVYDVRKMIAKSEQEIGKATAKRFFYSNIMNFFKTEVKL | | | | |
| | | ANGEIRKRPLIETNGETGEVVWNKEKDFATVRKVLAMPQVNIVKKTEVQTG | | | | |
| | | GFSKESILSKRESAKLIPRKKGWDTRKYGGFGSPTVAYSILVVAKVEKGKAKKL | | | | |
| | | KSVKVLVGITIMEKGSYEKDPIGFLEAKGYKDIKKELIFKLPKYSLFELENGRRR | | | | |
| | | MLASATELQKANELVLPQHLVRLLYYTQNISATTGSNNLGYIEQHREEFKEIF | | | | |
| | | EKIIDFSEKYILKNKVNSNLKSSFDEQFAVSDSILLSNSFVSLLKYTSFGASGGFT | | | | |
| | | FLDLDVKQGRLRYQTVTEVLDATLIYQSITGLYETRTDLSQLGGD | | | | |
| ScaCas9- | Streptococcus | MEKKYSIGLDIGTNSVGWAVITDDYKVPSKKFKVLGNTNRKSIKKNLMGALL | 9,023 | N872A | H849A | D10A |
| HiFi-Sc++ | canis | FDSGETAEATRLKRTARRRYTRRKNRIRYLQEIFANEMAKLDDSFFQRLEESF | | | | |
| | | LVEEDKKNERHPIFGNLADEVAYHRNYPTIYHLRKKLADSPEKADLRLIYLALA | | | | |
| | | HIIKFRGHFLIEGKLNAENSDVAKLFYQLIQTYNQLFEESPLDEIEVDAKGILSA | | | | |
| | | RLSKSKRLEKLIAVFPNEKKNGLFGNIIALALGLTPNFKSNFDLTEDAKLQLSKD | | | | |
| | | TYDDDLDELLGQIGDQYADLFSAAKNLSDAILLSDILRSNSEVTKAPLSASMV | | | | |
| | | KRYDEHHQDLALLKTLVRQQFPEKYAEIFKDDTKNGYAGYVGADKKLRKRS | | | | |
| | | GKLATEEEFYKFIKPILEKMDGAEELLAKLNRDDLLRKQRTFDNGSIPHQIHLK | | | | |
| | | ELHAILRRQEEFYPFLKENREKIEKILTFRIPYYVGPLARGNSRFAWLTRKSEEA | | | | |
| | | ITPWNFEEVVDKGASAQSFIERMTNFDEQLPNKKVLPKHSLLYEYFTVYNEL | | | | |
| | | TKVKYVTERMRKPEFLSGEQKKAIVDLLFKTNRKVTVKQLKEDYFKKIECFDS | | | | |
| | | VEIIGVEDRFNASLGTYHDLLKIIKDKDFLDNEENEDILEDIVLTLTLFEDREMIE | | | | |
| | | ERLKTYAHLFDDKVMKQLKRRHYTGWGRLSRKMINGIRDKQSGKTILDFLKS | | | | |
| | | DGFSNANFMQLIHDDSLTFKEEIEKAQVSGQGDSLHEQIADLAGSPAIKKGIL | | | | |
| | | QTVKIVDELVKVMGHKPENIVIEMARENQTTTKGLQQSRERKKRIEEGIKELE | | | | |
| | | SQILKENPVENTQLQNEKLYLYYLQNGRDMYVDQELDINRLSDYDVDHIVP | | | | |
| | | QSFIKDDSIDNKVLTRSVENRGKSDNVPSEEVVKKMKNYWRQLLNAKLITQ | | | | |
| | | RKFDNLTKAERGGLSEADKAGFIKRQLVETRQITKHVARILDSRMNTKRDKN | | | | |
| | | DKPIREVKVITLKSKLVSDFRKDFQLYKVRDINNYHHAHDAYLNAVVGTALIK | | | | |
| | | KYPKLESEFVYGDYKVYDVRKMIAKSEQEIGKATAKRFFYSNIMNFFKTEVKL | | | | |
| | | ANGEIRKRPLIETNGETGEVVWNKEKDFATVRKVLAMPQVNIVKKTEVQTG | | | | |
| | | GFSKESILSKRESAKLIPRKKGWDTRKYGGFGSPTVAYSILVVAKVEKGKAKKL | | | | |
| | | KSVKVLVGITIMEKGSYEKDPIGFLEAKGYKDIKKELIFKLPKYSLFELENGRRR | | | | |
| | | MLASAKELQKANELVLPQHLVRLLYYTQNISATTGSNNLGYIEQHREEFKEIF | | | | |
| | | EKIIDFSEKYILKNKVNSNLKSSFDEQFAVSDSILLSNSFVSLLKYTSFGASGGFT | | | | |
| | | FLDLDVKQGRLRYQTVTEVLDATLIYQSITGLYETRTDLSQLGGD | | | | |
| SpyCas9- | Streptococcus | MDKKYSIGLDIGTNSVGWAVITDEYKVPSKKFKVLGNTDRHSIKKNLIGALLF | 9,024 | N863A | H840A | D10A |
| 3var-NRRH | pyogenes | DSGETAEATRLKRTARRRYTRRKNRICYLQEIFSNEMAKVDDSFFHRLEESFL | | | | |
| | | VEEDKKHERHPIFGNIVDEVAYHEKYPTIYHLRKKLVDSTDKADLRLIYLALAH | | | | |
| | | MIKFRGHFLIEGDLNPDNSDVDKLFIQLVQTYNQLFEENPINASGVDAKAILS | | | | |
| | | ARLSKSRRLENLIAQLPGEKKNGLFGNLIALSLGLTPNFKSNFDLAEDAKLQLS | | | | |
| | | KDTYDDDLDNLLAQIGDQYADLFLAAKNLSDAILLSDILRVNTEITKAPLSAS | | | | |
| | | MVKRYDEHHQDLTLLKALVRQQLPEKYKEIFFDQSKNGYAGYIDGGASQEE | | | | |
| | | FYKFIKPILEKMDGTEELLVKLNREDLLRKQRTFDNGIIPHQIHLGELHAILRRQ | | | | |
| | | GDFYPFLKDNREKIEKILTFRIPYYVGPLARGNSRFAWMTRKSEETITPWNFE | | | | |
| | | EVVDKGASAQSFIERMTNFDKNLPNEKVLPKHSLLYEYFTVYNELTKVKYVTE | | | | |
| | | GMRKPAFLSGEQKKAIVDLLFKTNRKVTVKQLKEDYFKKIECFDSVEISGVED | | | | |
| | | RFNASLGTYHDLLKIIKDKDFLDNEENEDILEDIVLTLTLFEDREMIEERLKTYA | | | | |
| | | HLFDDKVMKQLKRLRYTGWGRLSRKLINGIRDKQSGKTILDFLKSDGFANRN | | | | |
| | | FMQLIHDDSLTFKEDIQKAQVSGQGDSLHEHIANLAGSPAIKKGILQTVKVV | | | | |
| | | DELVKVMGGHKPENIVIEMARENQTTQKGQKNSRERMKRIEEGIKELGSQI | | | | |
| | | LKEHPVENTQLQNEKLYLYYLQNGRDMYVDQELDINRLSDYDVDHIVPQSF | | | | |
| | | LKDDSIDNKVLTRSDKNRGKSDNVPSEEVVKKMKNYWRQLLNAKLITQRKF | | | | |
| | | DNLTKAERGGLSELDKAGFIKRQLVETRQITKHVAQILDSRMNTKYDENDKLI | | | | |
| | | REVKVITLKSKLVSDFRKDFQFYKVREINNYHHAHDAYLNAVVGTALIKKYPK | | | | |
| | | LESEFVYGDYKVYDVRKMIAKSEQEIGKATAKYFFYSNIMNFFKTEITLANGEI | | | | |
| | | RKRPLIETNGETGEIVWDKGRDFATVRKVLSMPQVNIVKKTEVQTGGFSKES | | | | |
| | | ILPKGNSDKLIARKKDWDPKKYGGFNSPTAAYSVLVVAKVEKGKSKKLKSVK | | | | |
| | | ELLGITIMERSSFEKNPIGFLEAKGYKEVKKDLIIKLPKYSLFELENGRKRMLAS | | | | |
| | | AGVLHKGNELALPSKYVNFLYLASHYEKLKGSPEDNEQKQLFVEQHKHYLDE | | | | |
| | | IIEQISEFSKRVILADANLDKVLSAYNKHRDKPIREQAENIIHLFTLTNLGVPAA | | | | |
| | | FKYFDTTIDKKRYTSTKEVLDATLIHQSITGLYETRIDLSQLGGD | | | | |
| SpyCas9- | Streptococcus | MDKKYSIGLDIGTNSVGWAVITDEYKVPSKKFKVLGNTDRHSIKKNLIGALLF | 9,025 | N863A | H840A | D10A |
| 3var-NRTH | pyogenes | DSGETAEATRLKRTARRRYTRRKNRICYLQEIFSNEMAKVDDSFFHRLEESFL | | | | |
| | | VEEDKKHERHPIFGNIVDEVAYHEKYPTIYHLRKKLVDSTDKADLRLIYLALAH | | | | |
| | | MIKFRGHFLIEGDLNPDNSDVDKLFIQLVQTYNQLFEENPINASGVDAKAILS | | | | |
| | | ARLSKSRRLENLIAQLPGEKKNGLFGNLIALSLGLTPNFKSNFDLAEDAKLQLS | | | | |
| | | KDTYDDDLDNLLAQIGDQYADLFLAAKNLSDAILLSDILRVNTEITKAPLSAS | | | | |
| | | MVKRYDEHHQDLTLLKALVRQQLPEKYKEIFFDQSKNGYAGYIDGGASQEE | | | | |
| | | FYKFIKPILEKMDGTEELLVKLNREDLLRKQRTFDNGIIPHQIHLGELHAILRRQ | | | | |
| | | GDFYPFLKDNREKIEKILTFRIPYYVGPLARGNSRFAWMTRKSEETITPWNFE | | | | |
| | | EVVDKGASAQSFIERMTNFDKNLPNEKVLPKHSLLYEYFTVYNELTKVKYVTE | | | | |
| | | GMRKPAFLSGEQKKAIVDLLFKTNRKVTVKQLKEDYFKKIECFDSVEISGVED | | | | |
| | | RFNASLGTYHDLLKIIKDKDFLDNEENEDILEDIVLTLTLFEDREMIEERLKTYA | | | | |
| | | HLFDDKVMKQLKRLRYTGWGRLSRKLINGIRDKQSGKTILDFLKSDGFANRN | | | | |
| | | FMQLIHDDSLTFKEDIQKAQVSGQGDSLHEHIANLAGSPAIKKGILQTVKVV | | | | |
| | | DELVKVMGGHKPENIVIEMARENQTTQKGQKNSRERMKRIEEGIKELGSQI | | | | |
| | | LKEHPVENTQLQNEKLYLYYLQNGRDMYVDQELDINRLSDYDVDHIVPQSF | | | | |
| | | LKDDSIDNKVLTRSDKNRGKSDNVPSEEVVKKMKNYWRQLLNAKLITQRKF | | | | |
| | | DNLTKAERGGLSELDKAGFIKRQLVETRQITKHVAQILDSRMNTKYDENDKLI | | | | |
| | | REVKVITLKSKLVSDFRKDFQFYKVREINNYHHAHDAYLNAVVGTALIKKYPK | | | | |
| | | LESEFVYGDYKVYDVRKMIAKSEQEIGKATAKYFFYSNIMNFFKTEITLANGEI | | | | |
| | | RKRPLIETNGETGEIVWDKGRDFATVRKVLSMPQVNIVKKTEVQTGGFSKES | | | | |
| | | ILPKGNSDKLIARKKDWDPKKYGGFNSPTVAYSVLVVAKVEKGKSKKLKSVK | | | | |
| | | ELLGITIMERSSFEKNPIGFLEAKGYKEVKKDLIIKLPKYSLFELENGRKRMLAS | | | | |
| | | ASVLHKGNELALPSKYVNFLYLASHYEKLKGSSEDNKQKQLFVEQHKHYLDEI | | | | |
| | | IEQISEFSKRVILADANLDKVLSAYNKHRDKPIREQAENIIHLFTLTNLGASAAF | | | | |
| | | KYFDTTIGRKLYTSTKEVLDATLIHQSITGLYETRIDLSQLGGD | | | | |
| SpyCas9- | Streptococcus | MDKKYSIGLDIGTNSVGWAVITDEYKVPSKKFKVLGNTDRHSIKKNLIGALLF | 9,026 | N863A | H840A | D10A |
| 3var-NRCH | pyogenes | DSGETAEATRLKRTARRRYTRRKNRICYLQEIFSNEMAKVDDSFFHRLEESFL | | | | |
| | | VEEDKKHERHPIFGNIVDEVAYHEKYPTIYHLRKKLVDSTDKADLRLIYLALAH | | | | |
| | | MIKFRGHFLIEGDLNPDNSDVDKLFIQLVQTYNQLFEENPINASGVDAKAILS | | | | |
| | | ARLSKSRRLENLIAQLPGEKKNGLFGNLIALSLGLTPNFKSNFDLAEDAKLQLS | | | | |
| | | KDTYDDDLDNLLAQIGDQYADLFLAAKNLSDAILLSDILRVNTEITKAPLSAS | | | | |
| | | MVKRYDEHHQDLTLLKALVRQQLPEKYKEIFFDQSKNGYAGYIDGGASQEE | | | | |
| | | FYKFIKPILEKMDGTEELLVKLNREDLLRKQRTFDNGIIPHQIHLGELHAILRRQ | | | | |
| | | GDFYPFLKDNREKIEKILTFRIPYYVGPLARGNSRFAWMTRKSEETITPWNFE | | | | |
| | | EVVDKGASAQSFIERMTNFDKNLPNEKVLPKHSLLYEYFTVYNELTKVKYVTE | | | | |
| | | GMRKPAFLSGEQKKAIVDLLFKTNRKVTVKQLKEDYFKKIECFDSVEISGVED | | | | |
| | | RFNASLGTYHDLLKIIKDKDFLDNEENEDILEDIVLTLTLFEDREMIEERLKTYA | | | | |
| | | HLFDDKVMKQLKRLRYTGWGRLSRKLINGIRDKQSGKTILDFLKSDGFANRN | | | | |
| | | FMQLIHDDSLTFKEDIQKAQVSGQGDSLHEHIANLAGSPAIKKGILQTVKVV | | | | |
| | | DELVKVMGGHKPENIVIEMARENQTTQKGQKNSRERMKRIEEGIKELGSQI | | | | |
| | | LKEHPVENTQLQNEKLYLYYLQNGRDMYVDQELDINRLSDYDVDHIVPQSF | | | | |
| | | LKDDSIDNKVLTRSDKNRGKSDNVPSEEVVKKMKNYWRQLLNAKLITQRKF | | | | |
| | | DNLTKAERGGLSELDKAGFIKRQLVETRQITKHVAQILDSRMNTKYDENDKLI | | | | |
| | | REVKVITLKSKLVSDFRKDFQFYKVREINNYHHAHDAYLNAVVGTALIKKYPK | | | | |
| | | LESEFVYGDYKVYDVRKMIAKSEQEIGKATAKYFFYSNIMNFFKTEITLANGEI | | | | |
| | | RKRPLIETNGETGEIVWDKGRDFATVRKVLSMPQVNIVKKTEVQTGGFSKES | | | | |
| | | ILPKGNSDKLIARKKDWDPKKYGGFNSPTVAYSVLVVAKVEKGKSKKLKSVK | | | | |
| | | ELLGITIMERSSFEKNPIDFLEAKGYKEVKKDLIIKLPKYSLFELENGRKRMLAS | | | | |
| | | AGVLQKGNELALPSKYVNFLYLASHYEKLKGSPEDNEQKQLFVEQHKHYLDE | | | | |
| | | IIEQISEFSKRVILADANLDKVLSAYNKHRDKPIREQAENIIHLFTLTNLGAPAA | | | | |
| | | FKYFDTTINRKQYNTTKEVLDATLIRQSITGLYETRIDLSQLGGD | | | | |
| SpyCas9- | Streptococcus | MDKKYSIGLDIGTNSVGWAVITDEYKVPSKKFKVLGNTDRHSIKKNLIGALLF | 9,027 | N863A | H840A | D10A |
| HF1 | pyogenes | DSGETAEATRLKRTARRRYTRRKNRICYLQEIFSNEMAKVDDSFFHRLEESFL | | | | |
| | | VEEDKKHERHPIFGNIVDEVAYHEKYPTIYHLRKKLVDSTDKADLRLIYLALAH | | | | |
| | | MIKFRGHFLIEGDLNPDNSDVDKLFIQLVQTYNQLFEENPINASGVDAKAILS | | | | |
| | | ARLSKSRRLENLIAQLPGEKKNGLFGNLIALSLGLTPNFKSNFDLAEDAKLQLS | | | | |
| | | KDTYDDDLDNLLAQIGDQYADLFLAAKNLSDAILLSDILRVNTEITKAPLSAS | | | | |
| | | MIKRYDEHHQDLTLLKALVRQQLPEKYKEIFFDQSKNGYAGYIDGGASQEEF | | | | |
| | | YKFIKPILEKMDGTEELLVKLNREDLLRKQRTFDNGSIPHQIHLGELHAILRRQ | | | | |
| | | EDFYPFLKDNREKIEKILTFRIPYYVGPLARGNSRFAWMTRKSEETITPWNFE | | | | |
| | | EVVDKGASAQSFIERMTNFDKNLPNEKVLPKHSLLYEYFTVYNELTKVKYVTE | | | | |
| | | GMRKPAFLSGEQKKAIVDLLFKTNRKVTVKQLKEDYFKKIECFDSVEISGVED | | | | |
| | | RFNASLGTYHDLLKIIKDKDFLDNEENEDILEDIVLTLTLFEDREMIEERLKTYA | | | | |
| | | HLFDDKVMKQLKRRRYTGWGRLSRKLINGIRDKQSGKTILDFLKSDGFANR | | | | |
| | | NFMQLIHDDSLTFKEDIQKAQVSGQGDSLHEHIANLAGSPAIKKGILQTVKV | | | | |
| | | VDELVKVMGRHKPENIVIEMARENQTTQKGQKNSRERMKRIEEGIKELGSQ | | | | |
| | | ILKEHPVENTQLQNEKLYLYYLQNGRDMYVDQELDINRLSDYDVDHIVPQSF | | | | |
| | | LKDDSIDNKVLTRSDKNRGKSDNVPSEEVVKKMKNYWRQLLNAKLITQRKF | | | | |
| | | DNLTKAERGGLSELDKAGFIKRQLVETRQITKHVAQILDSRMNTKYDENDKLI | | | | |
| | | REVKVITLKSKLVSDFRKDFQFYKVREINNYHHAHDAYLNAVVGTALIKKYPK | | | | |
| | | LESEFVYGDYKVYDVRKMIAKSEQEIGKATAKYFFYSNIMNFFKTEITLANGEI | | | | |
| | | RKRPLIETNGETGEIVWDKGRDFATVRKVLSMPQVNIVKKTEVQTGGFSKES | | | | |
| | | ILPKRNSDKLIARKKDWDPKKYGGFDSPTVAYSVLVVAKVEKGKSKKLKSVKE | | | | |
| | | LLGITIMERSSFEKNPIDFLEAKGYKEVKKDLIIKLPKYSLFELENGRKRMLASA | | | | |
| | | GELQKGNELALPSKYVNFLYLASHYEKLKGSPEDNEQKQLFVEQHKHYLDEII | | | | |
| | | EQISEFSKRVILADANLDKVLSAYNKHRDKPIREQAENIIHLFTLTNLGAPAAF | | | | |
| | | KYFDTTIDRKRYTSTKEVLDATLIHQSITGLYETRIDLSQLGGD | | | | |
| SpyCas9- | Streptococcus | MDKKYSIGLDIGTNSVGWAVITDEYKVPSKKFKVLGNTDRHSIKKNLIGALLF | 9,028 | N863A | H840A | D10A |
| QQR1 | pyogenes | DSGETAEATRLKRTARRRYTRRKNRICYLQEIFSNEMAKVDDSFFHRLEESFL | | | | |
| | | VEEDKKHERHPIFGNIVDEVAYHEKYPTIYHLRKKLVDSTDKADLRLIYLALAH | | | | |
| | | MIKFRGHFLIEGDLNPDNSDVDKLFIQLVQTYNQLFEENPINASGVDAKAILS | | | | |
| | | ARLSKSRRLENLIAQLPGEKKNGLFGNLIALSLGLTPNFKSNFDLAEDAKLQLS | | | | |
| | | KDTYDDDLDNLLAQIGDQYADLFLAAKNLSDAILLSDILRVNTEITKAPLSAS | | | | |
| | | MIKRYDEHHQDLTLLKALVRQQLPEKYKEIFFDQSKNGYAGYIDGGASQEEF | | | | |
| | | YKFIKPILEKMDGTEELLVKLNREDLLRKQRTFDNGSIPHQIHLGELHAILRRQ | | | | |
| | | EDFYPFLKDNREKIEKILTFRIPYYVGPLARGNSRFAWMTRKSEETITPWNFE | | | | |
| | | EVVDKGASAQSFIERMTNFDKNLPNEKVLPKHSLLYEYFTVYNELTKVKYVTE | | | | |
| | | GMRKPAFLSGEQKKAIVDLLFKTNRKVTVKQLKEDYFKKIECFDSVEISGVED | | | | |
| | | RFNASLGTYHDLLKIIKDKDFLDNEENEDILEDIVLTLTLFEDREMIEERLKTYA | | | | |
| | | HLFDDKVMKQLKRRRYTGWGRLSRKLINGIRDKQSGKTILDFLKSDGFANR | | | | |
| | | NFMQLIHDDSLTFKEDIQKAQVSGQGDSLHEHIANLAGSPAIKKGILQTVKV | | | | |
| | | VDELVKVMGRHKPENIVIEMARENQTTQKGQKNSRERMKRIEEGIKELGSQ | | | | |
| | | ILKEHPVENTQLQNEKLYLYYLQNGRDMYVDQELDINRLSDYDVDHIVPQSF | | | | |
| | | LKDDSIDNKVLTRSDKNRGKSDNVPSEEVVKKMKNYWRQLLNAKLITQRKF | | | | |
| | | DNLTKAERGGLSELDKAGFIKRQLVETRQITKHVAQILDSRMNTKYDENDKLI | | | | |
| | | REVKVITLKSKLVSDFRKDFQFYKVREINNYHHAHDAYLNAVVGTALIKKYPK | | | | |
| | | LESEFVYGDYKVYDVRKMIAKSEQEIGKATAKYFFYSNIMNFFKTEITLANGEI | | | | |
| | | RKRPLIETNGETGEIVWDKGRDFATVRKVLSMPQVNIVKKTEVQTGGFSKES | | | | |
| | | ILPKRNSDKLIARKKDWDPKKYGGFDSPTVAYSVLVVAKVEKGKSKKLKSVKE | | | | |
| | | LLGITIMERSSFEKNPIDFLEAKGYKEVKKDLIIKLPKYSLFELENGRKRMLASA | | | | |
| | | RELQKGNELALPSKYVNFLYLASHYEKLKGSPEDNEQKQLFVEQHKHYLDEII | | | | |
| | | EQISEFSKRVILADAQLDKVLSAYNKHRDKPIREQAENIIHLFTLTNLGAPAAF | | | | |
| | | KYFDTTFKQKQYRSTKEVLDATLIHQSITGLYETRIDLSQLGGD | | | | |
| SpyCas9- | Streptococcus | MDKKYSIGLDIGTNSVGWAVITDEYKVPSKKFKVLGNTDRHSIKKNLIGALLF | 9,029 | N863A | H840A | D10A |
| QQR1 | pyogenes | DSGETAEATRLKRTARRRYTRRKNRICYLQEIFSNEMAKVDDSFFHRLEESFL | | | | |
| | | VEEDKKHERHPIFGNIVDEVAYHEKYPTIYHLRKKLVDSTDKADLRLIYLALAH | | | | |
| | | MIKFRGHFLIEGDLNPDNSDVDKLFIQLVQTYNQLFEENPINASGVDAKAILS | | | | |
| | | ARLSKSRRLENLIAQLPGEKKNGLFGNLIALSLGLTPNFKSNFDLAEDAKLQLS | | | | |
| | | KDTYDDDLDNLLAQIGDQYADLFLAAKNLSDAILLSDILRVNTEITKAPLSAS | | | | |
| | | MIKRYDEHHQDLTLLKALVRQQLPEKYKEIFFDQSKNGYAGYIDGGASQEEF | | | | |
| | | YKFIKPILEKMDGTEELLVKLNREDLLRKQRTFDNGSIPHQIHLGELHAILRRQ | | | | |
| | | EDFYPFLKDNREKIEKILTFRIPYYVGPLARGNSRFAWMTRKSEETITPWNFE | | | | |
| | | EVVDKGASAQSFIERMTNFDKNLPNEKVLPKHSLLYEYFTVYNELTKVKYVTE | | | | |
| | | GMRKPAFLSGEQKKAIVDLLFKTNRKVTVKQLKEDYFKKIECFDSVEISGVED | | | | |
| | | RFNASLGTYHDLLKIIKDKDFLDNEENEDILEDIVLTLTLFEDREMIEERLKTYA | | | | |
| | | HLFDDKVMKQLKRRRYTGWGRLSRKLINGIRDKQSGKTILDFLKSDGFANR | | | | |
| | | NFMQLIHDDSLTFKEDIQKAQVSGQGDSLHEHIANLAGSPAIKKGILQTVKV | | | | |
| | | VDELVKVMGRHKPENIVIEMARENQTTQKGQKNSRERMKRIEEGIKELGSQ | | | | |
| | | ILKEHPVENTQLQNEKLYLYYLQNGRDMYVDQELDINRLSDYDVDHIVPQSF | | | | |
| | | LKDDSIDNKVLTRSDKNRGKSDNVPSEEVVKKMKNYWRQLLNAKLITQRKF | | | | |
| | | DNLTKAERGGLSELDKAGFIKRQLVETRQITKHVAQILDSRMNTKYDENDKLI | | | | |
| | | REVKVITLKSKLVSDFRKDFQFYKVREINNYHHAHDAYLNAVVGTALIKKYPK | | | | |
| | | LESEFVYGDYKVYDVRKMIAKSEQEIGKATAKYFFYSNIMNFFKTEITLANGEI | | | | |
| | | RKRPLIETNGETGEIVWDKGRDFATVRKVLSMPQVNIVKKTEVQTGGFSKES | | | | |
| | | ILPKRNSDKLIARKKDWDPKKYGGFLWPTVAYSVLVVAKVEKGKSKKLKSVK | | | | |
| | | ELLGITIMERSSFEKNPIDFLEAKGYKEVKKDLIIKLPKYSLFELENGRKRMLAS | | | | |
| | | AKQLQKGNELALPSKYVNFLYLASHYEKLKGSPEDNEQKQLFVEQHKHYLDE | | | | |
| | | IIEQISEFSKRVILADANLDKVLSAYNKHRDKPIREQAENIIHLFTLTNLGAPAA | | | | |
| | | FKYFDTTIDRKQYRSTKEVLDATLIHQSITGLYETRIDLSQLGGD | | | | |
| SpyCas9- | Streptococcus | MDKKYSIGLDIGTNSVGWAVITDEYKVPSKKFKVLGNTDRHSIKKNLIGALLF | 9,030 | N863A | H840A | D10A |
| VQR | pyogenes | DSGETAEATRLKRTARRRYTRRKNRICYLQEIFSNEMAKVDDSFFHRLEESFL | | | | |
| | | VEEDKKHERHPIFGNIVDEVAYHEKYPTIYHLRKKLVDSTDKADLRLIYLALAH | | | | |
| | | MIKFRGHFLIEGDLNPDNSDVDKLFIQLVQTYNQLFEENPINASGVDAKAILS | | | | |
| | | ARLSKSRRLENLIAQLPGEKKNGLFGNLIALSLGLTPNFKSNFDLAEDAKLQLS | | | | |
| | | KDTYDDDLDNLLAQIGDQYADLFLAAKNLSDAILLSDILRVNTEITKAPLSAS | | | | |
| | | MIKRYDEHHQDLTLLKALVRQQLPEKYKEIFFDQSKNGYAGYIDGGASQEEF | | | | |
| | | YKFIKPILEKMDGTEELLVKLNREDLLRKQRTFDNGSIPHQIHLGELHAILRRQ | | | | |
| | | EDFYPFLKDNREKIEKILTFRIPYYVGPLARGNSRFAWMTRKSEETITPWNFE | | | | |
| | | EVVDKGASAQSFIERMTNFDKNLPNEKVLPKHSLLYEYFTVYNELTKVKYVTE | | | | |
| | | GMRKPAFLSGEQKKAIVDLLFKTNRKVTVKQLKEDYFKKIECFDSVEISGVED | | | | |
| | | RFNASLGTYHDLLKIIKDKDFLDNEENEDILEDIVLTLTLFEDREMIEERLKTYA | | | | |
| | | HLFDDKVMKQLKRRRYTGWGRLSRKLINGIRDKQSGKTILDFLKSDGFANR | | | | |
| | | NFMQLIHDDSLTFKEDIQKAQVSGQGDSLHEHIANLAGSPAIKKGILQTVKV | | | | |
| | | VDELVKVMGRHKPENIVIEMARENQTTQKGQKNSRERMKRIEEGIKELGSQ | | | | |
| | | ILKEHPVENTQLQNEKLYLYYLQNGRDMYVDQELDINRLSDYDVDHIVPQSF | | | | |
| | | LKDDSIDNKVLTRSDKNRGKSDNVPSEEVVKKMKNYWRQLLNAKLITQRKF | | | | |
| | | DNLTKAERGGLSELDKAGFIKRQLVETRQITKHVAQILDSRMNTKYDENDKLI | | | | |
| | | REVKVITLKSKLVSDFRKDFQFYKVREINNYHHAHDAYLNAVVGTALIKKYPK | | | | |
| | | LESEFVYGDYKVYDVRKMIAKSEQEIGKATAKYFFYSNIMNFFKTEITLANGEI | | | | |
| | | RKRPLIETNGETGEIVWDKGRDFATVRKVLSMPQVNIVKKTEVQTGGFSKES | | | | |
| | | ILPKRNSDKLIARKKDWDPKKYGGFVSPTVAYSVLVVAKVEKGKSKKLKSVKE | | | | |
| | | LLGITIMERSSFEKNPIDFLEAKGYKEVKKDLIIKLPKYSLFELENGRKRMLASA | | | | |
| | | GELQKGNELALPSKYVNFLYLASHYEKLKGSPEDNEQKQLFVEQHKHYLDEII | | | | |
| | | EQISEFSKRVILADANLDKVLSAYNKHRDKPIREQAENIIHLFTLTNLGAPAAF | | | | |
| | | KYFDTTIDRKQYRSTKEVLDATLIHQSITGLYETRIDLSQLGGD | | | | |
| SpyCas9- | Streptococcus | MDKKYSIGLDIGTNSVGWAVITDEYKVPSKKFKVLGNTDRHSIKKNLIGALLF | 9,031 | N863A | H840A | D10A |
| VRER | pyogenes | DSGETAEATRLKRTARRRYTRRKNRICYLQEIFSNEMAKVDDSFFHRLEESFL | | | | |
| | | VEEDKKHERHPIFGNIVDEVAYHEKYPTIYHLRKKLVDSTDKADLRLIYLALAH | | | | |
| | | MIKFRGHFLIEGDLNPDNSDVDKLFIQLVQTYNQLFEENPINASGVDAKAILS | | | | |
| | | ARLSKSRRLENLIAQLPGEKKNGLFGNLIALSLGLTPNFKSNFDLAEDAKLQLS | | | | |
| | | KDTYDDDLDNLLAQIGDQYADLFLAAKNLSDAILLSDILRVNTEITKAPLSAS | | | | |
| | | MIKRYDEHHQDLTLLKALVRQQLPEKYKEIFFDQSKNGYAGYIDGGASQEEF | | | | |
| | | YKFIKPILEKMDGTEELLVKLNREDLLRKQRTFDNGSIPHQIHLGELHAILRRQ | | | | |
| | | EDFYPFLKDNREKIEKILTFRIPYYVGPLARGNSRFAWMTRKSEETITPWNFE | | | | |
| | | EVVDKGASAQSFIERMTNFDKNLPNEKVLPKHSLLYEYFTVYNELTKVKYVTE | | | | |
| | | GMRKPAFLSGEQKKAIVDLLFKTNRKVTVKQLKEDYFKKIECFDSVEISGVED | | | | |
| | | RFNASLGTYHDLLKIIKDKDFLDNEENEDILEDIVLTLTLFEDREMIEERLKTYA | | | | |
| | | HLFDDKVMKQLKRRRYTGWGRLSRKLINGIRDKQSGKTILDFLKSDGFANR | | | | |
| | | NFMQLIHDDSLTFKEDIQKAQVSGQGDSLHEHIANLAGSPAIKKGILQTVKV | | | | |
| | | VDELVKVMGRHKPENIVIEMARENQTTQKGQKNSRERMKRIEEGIKELGSQ | | | | |
| | | ILKEHPVENTQLQNEKLYLYYLQNGRDMYVDQELDINRLSDYDVDHIVPQSF | | | | |
| | | LKDDSIDNKVLTRSDKNRGKSDNVPSEEVVKKMKNYWRQLLNAKLITQRKF | | | | |
| | | DNLTKAERGGLSELDKAGFIKRQLVETRQITKHVAQILDSRMNTKYDENDKLI | | | | |
| | | REVKVITLKSKLVSDFRKDFQFYKVREINNYHHAHDAYLNAVVGTALIKKYPK | | | | |
| | | LESEFVYGDYKVYDVRKMIAKSEQEIGKATAKYFFYSNIMNFFKTEITLANGEI | | | | |
| | | RKRPLIETNGETGEIVWDKGRDFATVRKVLSMPQVNIVKKTEVQTGGFSKES | | | | |
| | | ILPKRNSDKLIARKKDWDPKKYGGFVSPTVAYSVLVVAKVEKGKSKKLKSVKE | | | | |
| | | LLGITIMERSSFEKNPIDFLEAKGYKEVKKDLIIKLPKYSLFELENGRKRMLASA | | | | |
| | | RELQKGNELALPSKYVNFLYLASHYEKLKGSPEDNEQKQLFVEQHKHYLDEII | | | | |
| | | EQISEFSKRVILADANLDKVLSAYNKHRDKPIREQAENIIHLFTLTNLGAPAAF | | | | |
| | | KYFDTTIDRKEYRSTKEVLDATLIHQSITGLYETRIDLSQLGGD | | | | |
| SpyCas9- | Streptococcus | MDKKYSIGLDIGTNSVGWAVITDEYKVPSKKFKVLGNTDRHSIKKNLIGALLF | 9,032 | N863A | H840A | D10A |
| xCas | pyogenes | DSGETAEATRLKRTARRRYTRRKNRICYLQEIFSNEMAKVDDSFFHRLEESFL | | | | |
| | | VEEDKKHERHPIFGNIVDEVAYHEKYPTIYHLRKKLVDSTDKADLRLIYLALAH | | | | |
| | | MIKFRGHFLIEGDLNPDNSDVDKLFIQLVQTYNQLFEENPINASGVDAKAILS | | | | |
| | | ARLSKSRRLENLIAQLPGEKKNGLFGNLIALSLGLTPNFKSNFDLAEDTKLQLS | | | | |
| | | KDTYDDDLDNLLAQIGDQYADLFLAAKNLSDAILLSDILRVNTEITKAPLSAS | | | | |
| | | MIKLYDEHHQDLTLLKALVRQQLPEKYKEIFFDQSKNGYAGYIDGGASQEEF | | | | |
| | | YKFIKPILEKMDGTEELLVKLNREDLLRKQRTFDNGIIPHQIHLGELHAILRRQE | | | | |
| | | DFYPFLKDNREKIEKILTFRIPYYVGPLARGNSRFAWMTRKSEETITPWNFEK | | | | |
| | | VVDKGASAQSFIERMTNFDKNLPNEKVLPKHSLLYEYFTVYNELTKVKYVTE | | | | |
| | | GMRKPAFLSGDQKKAIVDLLFKTNRKVTVKQLKEDYFKKIECFDSVEISGVED | | | | |
| | | RFNASLGTYHDLLKIIKDKDFLDNEENEDILEDIVLTLTLFEDREMIEERLKTYA | | | | |
| | | HLFDDKVMKQLKRRRYTGWGRLSRKLINGIRDKQSGKTILDFLKSDGFANR | | | | |
| | | NFIQLIHDDSLTFKEDIQKAQVSGQGDSLHEHIANLAGSPAIKKGILQTVKVV | | | | |
| | | DELVKVMGRHKPENIVIEMARENQTTQKGQKNSRERMKRIEEGIKELGSQI | | | | |
| | | LKEHPVENTQLQNEKLYLYYLQNGRDMYVDQELDINRLSDYDVDHIVPQSF | | | | |
| | | LKDDSIDNKVLTRSDKNRGKSDNVPSEEVVKKMKNYWRQLLNAKLITQRKF | | | | |
| | | DNLTKAERGGLSELDKAGFIKRQLVETRQITKHVAQILDSRMNTKYDENDKLI | | | | |
| | | REVKVITLKSKLVSDFRKDFQFYKVREINNYHHAHDAYLNAVVGTALIKKYPK | | | | |
| | | LESEFVYGDYKVYDVRKMIAKSEQEIGKATAKYFFYSNIMNFFKTEITLANGEI | | | | |
| | | RKRPLIETNGETGEIVWDKGRDFATVRKVLSMPQVNIVKKTEVQTGGFSKES | | | | |
| | | ILPKRNSDKLIARKKDWDPKKYGGFDSPTVAYSVLVVAKVEKGKSKKLKSVKE | | | | |
| | | LLGITIMERSSFEKNPIDFLEAKGYKEVKKDLIIKLPKYSLFELENGRKRMLASA | | | | |
| | | GVLQKGNELALPSKYVNFLYLASHYEKLKGSPEDNEQKQLFVEQHKHYLDEII | | | | |
| | | EQISEFSKRVILADANLDKVLSAYNKHRDKPIREQAENIIHLFTLTNLGAPAAF | | | | |
| | | KYFDTTIDRKRYTSTKEVLDATLIHQSITGLYETRIDLSQLGGD | | | | |
| SpyCas9- | Streptococcus | MDKKYSIGLDIGTNSVGWAVITDEYKVPSKKFKVLGNTDRHSIKKNLIGALLF | 9,033 | N863A | H840A | D10A |
| xCas-NG | pyogenes | DSGETAEATRLKRTARRRYTRRKNRICYLQEIFSNEMAKVDDSFFHRLEESFL | | | | |
| | | VEEDKKHERHPIFGNIVDEVAYHEKYPTIYHLRKKLVDSTDKADLRLIYLALAH | | | | |
| | | MIKFRGHFLIEGDLNPDNSDVDKLFIQLVQTYNQLFEENPINASGVDAKAILS | | | | |
| | | ARLSKSRRLENLIAQLPGEKKNGLFGNLIALSLGLTPNFKSNFDLAEDTKLQLS | | | | |
| | | KDTYDDDLDNLLAQIGDQYADLFLAAKNLSDAILLSDILRVNTEITKAPLSAS | | | | |
| | | MIKLYDEHHQDLTLLKALVRQQLPEKYKEIFFDQSKNGYAGYIDGGASQEEF | | | | |
| | | YKFIKPILEKMDGTEELLVKLNREDLLRKQRTFDNGIIPHQIHLGELHAILRRQE | | | | |
| | | DFYPFLKDNREKIEKILTFRIPYYVGPLARGNSRFAWMTRKSEETITPWNFEK | | | | |
| | | VVDKGASAQSFIERMTNFDKNLPNEKVLPKHSLLYEYFTVYNELTKVKYVTE | | | | |
| | | GMRKPAFLSGDQKKAIVDLLFKTNRKVTVKQLKEDYFKKIECFDSVEISGVED | | | | |
| | | RFNASLGTYHDLLKIIKDKDFLDNEENEDILEDIVLTLTLFEDREMIEERLKTYA | | | | |
| | | HLFDDKVMKQLKRRRYTGWGRLSRKLINGIRDKQSGKTILDFLKSDGFANR | | | | |
| | | NFIQLIHDDSLTFKEDIQKAQVSGQGDSLHEHIANLAGSPAIKKGILQTVKVV | | | | |
| | | DELVKVMGRHKPENIVIEMARENQTTQKGQKNSRERMKRIEEGIKELGSQI | | | | |
| | | LKEHPVENTQLQNEKLYLYYLQNGRDMYVDQELDINRLSDYDVDHIVPQSF | | | | |
| | | LKDDSIDNKVLTRSDKNRGKSDNVPSEEVVKKMKNYWRQLLNAKLITQRKF | | | | |
| | | DNLTKAERGGLSELDKAGFIKRQLVETRQITKHVAQILDSRMNTKYDENDKLI | | | | |
| | | REVKVITLKSKLVSDFRKDFQFYKVREINNYHHAHDAYLNAVVGTALIKKYPK | | | | |
| | | LESEFVYGDYKVYDVRKMIAKSEQEIGKATAKYFFYSNIMNFFKTEITLANGEI | | | | |
| | | RKRPLIETNGETGEIVWDKGRDFATVRKVLSMPQVNIVKKTEVQTGGFSKES | | | | |
| | | IRPKRNSDKLIARKKDWDPKKYGGFVSPTVAYSVLVVAKVEKGKSKKLKSVKE | | | | |
| | | LLGITIMERSSFEKNPIDFLEAKGYKEVKKDLIIKLPKYSLFELENGRKRMLASA | | | | |
| | | RFLQKGNELALPSKYVNFLYLASHYEKLKGSPEDNEQKQLFVEQHKHYLDEII | | | | |
| | | EQISEFSKRVILADANLDKVLSAYNKHRDKPIREQAENIIHLFTLTNLGAPRAF | | | | |
| | | KYFDTTIDRKVYRSTKEVLDATLIHQSITGLYETRIDLSQLGGD | | | | |
| St1Cas9- | Streptococcus | MSDLVLGLDIGIGSVGVGILNKVTGEIIHKNSRIFPAAQAENNLVRRTNRQG | 9,034 | N622A | H599A | D9A |
| CNRZ1066 | thermophilus | RRLARRKKHRRVRLNRLFEESGLITDFTKISINLNPYQLRVKGLTDELSNEELFI | | | | |
| | | ALKNMVKHRGISYLDDASDDGNSSVGDYAQIVKENSKQLETKTPGQIQLER | | | | |
| | | YQTYGQLRGDFTVEKDGKKHRLINVFPTSAYRSEALRILQTQQEFNPQITDEF | | | | |
| | | INRYLEILTGKRKYYHGPGNEKSRTDYGRYRTSGETLDNIFGILIGKCTFYPDEF | | | | |
| | | RAAKASYTAQEFNLLNDLNNLTVPTETKKLSKEQKNQIINYVKNEKAMGPAK | | | | |
| | | LFKYIAKLLSCDVADIKGYRIDKSGKAEIHTFEAYRKMKTLETLDIEQMDRETL | | | | |
| | | DKLAYVLTLNTEREGIQEALEHEFADGSFSQKQVDELVQFRKANSSIFGKGW | | | | |
| | | HNFSVKLMMELIPELYETSEEQMTILTRLGKQKTTSSSNKTKYIDEKLLTEEIY | | | | |
| | | NPVVAKSVRQAIKIVNAAIKEYGDFDNIVIEMARETNEDDEKKAIQKIQKAN | | | | |
| | | KDEKDAAMLKAANQYNGKAELPHSVFHGHKQLATKIRLWHQQGERCLYT | | | | |
| | | GKTISIHDLINNSNQFEVDHILPLSITFDDSLANKVLVYATANQEKGQRTPYQ | | | | |
| | | ALDSMDDAWSFRELKAFVRESKTLSNKKKEYLLTEEDISKFDVRKKFIERNLV | | | | |
| | | DTRYASRVVLNALQEHFRAHKIDTKVSVVRGQFTSQLRRHWGIEKTRDTYH | | | | |
| | | HHAVDALIIAASSQLNLWKKQKNTLVSYSEEQLLDIETGELISDDEYKESVFKA | | | | |
| | | PYQHFVDTLKSKEFEDSILFSYQVDSKFNRKISDATIYATRQAKVGKDKKDET | | | | |
| | | YVLGKIKDIYTQDGYDAFMKIYKKDKSKFLMYRHDPQTFEKVIEPILENYPNK | | | | |
| | | QMNEKGKEVPCNPFLKYKEEHGYIRKYSKKGNGPEIKSLKYYDSKLLGNPIDI | | | | |
| | | TPENSKNKVVLQSLKPWRTDVYFNKATGKYEILGLKYADLQFEKGTGTYKIS | | | | |
| | | QEKYNDIKKKEGVDSDSEFKFTLYKNDLLLVKDTETKEQQLFRFLSRTLPKQK | | | | |
| | | HYVELKPYDKQKFEGGEALIKVLGNVANGGQCIKGLAKSNISIYKVRTDVLG | | | | |
| | | NQHIIKNEGDKPKLDF | | | | |
| St1Cas9- | Streptococcus | MSDLVLGLDIGIGSVGVGILNKVTGEIIHKNSRIFPAAQAENNLVRRTNRQG | 9,035 | N622A | H599A | D9A |
| LMG1831 | thermophilus | RRLARRKKHRRVRLNRLFEESGLITDFTKISINLNPYQLRVKGLTDELSNEELFI | | | | |
| | | ALKNMVKHRGISYLDDASDDGNSSVGDYAQIVKENSKQLETKTPGQIQLER | | | | |
| | | YQTYGQLRGDFTVEKDGKKHRLINVFPTSAYRSEALRILQTQQEFNPQITDEF | | | | |
| | | INRYLEILTGKRKYYHGPGNEKSRTDYGRYRTSGETLDNIFGILIGKCTFYPDEF | | | | |
| | | RAAKASYTAQEFNLLNDLNNLTVPTETKKLSKEQKNQIINYVKNEKAMGPAK | | | | |
| | | LFKYIAKLLSCDVADIKGYRIDKSGKAEIHTFEAYRKMKTLETLDIEQMDRETL | | | | |
| | | DKLAYVLTLNTEREGIQEALEHEFADGSFSQKQVDELVQFRKANSSIFGKGW | | | | |
| | | HNFSVKLMMELIPELYETSEEQMTILTRLGKQKTTSSSNKTKYIDEKLLTEEIY | | | | |
| | | NPVVAKSVRQAIKIVNAAIKEYGDFDNIVIEMARETNEDDEKKAIQKIQKAN | | | | |
| | | KDEKDAAMLKAANQYNGKAELPHSVFHGHKQLATKIRLWHQQGERCLYT | | | | |
| | | GKTISIHDLINNSNQFEVDHILPLSITFDDSLANKVLVYATANQEKGQRTPYQ | | | | |
| | | ALDSMDDAWSFRELKAFVRESKTLSNKKKEYLLTEEDISKFDVRKKFIERNLV | | | | |
| | | DTRYASRVVLNALQEHFRAHKIDTKVSVVRGQFTSQLRRHWGIEKTRDTYH | | | | |
| | | HHAVDALIIAASSQLNLWKKQKNTLVSYSEEQLLDIETGELISDDEYKESVFKA | | | | |
| | | PYQHFVDTLKSKEFEDSILFSYQVDSKFNRKISDATIYATRQAKVGKDKKDET | | | | |
| | | YVLGKIKDIYTQDGYDAFMKIYKKDKSKFLMYRHDPQTFEKVIEPILENYPNK | | | | |
| | | QMNEKGKEVPCNPFLKYKEEHGYIRKYSKKGNGPEIKSLKYYDSKLLGNPIDI | | | | |
| | | TPENSKNKVVLQSLKPWRTDVYFNKNTGKYEILGLKYADLQFEKKTGTYKISQ | | | | |
| | | EKYNGIMKEEGVDSDSEFKFTLYKNDLLLVKDTETKEQQLFRFLSRTMPNVK | | | | |
| | | YYVELKPYSKDKFEKNESLIEILGSADKSGRCIKGLGKSNISIYKVRTDVLGNQH | | | | |
| | | IIKNEGDKPKLDF | | | | |
| St1Cas9- | Streptococcus | MSDLVLGLDIGIGSVGVGILNKVTGEIIHKNSRIFPAAQAENNLVRRTNRQG | 9,036 | N622A | H599A | D9A |
| CNRZ1066 | thermophilus | RRLARRKKHRRVRLNRLFEESGLITDFTKISINLNPYQLRVKGLTDELSNEELFI | | | | |
| | | ALKNMVKHRGISYLDDASDDGNSSVGDYAQIVKENSKQLETKTPGQIQLER | | | | |
| | | YQTYGQLRGDFTVEKDGKKHRLINVFPTSAYRSEALRILQTQQEFNPQITDEF | | | | |
| | | INRYLEILTGKRKYYHGPGNEKSRTDYGRYRTSGETLDNIFGILIGKCTFYPDEF | | | | |
| | | RAAKASYTAQEFNLLNDLNNLTVPTETKKLSKEQKNQIINYVKNEKAMGPAK | | | | |
| | | LFKYIAKLLSCDVADIKGYRIDKSGKAEIHTFEAYRKMKTLETLDIEQMDRETL | | | | |
| | | DKLAYVLTLNTEREGIQEALEHEFADGSFSQKQVDELVQFRKANSSIFGKGW | | | | |
| | | HNFSVKLMMELIPELYETSEEQMTILTRLGKQKTTSSSNKTKYIDEKLLTEEIY | | | | |
| | | NPVVAKSVRQAIKIVNAAIKEYGDFDNIVIEMARETNEDDEKKAIQKIQKAN | | | | |
| | | KDEKDAAMLKAANQYNGKAELPHSVFHGHKQLATKIRLWHQQGERCLYT | | | | |
| | | GKTISIHDLINNSNQFEVDHILPLSITFDDSLANKVLVYATANQEKGQRTPYQ | | | | |
| | | ALDSMDDAWSFRELKAFVRESKTLSNKKKEYLLTEEDISKFDVRKKFIERNLV | | | | |
| | | DTRYASRVVLNALQEHFRAHKIDTKVSVVRGQFTSQLRRHWGIEKTRDTYH | | | | |
| | | HHAVDALIIAASSQLNLWKKQKNTLVSYSEDQLLDIETGELISDDEYKESVFK | | | | |
| | | APYQHFVDTLKSKEFEDSILFSYQVDSKFNRKISDATIYATRQAKVGKDKADE | | | | |
| | | TYVLGKIKDIYTQDGYDAFMKIYKKDKSKFLMYRHDPQTFEKVIEPILENYPN | | | | |
| | | KQINEKGKEVPCNPFLKYKEEHGYIRKYSKKGNGPEIKSLKYYDSKLGNHIDIT | | | | |
| | | PKDSNNKVVLQSLKPWRTDVYFNKNTGKYEILGLKYSDMQFEKGTGKYSISK | | | | |
| | | EQYENIKVREGVDENSEFKFTLYKNDLLLLKDSENGEQILLRFTSRNDTSKHYV | | | | |
| | | ELKPYNRQKFEGSEYLIKSLGTVAKGGQCIKGLGKSNISIYKVRTDVLGNQHII | | | | |
| | | KNEGDKPKLDF | | | | |
| St1Cas9- | Streptococcus | MSDLVLGLDIGIGSVGVGILNKVTGEIIHKNSRIFPAAQAENNLVRRTNRQG | 9,037 | N622A | H599A | D9A |
| TH1477 | thermophilus | RRLARRKKHRRVRLNRLFEESGLITDFTKISINLNPYQLRVKGLTDELSNEELFI | | | | |
| | | ALKNMVKHRGISYLDDASDDGNSSVGDYAQIVKENSKQLETKTPGQIQLER | | | | |
| | | YQTYGQLRGDFTVEKDGKKHRLINVFPTSAYRSEALRILQTQQEFNPQITDEF | | | | |
| | | INRYLEILTGKRKYYHGPGNEKSRTDYGRYRTSGETLDNIFGILIGKCTFYPDEF | | | | |
| | | RAAKASYTAQEFNLLNDLNNLTVPTETKKLSKEQKNQIINYVKNEKAMGPAK | | | | |
| | | LFKYIAKLLSCDVADIKGYRIDKSGKAEIHTFEAYRKMKTLETLDIEQMDRETL | | | | |
| | | DKLAYVLTLNTEREGIQEALEHEFADGSFSQKQVDELVQFRKANSSIFGKGW | | | | |
| | | HNFSVKLMMELIPELYETSEEQMTILTRLGKQKTTSSSNKTKYIDEKLLTEEIY | | | | |
| | | NPVVAKSVRQAIKIVNAAIKEYGDFDNIVIEMARETNEDDEKKAIQKIQKAN | | | | |
| | | KDEKDAAMLKAANQYNGKAELPHSVFHGHKQLATKIRLWHQQGERCLYT | | | | |
| | | GKTISIHDLINNSNQFEVDHILPLSITFDDSLANKVLVYATANQEKGQRTPYQ | | | | |
| | | ALDSMDDAWSFRELKAFVRESKTLSNKKKEYLLTEEDISKFDVRKKFIERNLV | | | | |
| | | DTRYASRVVLNALQEHFRAHKIDTKVSVVRGQFTSQLRRHWGIEKTRDTYH | | | | |
| | | HHAVDALIIAASSQLNLWKKQKNTLVSYSEDQLLDIETGELISDDEYKESVFK | | | | |
| | | APYQHFVDTLKSKEFEDSILFSYQVDSKFNRKISDATIYATRQAKVGKDKADE | | | | |
| | | TYVLGKIKDIYTQDGYDAFMKIYKKDKSKFLMYRHDPQTFEKVIEPILENYPN | | | | |
| | | KQINEKGKEVPCNPFLKYKEEHGYIRKYSKKGNGPEIKSLKYYDSKLGNHIDIT | | | | |
| | | PKDSNNKVVLQSLKPWRTDVYFNKNTGKYEILGLKYSDMQFEKGTGKYSISK | | | | |
| | | EQYENIKVREGVDENSEFKFTLYKNDLLLLKDSENGEQILLRFTSRNDTSKHYV | | | | |
| | | ELKPYNRQKFEGSEYLIKSLGTVVKGGRCIKGLGKSNISIYKVRTDVLGNQHIIK | | | | |
| | | NEGDKPKLDF | | | | |
| sRGN3.1 | Staphylococcus | MNQKFILGLDIGITSVGYGLIDYETKNIIDAGVRLFPEANVENNEGRRSKRGS | 9,038 | N585A | H562A | D10A |
| | spp. | RRLKRRRIHRLERVKLLLTEYDLINKEQIPTSNNPYQIRVKGLSEILSKDELAIAL | | | | |
| | | LHLAKRRGIHNVDVAADKEETASDSLSTKDQINKNAKFLESRYVCELQKERLE | | | | |
| | | NEGHVRGVENRFLTKDIVREAKKIIDTQMQYYPEIDETFKEKYISLVETRREYF | | | | |
| | | EGPGQGSPFGWNGDLKKWYEMLMGHCTYFPQELRSVKYAYSADLFNALN | | | | |
| | | DLNNLIIQRDNSEKLEYHEKYHIIENVFKQKKKPTLKQIAKEIGVNPEDIKGYRI | | | | |
| | | TKSGTPEFTSFKLFHDLKKVVKDHAILDDIDLLNQIAEILTIYQDKDSIVAELGQ | | | | |
| | | LEYLMSEADKQSISELTGYTGTHSLSLKCMNMIIDELWHSSMNQMEVFTYL | | | | |
| | | NMRPKKYELKGYQRIPTDMIDDAILSPVVKRTFIQSINVINKVIEKYGIPEDIIIE | | | | |
| | | LARENNSDDRKKFINNLQKKNEATRKRINEIIGQTGNQNAKRIVEKIRLHDQ | | | | |
| | | QEGKCLYSLESIPLEDLLNNPNHYEVDHIIPRSVSFDNSYHNKVLVKQSENSK | | | | |
| | | KSNLTPYQYFNSGKSKLSYNQFKQHILNLSKSQDRISKKKKEYLLEERDINKFE | | | | |
| | | VQKEFINRNLVDTRYATRELTNYLKAYFSANNMNVKVKTINGSFTDYLRKV | | | | |
| | | WKFKKERNHGYKHHAEDALIIANADFLFKENKKLKAVNSVLEKPEIETKQLDI | | | | |
| | | QVDSEDNYSEMFIIPKQVQDIKDFRNFKYSHRVDKKPNRQLINDTLYSTRKK | | | | |
| | | DNSTYIVQTIKDIYAKDNTTLKKQFDKSPEKFLMYQHDPRTFEKLEVIMKQYA | | | | |
| | | NEKNPLAKYHEETGEYLTKYSKKNNGPIVKSLKYIGNKLGSHLDVTHQFKSST | | | | |
| | | KKLVKLSIKNYRFDVYLTEKGYKFVTIAYLNVFKKDNYYYIPKDKYQELKEKKKI | | | | |
| | | KDTDQFIASFYKNDLIKLNGDLYKIIGVNSDDRNIIELDYYDIKYKDYCEINNIK | | | | |
| | | GEPRIKKTIGKKTESIEKFTTDVLGNLYLHSTEKAPQLIFKRGL | | | | |
| sRGN3.3 | Staphylococcus | MNQKFILGLDIGITSVGYGLIDYETKNIIDAGVRLFPEANVENNEGRRSKRGS | 9,039 | N585A | H562A | D10A |
| | spp. | RRLKRRRIHRLERVKLLLTEYDLINKEQIPTSNNPYQIRVKGLSEILSKDELAIAL | | | | |
| | | LHLAKRRGIHNVDVAADKEETASDSLSTKDQINKNAKFLESRYVCELQKERLE | | | | |
| | | NEGHVRGVENRFLTKDIVREAKKIIDTQMQYYPEIDETFKEKYISLVETRREYF | | | | |
| | | EGPGQGSPFGWNGDLKKWYEMLMGHCTYFPQELRSVKYAYSADLFNALN | | | | |
| | | DLNNLIIQRDNSEKLEYHEKYHIIENVFKQKKKPTLKQIAKEIGVNPEDIKGYRI | | | | |
| | | TKSGTPEFTSFKLFHDLKKVVKDHAILDDIDLLNQIAEILTIYQDKDSIVAELGQ | | | | |
| | | LEYLMSEADKQSISELTGYTGTHSLSLKCMNMIIDELWHSSMNQMEVFTYL | | | | |
| | | NMRPKKYELKGYQRIPTDMIDDAILSPVVKRTFIQSINVINKVIEKYGIPEDIIIE | | | | |
| | | LARENNSDDRKKFINNLQKKNEATRKRINEIIGQTGNQNAKRIVEKIRLHDQ | | | | |
| | | QEGKCLYSLESIPLEDLLNNPNHYEVDHIIPRSVSFDNSYHNKVLVKQSENSK | | | | |
| | | KSNLTPYQYFNSGKSKLSYNQFKQHILNLSKSQDRISKKKKEYLLEERDINKFE | | | | |
| | | VQKEFINRNLVDTRYATRELTSYLKAYFSANNMDVKVKTINGSFTNHLRKV | | | | |
| | | WRFDKYRNHGYKHHAEDALIIANADFLFKENKKLQNTNKILEKPTIENNTKK | | | | |
| | | VTVEKEEDYNNVFETPKLVEDIKQYRDYKFSHRVDKKPNRQLINDTLYSTRM | | | | |
| | | KDEHDYIVQTITDIYGKDNTNLKKQFNKNPEKFLMYQNDPKTFEKLSIIMKQ | | | | |
| | | YSDEKNPLAKYYEETGEYLTKYSKKNNGPIVKKIKLLGNKVGNHLDVTNKYEN | | | | |
| | | STKKLVKLSIKNYRFDVYLTEKGYKFVTIAYLNVFKKDNYYYIPKDKYQELKEKK | | | | |
| | | KIKDTDQFIASFYKNDLIKLNGDLYKIIGVNSDDRNIIELDYYDIKYKDYCEINNI | | | | |
| | | KGEPRIKKTIGKKTESIEKFTTDVLGNLYLHSTEKAPQLIFKRGL | | | | |

[0426] In some embodiments, a Cas protein requires a protospacer adjacent motif (PAM) to be present in or adjacent to a target DNA sequence for the Cas protein to bind and/or function. In some embodiments, the PAM is or comprises, from 5′ to 3′, NGG, YG, NNGRRT, NNNRRT, NGA, TYCV, TATV, NTTN, or NNNGATT, where N stands for any nucleotide, Y stands for C or T, R stands for A or G, and V stands for A or C or G. In some embodiments, a Cas protein is a protein listed in Table 7 or 8. In some embodiments, a Cas protein comprises one or more mutations altering its PAM. In some embodiments, a Cas protein comprises E1369R, E1449H, and R1556A mutations or analogous substitutions to the amino acids corresponding to said positions. In some embodiments, a Cas protein comprises E782K, N968K, and R1015H mutations or analogous substitutions to the amino acids corresponding to said positions. In some embodiments, a Cas protein comprises D1135V, R1335Q, and T1337R mutations or analogous substitutions to the amino acids corresponding to said positions. In some embodiments, a Cas protein comprises S542R and K607R mutations or analogous substitutions to the amino acids corresponding to said positions. In some embodiments, a Cas protein comprises S542R, K548V, and N552R mutations or analogous substitutions to the amino acids corresponding to said positions. Exemplary advances in the engineering of Cas enzymes to recognize altered PAM sequences are reviewed in Collias et al Nature Communications 12:555 (2021), incorporated herein by reference in its entirety.

[0427] In some embodiments, the Cas protein is catalytically active and cuts one or both strands of the target DNA site. In some embodiments, cutting the target DNA site is followed by formation of an alteration, e.g., an insertion or deletion, e.g., by the cellular repair machinery.

[0428] In some embodiments, the Cas protein is modified to deactivate or partially deactivate the nuclease, e.g., nuclease-deficient Cas9. Whereas wild-type Cas9 generates double-strand breaks (DSBs) at specific DNA sequences targeted by a gRNA, a number of CRISPR endonucleases having modified functionalities are available, for example: a “nickase” version of Cas9 that has been partially deactivated generates only a single-strand break; a catalytically inactive Cas9 (“dCas9”) does not cut target DNA. In some embodiments, dCas9 binding to a DNA sequence may interfere with transcription at that site by steric hindrance. In some embodiments, dCas9 binding to an anchor sequence may interfere with (e.g., decrease or prevent) genomic complex (e.g., ASMC) formation and/or maintenance. In some embodiments, a DNA-binding domain comprises a catalytically inactive Cas9, e.g., dCas9. Many catalytically inactive Cas9 proteins are known in the art. In some embodiments, dCas9 comprises mutations in each endonuclease domain of the Cas protein, e.g., D10A and H840A or N863A mutations. In some embodiments, a catalytically inactive or partially inactive CRISPR/Cas domain comprises a Cas protein comprising one or more mutations, e.g., one or more of the mutations listed in Table 7. In some embodiments, a Cas protein described on a given row of Table 7 comprises one, two, three, or all of the mutations listed in the same row of Table 7. In some embodiments, a Cas protein, e.g., not described in Table 7, comprises one, two, three, or all of the mutations listed in a row of Table 7 or a corresponding mutation at a corresponding site in that Cas protein.

[0429] In some embodiments, a catalytically inactive, e.g., dCas9, or partially deactivated Cas9 protein comprises a D11 mutation (e.g., D11A mutation) or an analogous substitution to the amino acid corresponding to said position. In some embodiments, a catalytically inactive Cas9 protein, e.g., dCas9, or partially deactivated Cas9 protein comprises a H969 mutation (e.g., H969A mutation) or an analogous substitution to the amino acid corresponding to said position. In some embodiments, a catalytically inactive Cas9 protein, e.g., dCas9, or partially deactivated Cas9 protein comprises a N995 mutation (e.g., N995A mutation) or an analogous substitution to the amino acid corresponding to said position. In some embodiments, a catalytically inactive Cas9 protein, e.g., dCas9, comprises mutations at one, two, or three of positions D11, H969, and N995 (e.g., D11A, H969A, and N995A mutations) or analogous substitutions to the amino acids corresponding to said positions.

[0430] In some embodiments, a catalytically inactive Cas9 protein, e.g., dCas9, or partially deactivated Cas9 protein comprises a D10 mutation (e.g., a D10A mutation) or an analogous substitution to the amino acid corresponding to said position. In some embodiments, a catalytically inactive Cas9 protein, e.g., dCas9, or partially deactivated Cas9 protein comprises a H557 mutation (e.g., a H557A mutation) or an analogous substitution to the amino acid corresponding to said position. In some embodiments, a catalytically inactive Cas9 protein, e.g., dCas9, comprises a D10 mutation (e.g., a D10A mutation) and a H557 mutation (e.g., a H557A mutation) or analogous substitutions to the amino acids corresponding to said positions.

[0431] In some embodiments, a catalytically inactive Cas9 protein, e.g., dCas9, or partially deactivated Cas9 protein comprises a D839 mutation (e.g., a D839A mutation) or an analogous substitution to the amino acid corresponding to said position. In some embodiments, a catalytically inactive Cas9 protein, e.g., dCas9, or partially deactivated Cas9 protein comprises a H840 mutation (e.g., a H840A mutation) or an analogous substitution to the amino acid corresponding to said position. In some embodiments, a catalytically inactive Cas9 protein, e.g., dCas9, or partially deactivated Cas9 protein comprises a N863 mutation (e.g., a N863A mutation) or an analogous substitution to the amino acid corresponding to said position. In some embodiments, a catalytically inactive Cas9 protein, e.g., dCas9, comprises a D10 mutation (e.g., D10A), a D839 mutation (e.g., D839A), a H840 mutation (e.g., H840A), and a N863 mutation (e.g., N863A) or analogous substitutions to the amino acids corresponding to said positions.

[0432] In some embodiments, a catalytically inactive Cas9 protein, e.g., dCas9, or partially deactivated Cas9 protein comprises a E993 mutation (e.g., a E993A mutation) or an analogous substitution to the amino acid corresponding to said position.

[0433] In some embodiments, a catalytically inactive Cas9 protein, e.g., dCas9, or partially deactivated Cas9 protein comprises a D917 mutation (e.g., a D917A mutation) or an analogous substitution to the amino acid corresponding to said position. In some embodiments, a catalytically inactive Cas9 protein, e.g., dCas9, or partially deactivated Cas9 protein comprises a a E1006 mutation (e.g., a E1006A mutation) or an analogous substitution to the amino acid corresponding to said position. In some embodiments, a catalytically inactive Cas9 protein, e.g., dCas9, or partially deactivated Cas9 protein comprises a D1255 mutation (e.g., a D1255A mutation) or an analogous substitution to the amino acid corresponding to said position. In some embodiments, a catalytically inactive Cas9 protein, e.g., dCas9, comprises a D917 mutation (e.g., D917A), a E1006 mutation (e.g., E1006A), and a D1255 mutation (e.g., D1255A) or analogous substitutions to the amino acids corresponding to said positions.

[0434] In some embodiments, a catalytically inactive Cas9 protein, e.g., dCas9, or partially deactivated Cas9 protein comprises a D16 mutation (e.g., a D16A mutation) or an analogous substitution to the amino acid corresponding to said position. In some embodiments, a catalytically inactive Cas9 protein, e.g., dCas9, or partially deactivated Cas9 protein comprises a D587 mutation (e.g., a D587A mutation) or an analogous substitution to the amino acid corresponding to said position. In some embodiments, a partially deactivated Cas domain has nickase activity. In some embodiments, a partially deactivated Cas9 domain is a Cas9 nickase domain. In some embodiments, the catalytically inactive Cas domain or dead Cas domain produces no detectable double strand break formation. In some embodiments, a catalytically inactive Cas9 protein, e.g., dCas9, or partially deactivated Cas9 protein comprises a H588 mutation (e.g., a H588A mutation) or an analogous substitution to the amino acid corresponding to said position. In some embodiments, a catalytically inactive Cas9 protein, e.g., dCas9, or partially deactivated Cas9 protein comprises a N611 mutation (e.g., a N611A mutation) or an analogous substitution to the amino acid corresponding to said position. In some embodiments, a catalytically inactive Cas9 protein, e.g., dCas9, comprises a D16 mutation (e.g., D16A), a D587 mutation (e.g., D587A), a H588 mutation (e.g., H588A), and a N611 mutation (e.g., N611A) or analogous substitutions to the amino acids corresponding to said positions.

[0435] In some embodiments, a DNA-binding domain or endonuclease domain may comprise a Cas molecule comprising or linked (e.g., covalently) to a gRNA (e.g., a template nucleic acid, e.g., template RNA, comprising a gRNA).

[0436] In some embodiments, an endonuclease domain or DNA binding domain comprises a Streptococcus pyogenes Cas9 (SpCas9) or a functional fragment or variant thereof. In some embodiments, the endonuclease domain or DNA binding domain comprises a modified SpCas9. In embodiments, the modified SpCas9 comprises a modification that alters protospacer-adjacent motif (PAM) specificity. In embodiments, the PAM has specificity for the nucleic acid sequence 5′-NGT-3′. In embodiments, the modified SpCas9 comprises one or more amino acid substitutions, e.g., at one or more of positions L1111, D1135, G1218, E1219, A1322, of R1335, e.g., selected from L1111R, D1135V, G1218R, E1219F, A1322R, R1335V. In embodiments, the modified SpCas9 comprises the amino acid substitution T1337R and one or more additional amino acid substitutions, e.g., selected from L1111, D1135L, S1136R, G1218S, E1219V, D1332A, D1332S, D1332T, D1332V, D1332L, D1332K, D1332R, R1335Q, T1337, T1337L, T1337Q, T1337I, T1337V, T1337F, T1337S, T1337N, T1337K, T1337H, T1337Q, and T1337M, or corresponding amino acid substitutions thereto. In embodiments, the modified SpCas9 comprises: (i) one or more amino acid substitutions selected from D1135L, S1136R, G1218S, E1219V, A1322R, R1335Q, and T1337; and (ii) one or more amino acid substitutions selected from L1111R, G1218R, E1219F, D1332A, D1332S, D1332T, D1332V, D1332L, D1332K, D1332R, T1337L, T1337I, T1337V, T1337F, T1337S, T1337N, T1337K, T1337R, T1337H, T1337Q, and T1337M, or corresponding amino acid substitutions thereto.

[0437] In some embodiments, the endonuclease domain or DNA binding domain comprises a Cas domain, e.g., a Cas9 domain. In embodiments, the endonuclease domain or DNA binding domain comprises a nuclease-active Cas domain, a Cas nickase (nCas) domain, or a nuclease-inactive Cas (dCas) domain. In embodiments, the endonuclease domain or DNA binding domain comprises a nuclease-active Cas9 domain, a Cas9 nickase (nCas9) domain, or a nuclease-inactive Cas9 (dCas9) domain. In some embodiments, the endonuclease domain or DNA binding domain comprises a Cas9 domain of Cas9 (e.g., dCas9 and nCas9), Cas12a/Cpf1, Cas12b/C2c1, Cas12c/C2c3, Cas12d/CasY, Cas12e/CasX, Cas12g, Cas12h, or Cas12i. In some embodiments, the endonuclease domain or DNA binding domain comprises a Cas9 (e.g., dCas9 and nCas9), Cas12a/Cpf1, Cas12b/C2c1, Cas12c/C2c3, Cas12d/CasY, Cas12e/CasX, Cas12g, Cas12h, or Cas12i. In some embodiments, the endonuclease domain or DNA binding domain comprises an S. pyogenes or an S. thermophilus Cas9, or a functional fragment thereof. In some embodiments, the endonuclease domain or DNA binding domain comprises a Cas9 sequence, e.g., as described in Chylinski, Rhun, and Charpentier (2013) RNA Biology 10:5, 726-737; incorporated herein by reference. In some embodiments, the endonuclease domain or DNA binding domain comprises the HNH nuclease subdomain and/or the RuvCI subdomain of a Cas, e.g., Cas9, e.g., as described herein, or a variant thereof. In some embodiments, the endonuclease domain or DNA binding domain comprises Cas12a/Cpf1, Cas12b/C2c1, Cas12c/C2c3, Cas12d/CasY, Cas12e/CasX, Cas12g, Cas12h, or Cas12i. In some embodiments, the endonuclease domain or DNA binding domain comprises a Cas polypeptide (e.g., enzyme), or a functional fragment thereof. In embodiments, the Cas polypeptide (e.g., enzyme) is selected from Cas1, Cas1B, Cas2, Cas3, Cas4, Cas5, Cas5d, Cast, Cas5h, Casa, Cas6, Cas7, Cas8, Cas8a, Cas8b, Cas8c, Cas9 (e.g., Csn1 or Csx12), Cas10, Cas10d, Cas12a/Cpf1, Cas12b/C2c1, Cas12c/C2c3, Cas12d/CasY, Cas12e/CasX, Cas12g, Cas12h, Cas12i, Csy1, Csy2, Csy3, Csy4, Cse1, Cse2, Cse3, Cse4, Cse5e, Csc1, Csc2, Csa5, Csn1, Csn2, Csm1, Csm2, Csm3, Csm4, Csm5, Csm6, Cmr1, Cmr3, Cmr4, Cmr5, Cmr6, Csb1, Csb2, Csb3, Csx17, Csx14, Csx10, Csx16, CsaX, Csx3, Csx1, Csx1S, Csx11, Csf1, Csf2, CsO, Csf4, Csd1, Csd2, Cst1, Cst2, Csh1, Csh2, Csa1, Csa2, Csa3, Csa4, Csa5, Type II Cas effector proteins, Type V Cas effector proteins, Type VI Cas effector proteins, CARF, DinG, Cpf1, Cas12b/C2c1, Cas12c/C2c3, Cas12b/C2c1, Cas12c/C2c3, SpCas9(K855A), eSpCas9(1.1), SpCas9-HF1, hyper accurate Cas9 variant (HypaCas9), homologues thereof, modified or engineered versions thereof, and/or functional fragments thereof. In embodiments, the Cas9 comprises one or more substitutions, e.g., selected from H840A, D10A, P475A, W476A, N477A, D1125A, W1126A, and D1127A. In embodiments, the Cas9 comprises one or more mutations at positions selected from: D10, G12, G17, E762, H840, N854, N863, H982, H983, A984, D986, and/or A987, e.g., one or more substitutions selected from D10A, G12A, G17A, E762A, H840A, N854A, N863A, H982A, H983A, A984A, and/or D986A. In some embodiments, the endonuclease domain or DNA binding domain comprises a Cas (e.g., Cas9) sequence from Corynebacterium ulcerans, Corynebacterium diphtheria, Spiroplasma syrphidicola, Prevotella intermedia, Spiroplasma taiwanense, Streptococcus iniae, Belliella baltica, Psychroflexus torquis, Streptococcus thermophilus, Listeria innocua, Campylobacter jejuni, Neisseria meningitidis, Streptococcus pyogenes, or Staphylococcus aureus, or a fragment or variant thereof.

[0438] In some embodiments, the endonuclease domain or DNA binding domain comprises a Cpf1 domain, e.g., comprising one or more substitutions, e.g., at position D917, E1006A, D1255 or any combination thereof, e.g., selected from D917A, E1006A, D1255A, D917A/E1006A, D917A/D1255A, E1006A/D1255A, and D917A/E1006A/D1255A.

[0439] In some embodiments, the endonuclease domain or DNA binding domain comprises spCas9, spCas9-VRQR, spCas9-VRER, xCas9 (sp), saCas9, saCas9-KKH, spCas9-MQKSER, spCas9-LRKIQK, or spCas9-LRVSQL.

[0440] In some embodiments, a gene modifying polypeptide has an endonuclease domain comprising a Cas9 nickase, e.g., Cas9 H840A. In embodiments, the Cas9 H840A has the following amino acid sequence:

Cas9 nickase (H840A):
(SEQ ID NO: 11,001)
DKKYSIGLDIGTNSVGWAVITDEYKVPSKKFKVLGNTDRHSIKKNLIGA
LLFDSGETAEATRLKRTARRRYTRRKNRICYLQEIFSNEMAKVDDSFFH
RLEESFLVEEDKKHERHPIFGNIVDEVAYHEKYPTIYHLRKKLVDSTDK
ADLRLIYLALAHMIKFRGHFLIEGDLNPDNSDVDKLFIQLVQTYNQLFE
ENPINASGVDAKAILSARLSKSRRLENLIAQLPGEKKNGLFGNLIALSL
GLTPNFKSNFDLAEDAKLQLSKDTYDDDLDNLLAQIGDQYADLFLAAKN
LSDAILLSDILRVNTEITKAPLSASMIKRYDEHHQDLTLLKALVRQQLP
EKYKEIFFDQSKNGYAGYIDGGASQEEFYKFIKPILEKMDGTEELLVKL
NREDLLRKQRTFDNGSIPHQIHLGELHAILRRQEDFYPFLKDNREKIEK
ILTFRIPYYVGPLARGNSRFAWMTRKSEETITPWNFEEVVDKGASAQSF
IERMTNFDKNLPNEKVLPKHSLLYEYFTVYNELTKVKYVTEGMRKPAFL
SGEQKKAIVDLLFKTNRKVTVKQLKEDYFKKIECFDSVEISGVEDRFNA
SLGTYHDLLKIIKDKDFLDNEENEDILEDIVLTLTLFEDREMIEERLKT
YAHLFDDKVMKQLKRRRYTGWGRLSRKLINGIRDKQSGKTILDFLKSDG
FANRNFMQLIHDDSLTFKEDIQKAQVSGQGDSLHEHIANLAGSPAIKKG
ILQTVKVVDELVKVMGRHKPENIVIEMARENQTTQKGQKNSRERMKRIE
EGIKELGSQILKEHPVENTQLQNEKLYLYYLQNGRDMYVDQELDINRLS
DYDVDAIVPQSFLKDDSIDNKVLTRSDKNRGKSDNVPSEEVVKKMKNYW
RQLLNAKLITQRKFDNLTKAERGGLSELDKAGFIKRQLVETRQITKHVA
QILDSRMNTKYDENDKLIREVKVITLKSKLVSDFRKDFQFYKVREINNY
HHAHDAYLNAVVGTALIKKYPKLESEFVYGDYKVYDVRKMIAKSEQEIG
KATAKYFFYSNIMNFFKTEITLANGEIRKRPLIETNGETGEIVWDKGRD
FATVRKVLSMPQVNIVKKTEVQTGGFSKESILPKRNSDKLIARKKDWDP
KKYGGFDSPTVAYSVLVVAKVEKGKSKKLKSVKELLGITIMERSSFEKN
PIDFLEAKGYKEVKKDLIIKLPKYSLFELENGRKRMLASAGELQKGNEL
ALPSKYVNFLYLASHYEKLKGSPEDNEQKQLFVEQHKHYLDEIIEQISE
FSKRVILADANLDKVLSAYNKHRDKPIREQAENIIHLFTLTNLGAPAAF
KYFDTTIDRKRYTSTKEVLDATLIHQSITGLYETRIDLSQLGGD

[0441] In some embodiments, a gene modifying polypeptide comprises a dCas9 sequence comprising a D10A and/or H840A mutation, e.g., the following sequence:

(SEQ ID NO: 5007)
SMDKKYSIGLAIGTNSVGWAVITDDYKVPSKKFKVLGNTDRHSIKKNLI
GALLFDSGETAEATRLKRTARRRYTRRKNRICYLQEIFSNEMAKVDDSF
FHRLEESFLVEEDKKHERHPIFGNIVDEVAYHEKYPTIYHLRKKLVDST
DKADLRLIYLALAHMIKFRGHFLIEGDLNPDNSDVDKLFIQLVQTYNQL
FEENPINASGVDAKAILSARLSKSRRLENLIAQLPGEKKNGLFGNLIAL
SLGLTPNFKSNFDLAEDAKLQLSKDTYDDDLDNLLAQIGDQYADLFLAA
KNLSDAILLSDILRVNTEITKAPLSASMIKRYDEHHQDLTLLKALVRQQ
LPEKYKEIFFDQSKNGYAGYIDGGASQEEFYKFIKPILEKMDGTEELLV
KLNREDLLRKQRTFDNGSIPHQIHLGELHAILRRQEDFYPFLKDNREKI
EKILTFRIPYYVGPLARGNSRFAWMTRKSEETITPWNFEEVVDKGASAQ
SFIERMTNFDKNLPNEKVLPKHSLLYEYFTVYNELTKVKYVTEGMRKPA
FLSGEQKKAIVDLLFKTNRKVTVKQLKEDYFKKIECFDSVEISGVEDRF
NASLGTYHDLLKIIKDKDFLDNEENEDILEDIVLTLTLFEDREMIEERL
KTYAHLFDDKVMKQLKRRRYTGWGRLSRKLINGIRDKQSGKTILDFLKS
DGFANRNFMQLIHDDSLTFKEDIQKAQVSGQGDSLHEHIANLAGSPAIK
KGILQTVKVVDELVKVMGRHKPENIVIEMARENQTTQKGQKNSRERMKR
IEEGIKELGSQILKEHPVENTQLQNEKLYLYYLQNGRDMYVDQELDINR
LSDYDVDAIVPQSFLKDDSIDNKVLTRSDKNRGKSDNVPSEEVVKKMKN
YWRQLLNAKLITQRKFDNLTKAERGGLSELDKAGFIKRQLVETRQITKH
VAQILDSRMNTKYDENDKLIREVKVITLKSKLVSDFRKDFQFYKVREIN
NYHHAHDAYLNAVVGTALIKKYPKLESEFVYGDYKVYDVRKMIAKSEQE
IGKATAKYFFYSNIMNFFKTEITLANGEIRKRPLIETNGETGEIVWDKG
RDFATVRKVLSMPQVNIVKKTEVQTGGFSKESILPKRNSDKLIARKKDW
DPKKYGGFDSPTVAYSVLVVAKVEKGKSKKLKSVKELLGITIMERSSFE
KNPIDFLEAKGYKEVKKDLIIKLPKYSLFELENGRKRMLASAGELQKGN
ELALPSKYVNFLYLASHYEKLKGSPEDNEQKQLFVEQHKHYLDEIIEQI
SEFSKRVILADANLDKVLSAYNKHRDKPIREQAENIIHLFTLTNLGAPA
AFKYFDTTIDRKRYTSTKEVLDATLIHQSITGLYETRIDLSQLGGD

### TAL Effectors and Zinc Finger Nucleases

[0442] In some embodiments, an endonuclease domain or DNA-binding domain comprises a TAL effector molecule. A TAL effector molecule, e.g., a TAL effector molecule that specifically binds a DNA sequence, typically comprises a plurality of TAL effector domains or fragments thereof, and optionally one or more additional portions of naturally occurring TAL effectors (e.g., N- and/or C-terminal of the plurality of TAL effector domains). Many TAL effectors are known to those of skill in the art and are commercially available, e.g., from Thermo Fisher Scientific.

[0443] Naturally occurring TALEs are natural effector proteins secreted by numerous species of bacterial pathogens including the plant pathogen Xanthomonas which modulates gene expression in host plants and facilitates bacterial colonization and survival. The specific binding of TAL effectors is based on a central repeat domain of tandemly arranged nearly identical repeats of typically 33 or 34 amino acids (the repeat-variable di-residues, RVD domain).

[0444] Members of the TAL effectors family differ mainly in the number and order of their repeats. The number of repeats typically ranges from 1.5 to 33.5 repeats and the C-terminal repeat is usually shorter in length (e.g., about 20 amino acids) and is generally referred to as a “half-repeat.” Each repeat of the TAL effector generally features a one-repeat-to-one-base-pair correlation with different repeat types exhibiting different base-pair specificity (one repeat recognizes one base-pair on the target gene sequence). Generally, the smaller the number of repeats, the weaker the protein-DNA interactions. A number of 6.5 repeats has been shown to be sufficient to activate transcription of a reporter gene (Scholze et al., 2010).

[0445] Repeat to repeat variations occur predominantly at amino acid positions 12 and 13, which have therefore been termed “hypervariable” and which are responsible for the specificity of the interaction with the target DNA promoter sequence, as shown in Table 9 listing exemplary repeat variable diresidues (RVD) and their correspondence to nucleic acid base targets.

TABLE 9
RVDs and Nucleic Acid Base Specificity

| Target | Possible RVD Amino Acid Combinations | | | | | | | | | | | | |
|---|---|---|---|---|---|---|---|---|---|---|---|---|---|
| A | NI | NN | CI | HI | KI | | | | | | | | |
| G | NN | GN | SN | VN | LN | DN | QN | EN | HN | RH | NK | AN | FN |
| C | HD | RD | KD | ND | AD | | | | | | | | |
| T | NG | HG | VG | IG | EG | MG | YG | AA | EP | VA | QG | KG | RG |

[0446] Accordingly, it is possible to modify the repeats of a TAL effector to target specific DNA sequences. Further studies have shown that the RVD NK can target G. Target sites of TAL effectors also tend to include a T flanking the 5′ base targeted by the first repeat, but the exact mechanism of this recognition is not known. More than 113 TAL effector sequences are known to date. Non-limiting examples of TAL effectors from Xanthomonas include, Hax2, Hax3, Hax4, AvrXa7, AvrXa10 and AvrBs3.

[0447] Accordingly, the TAL effector domain of a TAL effector molecule described herein may be derived from a TAL effector from any bacterial species (e.g., Xanthomonas species such as the African strain of Xanthomonas oryzae pv. Oryzae (Yu et al. 2011), Xanthomonas campestris pv. raphani strain 756C and Xanthomonas oryzae pv. oryzicolastrain BLS256 (Bogdanove et al. 2011). In some embodiments, the TAL effector domain comprises an RVD domain as well as flanking sequence(s) (sequences on the N-terminal and/or C-terminal side of the RVD domain) also from the naturally occurring TAL effector. It may comprise more or fewer repeats than the RVD of the naturally occurring TAL effector. The TAL effector molecule can be designed to target a given DNA sequence based on the above code and others known in the art. The number of TAL effector domains (e.g., repeats (monomers or modules)) and their specific sequence can beselected based on the desired DNA target sequence. For example, TAL effector domains, e.g., repeats, may be removed or added in order to suit a specific target sequence. In an embodiment, the TAL effector molecule of the present invention comprises between 6.5 and 33.5 TAL effector domains, e.g., repeats. In an embodiment, TAL effector molecule of the present invention comprises between 8 and 33.5 TAL effector domains, e.g., repeats, e.g., between 10 and 25 TAL effector domains, e.g., repeats, e.g., between 10 and 14 TAL effector domains, e.g., repeats.

[0448] In some embodiments, the TAL effector molecule comprises TAL effector domains that correspond to a perfect match to the DNA target sequence. In some embodiments, a mismatch between a repeat and a target base-pair on the DNA target sequence is permitted as along as it allows for the function of the polypeptide comprising the TAL effector molecule. In general, TALE binding is inversely correlated with the number of mismatches. In some embodiments, the TAL effector molecule of a polypeptide of the present invention comprises no more than 7 mismatches, 6 mismatches, 5 mismatches, 4 mismatches, 3 mismatches, 2 mismatches, or 1 mismatch, and optionally no mismatch, with the target DNA sequence. Without wishing to be bound by theory, in general the smaller the number of TAL effector domains in the TAL effector molecule, the smaller the number of mismatches will be tolerated and still allow for the function of the polypeptide comprising the TAL effector molecule. The binding affinity is thought to depend on the sum of matching repeat-DNA combinations. For example, TAL effector molecules having 25 TAL effector domains or more may be able to tolerate up to 7 mismatches.

[0449] In addition to the TAL effector domains, the TAL effector molecule of the present invention may comprise additional sequences derived from a naturally occurring TAL effector. The length of the C-terminal and/or N-terminal sequence(s) included on each side of the TAL effector domain portion of the TAL effector molecule can vary and be selected by one skilled in the art, for example based on the studies of Zhang et al. (2011). Zhang et al., have characterized a number of C-terminal and N-terminal truncation mutants in Hax3 derived TAL-effector based proteins and have identified key elements, which contribute to optimal binding to the target sequence and thus activation of transcription. Generally, it was found that transcriptional activity is inversely correlated with the length of N-terminus. Regarding the C-terminus, an important element for DNA binding residues within the first 68 amino acids of the Hax 3 sequence was identified. Accordingly, in some embodiments, the first 68 amino acids on the C-terminal side of the TAL effector domains of the naturally occurring TAL effector is included in the TAL effector molecule. Accordingly, in an embodiment, a TAL effector molecule comprises 1) one or more TAL effector domains derived from a naturally occurring TAL effector; 2) at least 70, 80, 90, 100, 110, 120, 130, 140, 150, 170, 180, 190, 200, 220, 230, 240, 250, 260, 270, 280 or more amino acids from the naturally occurring TAL effector on the N-terminal side of the TAL effector domains; and/or 3) at least 68, 80, 90, 100, 110, 120, 130, 140, 150, 170, 180, 190, 200, 220, 230, 240, 250, 260 or more amino acids from the naturally occurring TAL effector on the C-terminal side of the TAL effector domains.

[0450] In some embodiments, an endonuclease domain or DNA-binding domain is or comprises a Zn finger molecule. A Zn finger molecule comprises a Zn finger protein, e.g., a naturally occurring Zn finger protein or engineered Zn finger protein, or fragment thereof. Many Zn finger proteins are known to those of skill in the art and are commercially available, e.g., from Sigma-Aldrich.

[0451] In some embodiments, a Zn finger molecule comprises a non-naturally occurring Zn finger protein that is engineered to bind to a target DNA sequence of choice. See, for example, Beerli, et al. (2002) Nature Biotechnol. 20:135-141; Pabo, et al. (2001) Ann. Rev. Biochem. 70:313-340; Isalan, et al. (2001) Nature Biotechnol. 19:656-660; Segal, et al. (2001) Curr. Opin. Biotechnol. 12:632-637; Choo, et al. (2000) Curr. Opin. Struct. Biol. 10:411-416; U.S. Pat. Nos. 6,453,242; 6,534,261; 6,599,692; 6,503,717; 6,689,558; 7,030,215; 6,794,136; 7,067,317; 7,262,054; 7,070,934; 7,361,635; 7,253,273; and U.S. Patent Publication Nos. 2005/0064474; 2007/0218528; 2005/0267061, all incorporated herein by reference in their entireties.

[0452] An engineered Zn finger protein may have a novel binding specificity, compared to a naturally-occurring Zn finger protein. Engineering methods include, but are not limited to, rational design and various types of selection. Rational design includes, for example, using databases comprising triplet (or quadruplet) nucleotide sequences and individual Zn finger amino acid sequences, in which each triplet or quadruplet nucleotide sequence is associated with one or more amino acid sequences of zinc fingers which bind the particular triplet or quadruplet sequence. See, for example, U.S. Pat. Nos. 6,453,242 and 6,534,261, incorporated by reference herein in their entireties.

[0453] Exemplary selection methods, including phage display and two-hybrid systems, are disclosed in U.S. Pat. Nos. 5,789,538; 5,925,523; 6,007,988; 6,013,453; 6,410,248; 6,140,466; 6,200,759; and 6,242,568; as well as International Patent Publication Nos. WO 98/37186; WO 98/53057; WO 00/27878; and WO 01/88197 and GB 2,338,237. In addition, enhancement of binding specificity for zinc finger proteins has been described, for example, in International Patent Publication No. WO 02/077227.

[0454] In addition, as disclosed in these and other references, zinc finger domains and/or multi-fingered zinc finger proteins may be linked together using any suitable linker sequences, including for example, linkers of 5 or more amino acids in length. See, also, U.S. Pat. Nos. 6,479,626; 6,903,185; and 7,153,949 for exemplary linker sequences 6 or more amino acids in length. The proteins described herein may include any combination of suitable linkers between the individual zinc fingers of the protein. In addition, enhancement of binding specificity for zinc finger binding domains has been described, for example, in co-owned International Patent Publication No. WO 02/077227.

[0455] Zn finger proteins and methods for design and construction of fusion proteins (and polynucleotides encoding same) are known to those of skill in the art and described in detail in U.S. Pat. Nos. 6,140,0815; 789,538; 6,453,242; 6,534,261; 5,925,523; 6,007,988; 6,013,453; and 6,200,759; International Patent Publication Nos. WO 95/19431; WO 96/06166; WO 98/53057; WO 98/54311; WO 00/27878; WO 01/60970; WO 01/88197; WO 02/099084; WO 98/53058; WO 98/53059; WO 98/53060; WO 02/016536; and WO 03/016496.

[0456] In addition, as disclosed in these and other references, Zn finger proteins and/or multi-fingered Zn finger proteins may be linked together, e.g., as a fusion protein, using any suitable linker sequences, including for example, linkers of 5 or more amino acids in length. See, also, U.S. Pat. Nos. 6,479,626; 6,903,185; and 7,153,949 for exemplary linker sequences 6 or more amino acids in length. The Zn finger molecules described herein may include any combination of suitable linkers between the individual zinc finger proteins and/or multi-fingered Zn finger proteins of the Zn finger molecule.

[0457] In certain embodiments, the DNA-binding domain or endonuclease domain comprises a Zn finger molecule comprising an engineered zinc finger protein that binds (in a sequence-specific manner) to a target DNA sequence. In some embodiments, the Zn finger molecule comprises one Zn finger protein or fragment thereof. In other embodiments, the Zn finger molecule comprises a plurality of Zn finger proteins (or fragments thereof), e.g., 2, 3, 4, 5, 6 or more Zn finger proteins (and optionally no more than 12, 11, 10, 9, 8, 7, 6, 5, 4, 3, or 2 Zn finger proteins). In some embodiments, the Zn finger molecule comprises at least three Zn finger proteins. In some embodiments, the Zn finger molecule comprises four, five or six fingers. In some embodiments, the Zn finger molecule comprises 8, 9, 10, 11 or 12 fingers. In some embodiments, a Zn finger molecule comprising three Zn finger proteins recognizes a target DNA sequence comprising 9 or 10 nucleotides. In some embodiments, a Zn finger molecule comprising four Zn finger proteins recognizes a target DNA sequence comprising 12 to 14 nucleotides. In some embodiments, a Zn finger molecule comprising six Zn finger proteins recognizes a target DNA sequence comprising 18 to 21 nucleotides.

[0458] In some embodiments, a Zn finger molecule comprises a two-handed Zn finger protein. Two handed zinc finger proteins are those proteins in which two clusters of zinc finger proteins are separated by intervening amino acids so that the two zinc finger domains bind to two discontinuous target DNA sequences. An example of a two handed type of zinc finger binding protein is SIP1, where a cluster of four zinc finger proteins is located at the amino terminus of the protein and a cluster of three Zn finger proteins is located at the carboxyl terminus (see Remade, et al. (1999) EMBO Journal 18(18):5073-5084). Each cluster of zinc fingers in these proteins is able to bind to a unique target sequence and the spacing between the two target sequences can comprise many nucleotides.

### Linkers

[0459] In some embodiments, a gene modifying polypeptide may comprise a linker, e.g., a peptide linker, e.g., a linker as described in Table 10. In some embodiments, a gene modifying polypeptide comprises, in an N-terminal to C-terminal direction, a Cas domain (e.g., a Cas domain of Table 8), a linker of Table 10 (or a sequence having at least 70%, 80%, 85%, 90%, 95%, or 99% identity thereto), and an RT domain (e.g., an RT domain of Table 6). In some embodiments, a gene modifying polypeptide comprises a flexible linker between the endonuclease and the RT domain, e.g., a linker comprising the amino acid sequence SGGSSGGSSGSETPGTSESATPESSGGSSGGSS (SEQ ID NO: 11,002). In some embodiments, an RT domain of a gene modifying polypeptide may be located C-terminal to the endonuclease domain. In some embodiments, an RT domain of a gene modifying polypeptide may be located N-terminal to the endonuclease domain.

TABLE 10
Exemplary linker sequences

| Amino Acid Sequence | SEQ ID NO |
|---|---|
| GGS | |
| GGSGGS | 5102 |
| GGSGGSGGS | 5103 |
| GGSGGSGGSGGS | 5104 |
| GGSGGSGGSGGSGGS | 5105 |
| GGSGGSGGSGGSGGSGGS | 5106 |
| GGGGS | 5107 |
| GGGGSGGGGS | 5108 |
| GGGGSGGGGSGGGGS | 5109 |
| GGGGSGGGGSGGGGSGGGGS | 5110 |
| GGGGSGGGGSGGGGSGGGGSGGGGS | 5111 |
| GGGGSGGGGSGGGGSGGGGSGGGGSGGGGS | 5112 |
| GGG | |
| GGGG | 5114 |
| GGGGG | 5115 |
| GGGGGG | 5116 |
| GGGGGGG | 5117 |
| GGGGGGGG | 5118 |
| GSS | |
| GSSGSS | 5120 |
| GSSGSSGSS | 5121 |
| GSSGSSGSSGSS | 5122 |
| GSSGSSGSSGSSGSS | 5123 |
| GSSGSSGSSGSSGSSGSS | 5124 |
| EAAAK | 5125 |
| EAAAKEAAAK | 5126 |
| EAAAKEAAAKEAAAK | 5127 |
| EAAAKEAAAKEAAAKEAAAK | 5128 |
| EAAAKEAAAKEAAAKEAAAKEAAAK | 5129 |
| EAAAKEAAAKEAAAKEAAAKEAAAKEAAAK | 5130 |
| PAP | |
| PAPAP | 5132 |
| PAPAPAP | 5133 |
| PAPAPAPAP | 5134 |
| PAPAPAPAPAP | 5135 |
| PAPAPAPAPAPAP | 5136 |
| GGSGGG | 5137 |
| GGGGGS | 5138 |
| GGSGSS | 5139 |
| GSSGGS | 5140 |
| GGSEAAAK | 5141 |
| EAAAKGGS | 5142 |
| GGSPAP | 5143 |
| PAPGGS | 5144 |
| GGGGSS | 5145 |
| GSSGGG | 5146 |
| GGGEAAAK | 5147 |
| EAAAKGGG | 5148 |
| GGGPAP | 5149 |
| PAPGGG | 5150 |
| GSSEAAAK | 5151 |
| EAAAKGSS | 5152 |
| GSSPAP | 5153 |
| PAPGSS | 5154 |
| EAAAKPAP | 5155 |
| PAPEAAAK | 5156 |
| GGSGGGGSS | 5157 |
| GGSGSSGGG | 5158 |
| GGGGGSGSS | 5159 |
| GGGGSSGGS | 5160 |
| GSSGGSGGG | 5161 |
| GSSGGGGGS | 5162 |
| GGSGGGEAAAK | 5163 |
| GGSEAAAKGGG | 5164 |
| GGGGGSEAAAK | 5165 |
| GGGEAAAKGGS | 5166 |
| EAAAKGGSGGG | 5167 |
| EAAAKGGGGGS | 5168 |
| GGSGGGPAP | 5169 |
| GGSPAPGGG | 5170 |
| GGGGGSPAP | 5171 |
| GGGPAPGGS | 5172 |
| PAPGGSGGG | 5173 |
| PAPGGGGGS | 5174 |
| GGSGSSEAAAK | 5175 |
| GGSEAAAKGSS | 5176 |
| GSSGGSEAAAK | 5177 |
| GSSEAAAKGGS | 5178 |
| EAAAKGGSGSS | 5179 |
| EAAAKGSSGGS | 5180 |
| GGSGSSPAP | 5181 |
| GGSPAPGSS | 5182 |
| GSSGGSPAP | 5183 |
| GSSPAPGGS | 5184 |
| PAPGGSGSS | 5185 |
| PAPGSSGGS | 5186 |
| GGSEAAAKPAP | 5187 |
| GGSPAPEAAAK | 5188 |
| EAAAKGGSPAP | 5189 |
| EAAAKPAPGGS | 5190 |
| PAPGGSEAAAK | 5191 |
| PAPEAAAKGGS | 5192 |
| GGGGSSEAAAK | 5193 |
| GGGEAAAKGSS | 5194 |
| GSSGGGEAAAK | 5195 |
| GSSEAAAKGGG | 5196 |
| EAAAKGGGGSS | 5197 |
| EAAAKGSSGGG | 5198 |
| GGGGSSPAP | 5199 |
| GGGPAPGSS | 5200 |
| GSSGGGPAP | 5201 |
| GSSPAPGGG | 5202 |
| PAPGGGGSS | 5203 |
| PAPGSSGGG | 5204 |
| GGGEAAAKPAP | 5205 |
| GGGPAPEAAAK | 5206 |
| EAAAKGGGPAP | 5207 |
| EAAAKPAPGGG | 5208 |
| PAPGGGEAAAK | 5209 |
| PAPEAAAKGGG | 5210 |
| GSSEAAAKPAP | 5211 |
| GSSPAPEAAAK | 5212 |
| EAAAKGSSPAP | 5213 |
| EAAAKPAPGSS | 5214 |
| PAPGSSEAAAK | 5215 |
| PAPEAAAKGSS | 5216 |
| AEAAAKEAAAKEAAAKEAAAKALEAEAAAKEAA | 5217 |
| AKEAAAKEAAAKA | |
| GGGGSEAAAKGGGGS | 5218 |
| EAAAKGGGGSEAAAK | 5219 |
| SGSETPGTSESATPES | 5220 |
| GSAGSAAGSGEF | 5221 |
| SGGSSGGSSGSETPGTSESATPESSGGSSGGSS | 5222 |

[0460] In some embodiments, a linker of a gene modifying polypeptide comprises a motif chosen from: (SGGS)ₙ (SEQ ID NO: 5025), (GGGS)ₙ (SEQ ID NO: 5026), (GGGGS)ₙ (SEQ ID NO: 5027), (G)ₙ, (EAAAK), (SEQ ID NO: 5028), (GGS)ₙ, or (XP)ₙ.

### Gene Modifying Polypeptide Selection by Pooled Screening

[0461] Candidate gene modifying polypeptides may be screened to evaluate a candidate's gene editing ability. For example, an RNA gene modifying system designed for the targeted editing of a coding sequence in the human genome may be used. In certain embodiments, such a gene modifying system may be used in conjunction with a pooled screening approach.

[0462] For example, a library of gene modifying polypeptide candidates and a template guide RNA (tgRNA) may be introduced into mammalian cells to test the candidates' gene editing abilities by a pooled screening approach. In specific embodiments, a library of gene modifying polypeptide candidates is introduced into mammalian cells followed by introduction of the tgRNA into the cells.

[0463] Representative, non-limiting examples of mammalian cells that may be used in screening include HEK293T cells, U2OS cells, HeLa cells, HepG2 cells, Huh7 cells, K562 cells, or iPS cells.

[0464] A gene modifying polypeptide candidate may comprise 1) a Cas-nuclease, for example a wild-type Cas nuclease, e.g., a wild-type Cas9 nuclease, a mutant Cas nuclease, e.g., a Cas nickase, for example, a Cas9 nickase such as a Cas9 N863A nickase, or a Cas nuclease selected from Table 7 or Table 8, 2) a peptide linker, e.g., a sequence from Table D or Table 10, that may exhibit varying degrees of length, flexibility, hydrophobicity, and/or secondary structure; and 3) a reverse transcriptase (RT), e.g. an RT domain from Table D or Table 6. A gene modifying polypeptide candidate library comprises: a plurality of different gene modifying polypeptide candidates that differ from each other with respect to one, two or all three of the Cas nuclease, peptide linker or RT domain components, or a plurality of nucleic acid expression vectors that encode such gene modifying polypeptide candidates.

[0465] For screening of gene modifying polypeptide candidates, a two-component system may be used that comprises a gene modifying polypeptide component and a tgRNA component. A gene modifying component may comprise, for example, an expression vector, e.g., an expression plasmid or lentiviral vector, that encodes a gene modifying polypeptide candidate, for example, comprises a human codon-optimized nucleic acid that encodes a gene modifying polypeptide candidate, e.g., a Cas-linker-RT fusion as described above. In a particular embodiment, a lentiviral cassette is utilized that comprises: (i) a promoter for expression in mammalian cells, e.g., a CMV promoter; (ii) a gene modifying library candidate, e.g. a Cas-linker-RT fusion comprising a Cas nuclease of Table 7 or Table 8, a peptide linker of Table 10, and an RT of Table 6, for example a Cas-linker-RT fusion as in Table D; (iii) a self-cleaving polypeptide, e.g., a T2A peptide; (iv) a marker enabling selection in mammalian cells, e.g., a puromycin resistance gene; and (v) a termination signal, e.g., a poly A tail.

[0466] The tgRNA component may comprise a tgRNA or expression vector, e.g., an expression plasmid, that produces the tgRNA, for example, utilizes a U6 promoter to drive expression of the tgRNA, wherein the tgRNA is a non-coding RNA sequence that is recognized by Cas and localizes it to the genomic locus of interest, and that also templates reverse transcription of the desired edit into the genome by the RT domain.

[0467] To prepare a pool of cells expressing gene modifying polypeptide library candidates, mammalian cells, e.g., HEK293T or U2OS cells, may be transduced with pooled gene modifying polypeptide candidate expression vector preparations, e.g., lentiviral preparations, of the gene modifying candidate polypeptide library. In a particular embodiment, lentiviral plasmids are utilized, and HEK293 Lenti-X cells are seeded in 15 cm plates (˜12×10⁶ cells) prior to lentiviral plasmid transfection. In such an embodiment, lentiviral plasmid transfection may be performed using the Lentiviral Packaging Mix (Biosettia) and transfection of the plasmid DNA for the gene modifying candidate library is performed the following day using Lipofectamine 2000 and Opti-MEM media according to the manufacturer's protocol. In such an embodiment, extracellular DNA may be removed by a full media change the next day and virus-containing media may be harvested 48 hours after. Lentiviral media may be concentrated using Lenti-X Concentrator (TaKaRa Biosciences) and 5 mL lentiviral aliquots may be made and stored at −80° C. Lentiviral titering is performed by enumerating colony forming units post-selection, e.g., post Puromycin selection.

[0468] For monitoring gene editing of a target DNA, mammalian cells, e.g., HEK293T or U2OS cells, carrying a target DNA may be utilized. In other embodiments for monitoring gene editing of a target DNA, mammalian cells, e.g., HEK293T or U2OS cells, carrying a target DNA genomic landing pad may be utilized. In particular embodiments, the target DNA genomic landing pad may comprise a gene to be edited for treatment of a disease or disorder of interest. In other particular embodiments, the target DNA is a gene sequence that expresses a protein that exhibits detectable characteristics that may be monitored to determine whether gene editing has occurred. For example, in certain embodiments, a blue fluorescence protein (BFP)- or green fluorescence protein (GFP)-expressing genomic landing pad is utilized. In certain embodiments, mammalian cells, e.g., HEK293T or U2OS cells, comprising a target DNA, e.g., a target DNA genomic landing pad, are seeded in culture plates at 500x-3000x cells per gene modifying library candidate and transduced at a 0.2-0.3 multiplicity of infection (MOI) to minimize multiple infections per cell. Puromycin (2.5 ug/mL) may be added 48 hours post infection to allow for selection of infected cells. In such an embodiment, cells may be kept under puromycin selection for at least 7 days and then scaled up for tgRNA introduction, e.g., tgRNA electroporation.

[0469] To ascertain whether gene editing occurs, mammalian cells containing a target DNA to be edited may be infected with gene modifying polypeptide library candidates then transfected with tgRNA designed for use in editing of the target DNA. Subsequently, the cells may be analyzed to determine whether editing of the target locus has occurred according to the designed outcome, or whether no editing or imperfect editing has occurred, e.g., by using cell sorting and sequence analysis.

[0470] In a particular embodiment, to ascertain whether genome editing occurs, BFP- or GFP-expressing mammalian cells, e.g., HEK293T or U2OS cells, may be infected with gene modifying library candidates and then transfected or electroporated with tgRNA plasmid or RNA, e.g., by electroporation of 250,000 cells/well with 200 ng of a tgRNA plasmid designed to convert BFP-to-GFP or GFP-to-BFP, at a cell count ensuring >250x-1000x coverage per library candidate. In such an embodiment, the genome-editing capacity of the various constructs in this assay may be assessed by sorting the cells by Fluorescence-Activated Cell Sorting (FACS) for expression of the color-converted fluorescent protein (FP) at 4-10 days post-electroporation. Cells are sorted and harvested as distinct populations of unedited cells (exhibiting original florescence protein signal), edited cells (exhibiting converted fluorescence protein signal), and imperfect edit (exhibiting no florescence protein signal) cells. A sample of unsorted cells may also be harvested as the input population to determine candidate enrichment during analysis.

[0471] To determine which gene modifying library candidates exhibit genome-editing capacity in an assay, genomic DNA (gDNA) is harvested from the sorted cell populations, and analyzed by sequencing the gene modifying library candidates in each population. Briefly, gene modifying candidates may be amplified from the genome using primers specific to the gene modifying polypeptide expression vector, e.g., the lentiviral cassette, amplified in a second round of PCR to dilute genomic DNA, and then sequenced, for example, sequenced by a next-generation sequencing platform. After quality control of sequencing reads, reads of at least about 1500 nucleotides and generally no more than about 3200 nucleotides are mapped to the gene modifying polypeptide library sequences and those containing a minimum of about an 80% match to a library sequence are considered to be successfully aligned to a given candidate for purposes of this pooled screen. In order to identify candidates capable of performing gene editing in the assay, e.g., the BFP-to-GFP or GFP-to-BFP edit, the read count of each library candidate in the edited population is compared to its read count in the initial, unsorted population.

[0472] For purposes of pooled screening, gene modifying candidates with genome-editing capacity are identified based on enrichment in the edited (converted FP) population relative to unsorted (input) cells. In some embodiments, an enrichment of at least 1.0, 1.5, 2.0, 2.5, 3.0, 4.0, 5.0, 6.0, 7.0, 8.0, 9.0, 10, 15, 20, 25, 30, 40, 50, 60, 70, 80, 90, or at least 100-fold over the input indicates potentially useful gene editing activity, e.g., at least 2-fold enrichment. In some embodiments, the enrichment is converted to a log-value by taking the log base 2 of the enrichment ratio. In some embodiments, a log 2 enrichment score of at least 0, 1, 2, 3, 4, 5, 5.5, 6.0, 6.2, 6.3, 6.4, 6.5, or at least 6.6 indicates potentially useful gene editing activity, e.g., a log 2 enrichment score of at least 1.0. In particular embodiments, enrichment values observed for gene modifying candidates may be compared to enrichment values observed under similar conditions utilizing a reference, e.g., Element ID No: 17380.

[0473] In some embodiments, multiple tgRNAs may be used to screen the gene modifying candidate library. In particular embodiments, a plurality of tgRNAs may be utilized to optimize template/Cas-linker-RT fusion pairs, e.g., for gene editing of particular target genes, for example, gene targets for the treatment of disease. In specific embodiments, a pooled approach to screening gene modifying candidates may be performed using a multiplicity of different tgRNAs in an arrayed format.

[0474] In some embodiments, multiple types of edits, e.g., insertions, substitutions, and/or deletions of different lengths, may be used to screen the gene modifying candidate library.

[0475] In some embodiments, multiple target sequences, e.g., different fluorescent proteins, may be used to screen the gene modifying candidate library. In some embodiments, multiple target sequences, e.g., different fluorescent proteins, may be used to screen the gene modifying candidate library. In some embodiments, multiple cell types, e.g., HEK293T or U2OS, may be used to screen the gene modifying candidate library. The person of ordinary skill in the art will appreciate that a given candidate may exhibit altered editing capacity or even the gain or loss of any observable or useful activity across different conditions, including tgRNA sequence (e.g., nucleotide modifications, PBS length, RT template length), target sequence, target location, type of edit, location of mutation relative to the first-strand nick of the gene modifying polypeptide, or cell type. Thus, in some embodiments, gene modifying library candidates are screened across multiple parameters, e.g., with at least two distinct tgRNAs in at least two cell types, and gene editing activity is identified by enrichment in any single condition. In other embodiments, a candidate with more robust activity across different tgRNA and cell types is identified by enrichment in at least two conditions, e.g., in all conditions screened. For clarity, candidates found to exhibit little to no enrichment under any given condition are not assumed to be inactive across all conditions and may be screened with different parameters or reconfigured at the polypeptide level, e.g., by swapping, shuffling, or evolving domains (e.g., RT domain), linkers, or other signals (e.g., NLS).

### Sequences of Exemplary (′As9-Linker-RT Fusions

[0476] In some embodiments, a gene modifying polypeptide comprises a linker sequence and an RT sequence. In some embodiments, a gene modifying polypeptide comprises a linker sequence as listed in Table D, or an amino acid sequence having at least 75%, 80%, 85%, 90%, 95%, 96%, 97%, 98%, or 99% identity thereto. In some embodiments, a gene modifying polypeptide comprises the amino acid sequence of an RT domain as listed in Table D, or an amino acid sequence having at least 75%, 80%, 85%, 90%, 95%, 96%, 97%, 98%, or 99% identity thereto. In some embodiments, a gene modifying polypeptide comprises a linker sequence as listed in Table D, or an amino acid sequence having at least 75%, 80%, 85%, 90%, 95%, 96%, 97%, 98%, or 99% identity thereto; and the amino acid sequence of an RT domain as listed in Table D, or an amino acid sequence having at least 75%, 80%, 85%, 90%, 95%, 96%, 97%, 98%, or 99% identity thereto. In some embodiments, a gene modifying polypeptide comprises: (i) a linker sequence as listed in a row of Table D, or an amino acid sequence having at least 75%, 80%, 85%, 90%, 95%, 96%, 97%, 98%, or 99% identity thereto; and (ii) the amino acid sequence of an RT domain as listed in the same row of Table D, or an amino acid sequence having at least 75%, 80%, 85%, 90%, 95%, 96%, 97%, 98%, or 99% identity thereto.

### Exemplary Gene Modifying Polypeptides

[0477] In some embodiments, a gene modifying polypeptide (e.g., a gene modifying polypeptide that is part of a system described herein) comprises an amino acid sequence of any one of SEQ ID NOs: 1-7743, or an amino acid sequence having at least 70%, 75%, 80%, 85%, 90%, 95%, or 99% identity thereto. In some embodiments, a gene modifying polypeptide comprises an amino acid sequence of any one of SEQ ID NOs: 1-7743, or an amino acid sequence having at least 80% identity thereto. In some embodiments, a gene modifying polypeptide comprises an amino acid sequence of any one of SEQ ID NOs: 1-7743, or an amino acid sequence having at least 90% identity thereto. In some embodiments, a gene modifying polypeptide comprises an amino acid sequence of any one of SEQ ID NOs: 1-7743, or an amino acid sequence having at least 95% identity thereto. In some embodiments, a gene modifying polypeptide comprises an amino acid sequence of any one of SEQ ID NOs: 1-7743, or an amino acid sequence having at least 99% identity thereto. In some embodiments, a gene modifying polypeptide comprises an amino acid sequence of any one of SEQ ID NOs: 1-7743. In some embodiments, a gene modifying polypeptide comprises an amino acid sequence of any one of SEQ ID NOs: 6001-7743, or an amino acid sequence having at least 70%, 75%, 80%, 85%, 90%, 95%, or 99% identity thereto. In some embodiments, a gene modifying polypeptide comprises an amino acid sequence of any one of SEQ ID NOs: 4501-4541, or an amino acid sequence having at least 70%, 75%, 80%, 85%, 90%, 95%, or 99% identity thereto.

[0478] In some embodiments, a gene modifying polypeptide comprises an amino acid sequence as listed in Table A1, or an amino acid sequence having at least 70%, 75%, 80%, 85%, 90%, 95%, or 99% identity thereto.

[0479] In some embodiments, a gene modifying polypeptide comprises an amino acid sequence as listed in Table T1, or an amino acid sequence having at least 70%, 75%, 80%, 85%, 90%, 95%, or 99% identity thereto. In some embodiments, a gene modifying polypeptide comprises a linker comprising a linker sequence as listed in Table T1, or an amino acid sequence having at least 70%, 75%, 80%, 85%, 90%, 95%, or 99% identity thereto. In some embodiments, a gene modifying polypeptide comprises an RT domain comprising an RT domain sequence as listed in Table T1, or an amino acid sequence having at least 70%, 75%, 80%, 85%, 90%, 95%, or 99% identity thereto. In some embodiments, a gene modifying polypeptide comprises: (i) a linker comprising a linker sequence as listed in a row of Table T1, or an amino acid sequence having at least 70%, 75%, 80%, 85%, 90%, 95%, or 99% identity thereto; and (ii) an RT domain comprising an RT domain sequence as listed in the same row of Table T1, or an amino acid sequence having at least 70%, 75%, 80%, 85%, 90%, 95%, or 99% identity thereto.

TABLE T1
Selection of exemplary gene modifying polypeptides

| SEQ ID NO: | | | |
|---|---|---|---|
| for Full | | SEQ ID | |
| Polypeptide | | NO: of | |
| Sequence | Linker Sequence | linker | RT name |
| 1372 | AEAAAKEAAAKEAAA | 15,401 | AVIRE_P03360_ |
| | KEAAAKALEAEAAAK | | 3mutA |
| | EAAAKEAAAKEAAAK | | |
| | A | | |
| 1197 | AEAAAKEAAAKEAAA | 15,402 | FLV_P10273_ |
| | KEAAAKALEAEAAAK | | 3mutA |
| | EAAAKEAAAKEAAAK | | |
| | A | | |
| 2784 | AEAAAKEAAAKEAAA | 15,403 | MLVMS_P03355_ |
| | KEAAAKALEAEAAAK | | 3mutA_WS |
| | EAAAKEAAAKEAAAK | | |
| | A | | |
| 647 | AEAAAKEAAAKEAAA | 15,404 | SFV3L_P27401_ |
| | KEAAAKALEAEAAAK | | 2mutA |
| | EAAAKEAAAKEAAAK | | |
| | A | | |

[0480] In some embodiments, a gene modifying polypeptide comprises an amino acid sequence as listed in Table T2, or an amino acid sequence having at least 70%, 75%, 80%, 85%, 90%, 95%, or 99% identity thereto. In some embodiments, a gene modifying polypeptide comprises a linker comprising a linker sequence as listed in Table T2, or an amino acid sequence having at least 70%, 75%, 80%, 85%, 90%, 95%, or 99% identity thereto. In some embodiments, a gene modifying polypeptide comprises an RT domain comprising an RT domain sequence as listed in Table T2, or an amino acid sequence having at least 70%, 75%, 80%, 85%, 90%, 95%, or 99% identity thereto. In some embodiments, a gene modifying polypeptide comprises: (i) a linker comprising a linker sequence as listed in a row of Table T2, or an amino acid sequence having at least 70%, 75%, 80%, 85%, 90%, 95%, or 99% identity thereto; and (ii) an RT domain comprising an RT domain sequence as listed in the same row of Table T2, or an amino acid sequence having at least 70%, 75%, 80%, 85%, 90%, 95%, or 99% identity thereto.

TABLE T2
Selection of exemplary gene modifying polypeptides

| SEQ ID NO: | | | |
|---|---|---|---|
| for Full | | | |
| Polypeptide | | SEQ ID NO: | |
| Sequence | Linker Sequence | of linker | RT name |
| 2311 | GGGGSGGGGSGGGGSGGGGS | 15,405 | MLVCB_P08361_3mutA |
| 1373 | GGGGSGGGGSGGGGSGGGGSGGGGSGGGGS | 15,406 | AVIRE_P03360_3mutA |
| 2644 | GGGGGGGGSGGGGSGGGGSGGGGSGGGGS | 15,407 | MLVMS_P03355_PLV919 |
| 2304 | GSSGSSGSSGSSGSSGSS | 15,408 | MLVCB_P08361_3mutA |
| 2325 | EAAAKEAAAKEAAAKEAAAK | 15,409 | MLVCB_P08361_3mutA |
| 2322 | EAAAKEAAAKEAAAKEAAAKEAAAKEAAAK | 15,410 | MLVCB_P08361_3mutA |
| 2187 | PAPAPAPAPAP | 15,411 | MLVBM_Q7SVK7_3mut |
| 2309 | PAPAPAPAPAPAP | 15,412 | MLVCB_P08361_3mutA |
| 2534 | PAPAPAPAPAPAP | 15,413 | MLVFF_P26809_3mutA |
| 2797 | PAPAPAPAPAPAP | 15,414 | MLVMS_P03355_3mutA_WS |
| 3084 | PAPAPAPAPAPAP | 15,415 | MLVMS_P03355_3mutA_WS |
| 2868 | PAPAPAPAPAPAP | 15,416 | MLVMS_P03355_PLV919 |
| 126 | EAAAKGGG | 15,417 | PERV_Q4VFZ2_3mut |
| 306 | EAAAKGGG | 15,418 | PERV_Q4VFZ2_3mut |
| 1410 | PAPGGG | 15,419 | AVIRE_P03360_3mutA |
| 804 | GGGGSSGGS | 15,420 | WMSV_P03359_3mut |
| 1937 | GGGGGSEAAAK | 15,421 | BAEVM_P10272_3mutA |
| 2721 | GGGEAAAKGGS | 15,422 | MLVMS_P03355_3mut |
| 3018 | GGGEAAAKGGS | 15,423 | MLVMS_P03355_3mut |
| 1018 | GGGEAAAKGGS | 15,424 | XMRV6_A1Z651_3mutA |
| 2317 | GGSGGGPAP | 15,425 | MLVCB_P08361_3mutA |
| 2649 | PAPGGSGGG | 15,426 | MLVMS_P03355_PLV919 |
| 2878 | PAPGGSGGG | 15,427 | MLVMS_P03355_PLV919 |
| 912 | GGSEAAAKPAP | 15,428 | WMSV_P03359_3mutA |
| 2338 | GGSPAPEAAAK | 15,429 | MLVCB_P08361_3mutA |
| 2527 | GGSPAPEAAAK | 15,430 | MLVFF_P26809_3mutA |
| 141 | EAAAKGGSPAP | 15,431 | PERV_Q4VFZ2_3mut |
| 341 | EAAAKGGSPAP | 15,432 | PERV_Q4VFZ2_3mut |
| 2315 | EAAAKPAPGGS | 15,433 | MLVCB_P08361_3mutA |
| 3080 | EAAAKPAPGGS | 15,434 | MLVMS_P03355_3mutA_WS |
| 2688 | GGGGSSEAAAK | 15,435 | MLVMS_P03355_PLV919 |
| 2885 | GGGGSSEAAAK | 15,436 | MLVMS_P03355_PLV919 |
| 2810 | GSSGGGEAAAK | 15,437 | MLVMS_P03355_3mutA_WS |
| 3057 | GSSGGGEAAAK | 15,438 | MLVMS_P03355_3mutA_WS |
| 1861 | GSSEAAAKGGG | 15,439 | MLVAV_P03356_3mutA |
| 3056 | GSSGGGPAP | 15,440 | MLVMS_P03355_3mutA_WS |
| 1038 | GSSPAPGGG | 15,441 | XMRV6_A1Z651_3mutA |
| 2308 | PAPGGGGSS | 15,442 | MLVCB_P08361_3mutA |
| 1672 | GGGEAAAKPAP | 15,443 | KORV_Q9TTC1-Pro_3mutA |
| 2526 | GGGEAAAKPAP | 15,444 | MLVFF_P26809_3mutA |
| 1938 | GGGPAPEAAAK | 15,445 | BAEVM_P10272_3mutA |
| 2641 | GSSEAAAKPAP | 15,446 | MLVMS_P03355_PLV919 |
| 2891 | GSSEAAAKPAP | 15,447 | MLVMS_P03355_PLV919 |
| 1225 | GSSPAPEAAAK | 15,448 | FLV_P10273_3mutA |
| 2839 | GSSPAPEAAAK | 15,449 | MLVMS_P03355_3mutA_WS |
| 3127 | GSSPAPEAAAK | 15,450 | MLVMS_P03355_3mutA_WS |
| 2798 | PAPGSSEAAAK | 15,451 | MLVMS_P03355_3mutA_WS |
| 3091 | PAPGSSEAAAK | 15,452 | MLVMS_P03355_3mutA_WS |
| 1372 | AEAAAKEAAAKEAAAKEAAAKALEAEAAAKEAA | 15,453 | AVIRE_P03360_3mutA |
| | AKEAAAKEAAAKA | | |
| 1197 | AEAAAKEAAAKEAAAKEAAAKALEAEAAAKEAA | 15,454 | FLV_P10273_3mutA |
| | AKEAAAKEAAAKA | | |
| 2611 | AEAAAKEAAAKEAAAKEAAAKALEAEAAAKEAA | 15,455 | MLVMS_P03355_PLV919 |
| | AKEAAAKEAAAKA | | |
| 2784 | AEAAAKEAAAKEAAAKEAAAKALEAEAAAKEAA | 15,456 | MLVMS_P03355_3mutA_WS |
| | AKEAAAKEAAAKA | | |
| 480 | AEAAAKEAAAKEAAAKEAAAKALEAEAAAKEAA | 15,457 | SFV1_P23074_2mutA |
| | AKEAAAKEAAAKA | | |
| 647 | AEAAAKEAAAKEAAAKEAAAKALEAEAAAKEAA | 15,458 | SFV3L_P27401_2mutA |
| | AKEAAAKEAAAKA | | |
| 1006 | AEAAAKEAAAKEAAAKEAAAKALEAEAAAKEAA | 15,459 | XMRV6_A1Z651_3mutA |
| | AKEAAAKEAAAKA | | |
| 2518 | SGSETPGTSESATPES | 15,460 | MLVFF_P26809_3mutA |

### Subsequences of Exemplary Gene Modifying Polypeptides

[0481] In some embodiments, the gene modifying polypeptide comprises, in N-terminal to C-terminal order, one or more (e.g., 1, 2, 3, 4, 5, or all 6) of an N-terminal methionine residue, a first nuclear localization signal (NLS), a DNA binding domain, a linker, an RT domain, and/or a second NLS. In some embodiments, a gene modifying polypeptide comprises, in N-terminal to C-terminal order, a NLS (e.g., a first NLS), a DNA binding domain, a linker, and an RT domain, wherein the linker and RT domain are the linker and RT domain of a gene modifying polypeptide of any one of SEQ ID NOs: 1-7743, or an amino acid sequence having at least 70%, 75%, 80%, 85%, 90%, 95%, or 99% identity to said linker and RT domain. In some embodiments, a gene modifying polypeptide comprises, in N-terminal to C-terminal order, a DNA binding domain, a linker, an RT domain, and an NLS (e.g., a second NLS) wherein the linker and RT domain are the linker and RT domain of a gene modifying polypeptide of any one of SEQ ID NOs: 1-7743, or an amino acid sequence having at least 70%, 75%, 80%, 85%, 90%, 95%, or 99% identity to said linker and RT domain. In some embodiments, a gene modifying polypeptide comprises, in N-terminal to C-terminal order, a first NLS, a DNA binding domain, a linker, an RT domain, and a second NLS, wherein the linker and RT domain are the linker and RT domain of a gene modifying polypeptide of any one of SEQ ID NOs: 1-7743, or an amino acid sequence having at least 70%, 75%, 80%, 85%, 90%, 95%, or 99% identity to said linker and RT domain. In some embodiments, the gene modifying polypeptide further comprises an N-terminal methionine residue.

[0482] In some embodiments, the gene modifying polypeptide comprises, in N-terminal to C-terminal order, one or more (e.g., 1, 2, 3, 4, 5, or all 6) of an N-terminal methionine residue, a first nuclear localization signal (NLS) (e.g., of a gene modifying polypeptide of any one of SEQ ID NOs: 1-7743 and/or as listed in any of Tables A1, T1, or T2, or an amino acid sequence having at least 70%, 75%, 80%, 85%, 90%, 95%, or 99% identity thereto), a DNA binding domain (e.g., a Cas domain, e.g., a SpyCas9 domain, e.g., as listed in Table 8, or an amino acid sequence having at least 70%, 75%, 80%, 85%, 90%, 95%, or 99% identity thereto; or a DNA binding domain of a gene modifying polypeptide of any one of SEQ ID NOs: 1-7743 and/or as listed in any of Tables A1, T1, or T2, or an amino acid sequence having at least 70%, 75%, 80%, 85%, 90%, 95%, or 99% identity thereto), a linker (e.g., of a gene modifying polypeptide of any one of SEQ ID NOs: 1-7743 and/or as listed in any of Tables A1, T1, or T2, or an amino acid sequence having at least 70%, 75%, 80%, 85%, 90%, 95%, or 99% identity thereto), an RT domain (e.g., of a gene modifying polypeptide of any one of SEQ ID NOs: 1-7743 and/or as listed in any of Tables A1, T1, or T2, or an amino acid sequence having at least 70%, 75%, 80%, 85%, 90%, 95%, or 99% identity thereto), and a second NLS (e.g., of a gene modifying polypeptide of any one of SEQ ID NOs: 1-7743 and/or as listed in any of Tables A1, T1, or T2, or an amino acid sequence having at least 70%, 75%, 80%, 85%, 90%, 95%, or 99% identity thereto). In some embodiments, the gene modifying polypeptide further comprises (e.g., C-terminal to the second NLS) a T2A sequence and/or a puromycin sequence (e.g., of a gene modifying polypeptide of any one of SEQ ID NOs: 1-7743 and/or as listed in any of Tables A1, T1, or T2, or an amino acid sequence having at least 70%, 75%, 80%, 85%, 90%, 95%, or 99% identity thereto). In some embodiments, a nucleic acid encoding a gene modifying polypeptide (e.g., as described herein) encodes a T2A sequence, e.g., wherein the T2A sequence is situated between a region encoding the gene modifying polypeptide and a second region, wherein the second region optionally encodes a selectable marker, e.g., puromycin.

[0483] In certain embodiments, the first NLS comprises a first NLS sequence of a gene modifying polypeptide having an amino acid sequence of any one of SEQ ID NOs: 1-7743, or an amino acid sequence having at least 70%, 75%, 80%, 85%, 90%, 95%, or 99% identity thereto. In certain embodiments, the first NLS comprises a first NLS sequence of a gene modifying polypeptide as listed in any of Tables A1, T1, or T2, or an amino acid sequence having at least 70%, 75%, 80%, 85%, 90%, 95%, or 99% identity thereto. In certain embodiments, the first NLS sequence comprises a C-myc NLS. In certain embodiments, the first NLS comprises the amino acid sequence PAAKRVKLD (SEQ ID NO: 11,095), or an amino acid sequence having at least 70%, 75%, 80%, 85%, 90%, 95%, or 99% identity thereto.

[0484] In certain embodiments, the gene modifying polypeptide further comprises a spacer sequence between the first NLS and the DNA binding domain. In certain embodiments, the spacer sequence between the first NLS and the DNA binding domain comprises 1, 2, 3, 4, 5, 6, 7, 8, 9, or 10 amino acids. In certain embodiments, the spacer sequence between the first NLS and the DNA binding domain comprises the amino acid sequence GG.

[0485] In certain embodiments, the DNA binding domain comprises a DNA binding domain of a gene modifying polypeptide of any one of SEQ ID NOs: 1-7743, or an amino acid sequence having at least 70%, 75%, 80%, 85%, 90%, 95%, or 99% identity thereto. In certain embodiments, the DNA binding domain comprises a DNA binding domain of a gene modifying polypeptide as listed in any of Tables A1, T1, or T2, or an amino acid sequence having at least 70%, 75%, 80%, 85%, 90%, 95%, or 99% identity thereto. In certain embodiments, the DNA binding domain comprises a Cas domain (e.g., as listed in Table 8). In certain embodiments, the DNA binding domain comprises the amino acid sequence of a SpyCas9 polypeptide (e.g., as listed in Table 8, e.g., a Cas9 N863A polypeptide), or an amino acid sequence having at least 70%, 75%, 80%, 85%, 90%, 95%, or 99% identity thereto. In certain embodiments, the DNA binding domain comprises the amino acid sequence:

(SEQ ID NO: 11,096)
DKKYSIGLDIGTNSVGWAVITDEYKVPSKKFKVLGNTDRHSIKKNLIGA
LLFDSGETAEATRLKRTARRRYTRRKNRICYLQEIFSNEMAKVDDSFFH
RLEESFLVEEDKKHERHPIFGNIVDEVAYHEKYPTIYHLRKKLVDSTDK
ADLRLIYLALAHMIKFRGHFLIEGDLNPDNSDVDKLFIQLVQTYNQLFE
ENPINASGVDAKAILSARLSKSRRLENLIAQLPGEKKNGLFGNLIALSL
GLTPNFKSNFDLAEDAKLQLSKDTYDDDLDNLLAQIGDQYADLFLAAKN
LSDAILLSDILRVNTEITKAPLSASMIKRYDEHHQDLTLLKALVRQQLP
EKYKEIFFDQSKNGYAGYIDGGASQEEFYKFIKPILEKMDGTEELLVKL
NREDLLRKQRTFDNGSIPHQIHLGELHAILRRQEDFYPFLKDNREKIEK
ILTFRIPYYVGPLARGNSRFAWMTRKSEETITPWNFEEVVDKGASAQSF
IERMTNFDKNLPNEKVLPKHSLLYEYFTVYNELTKVKYVTEGMRKPAFL
SGEQKKAIVDLLFKTNRKVTVKQLKEDYFKKIECFDSVEISGVEDRFNA
SLGTYHDLLKIIKDKDFLDNEENEDILEDIVLTLTLFEDREMIEERLKT
YAHLFDDKVMKQLKRRRYTGWGRLSRKLINGIRDKQSGKTILDFLKSDG
FANRNFMQLIHDDSLTFKEDIQKAQVSGQGDSLHEHIANLAGSPAIKKG
ILQTVKVVDELVKVMGRHKPENIVIEMARENQTTQKGQKNSRERMKRIE
EGIKELGSQILKEHPVENTQLQNEKLYLYYLQNGRDMYVDQELDINRLS
DYDVDHIVPQSFLKDDSIDNKVLTRSDKARGKSDNVPSEEVVKKMKNYW
RQLLNAKLITQRKFDNLTKAERGGLSELDKAGFIKRQLVETRQITKHVA
QILDSRMNTKYDENDKLIREVKVITLKSKLVSDFRKDFQFYKVREINNY
HHAHDAYLNAVVGTALIKKYPKLESEFVYGDYKVYDVRKMIAKSEQEIG
KATAKYFFYSNIMNFFKTEITLANGEIRKRPLIETNGETGEIVWDKGRD
FATVRKVLSMPQVNIVKKTEVQTGGFSKESILPKRNSDKLIARKKDWDP
KKYGGFDSPTVAYSVLVVAKVEKGKSKKLKSVKELLGITIMERSSFEKN
PIDFLEAKGYKEVKKDLIIKLPKYSLFELENGRKRMLASAGELQKGNEL
ALPSKYVNFLYLASHYEKLKGSPEDNEQKQLFVEQHKHYLDEIIEQISE
FSKRVILADANLDKVLSAYNKHRDKPIREQAENIIHLFTLTNLGAPAAF
KYFDTTIDRKRYTSTKEVLDATLIHQSITGLYETRIDLSQLGGD,

or an amino acid sequence having at least 70%, 75%, 80%, 85%, 90%, 95%, or 99% identity thereto.

[0486] In certain embodiments, the gene modifying polypeptide further comprises a spacer sequence between the DNA binding domain and the linker. In certain embodiments, the spacer sequence between the DNA binding domain and the linker comprises 1, 2, 3, 4, 5, 6, 7, 8, 9, or 10 amino acids. In certain embodiments, the spacer sequence between the DNA binding domain and the linker comprises the amino acid sequence GG.

[0487] In certain embodiments, the linker comprises a linker sequence of a gene modifying polypeptide of any one of SEQ ID NOs: 1-7743, or an amino acid sequence having at least 70%, 75%, 80%, 85%, 90%, 95%, or 99% identity thereto. In certain embodiments, the linker comprises a linker sequence of a gene modifying polypeptide as listed in any of Tables A1, T1, or T2, or an amino acid sequence having at least 70%, 75%, 80%, 85%, 90%, 95%, or 99% identity thereto. In certain embodiments, the linker comprises an amino acid sequence as listed in Table D or 10, or an amino acid sequence having at least 70%, 75%, 80%, 85%, 90%, 95%, or 99% identity thereto.

[0488] In certain embodiments, the gene modifying polypeptide further comprises a spacer sequence between the linker and the RT domain. In certain embodiments, the spacer sequence between the linker and the RT domain comprises 1, 2, 3, 4, 5, 6, 7, 8, 9, or 10 amino acids. In certain embodiments, the spacer sequence between the linker and the RT domain comprises the amino acid sequence GG.

[0489] In certain embodiments, the RT domain comprises a RT domain sequence of a gene modifying polypeptide of any one of SEQ ID NOs: 1-7743, or an amino acid sequence having at least 70%, 75%, 80%, 85%, 90%, 95%, or 99% identity thereto. In certain embodiments, the RT domain comprises a RT domain sequence of a gene modifying polypeptide as listed in any of Tables A1, T1, or T2, or an amino acid sequence having at least 70%, 75%, 80%, 85%, 90%, 95%, or 99% identity thereto. In certain embodiments, the RT domain comprises an amino acid sequence as listed in Table D or 6, or an amino acid sequence having at least 70%, 75%, 80%, 85%, 90%, 95%, or 99% identity thereto. In some embodiments, the RT domain has a length of about 400-500, 500-600, 600-700, 700-800, 800-900, or 900-1000 amino acids.

[0490] In certain embodiments, the gene modifying polypeptide further comprises a spacer sequence between the RT domain and the second NLS. In certain embodiments, the spacer sequence between the RT domain and the second NLS comprises 1, 2, 3, 4, 5, 6, 7, 8, 9, or 10 amino acids. In certain embodiments, the spacer sequence between the RT domain and the second NLS comprises the amino acid sequence AG.

[0491] In certain embodiments, the second NLS comprises a second NLS sequence of a gene modifying polypeptide of any one of SEQ ID NOs: 1-7743. In certain embodiments, the second NLS comprises a second NLS sequence of a gene modifying polypeptide as listed in any of Tables A1, T1, or T2. In certain embodiments, the second NLS sequence comprises a plurality of partial NLS sequences. In embodiments, the NLS sequence, e.g., the second NLS sequence, comprises a first partial NLS sequence, e.g., comprising the amino acid sequence KRTADGSEFE (SEQ ID NO: 11,097), or an amino acid sequence having at least 70%, 75%, 80%, 85%, 90%, 95%, or 99% identity thereto. In embodiments, the NLS sequence, e.g., the second NLS sequence, comprises a second partial NLS sequence. In embodiments, the NLS sequence, e.g., the second NLS sequence, comprises an SV40A5 NLS, e.g., a bipartite SV40A5 NLS, e.g., comprising the amino acid sequence KRTADGSEFESPKKKAKVE (SEQ ID NO: 11,098), or an amino acid sequence having at least 70%, 75%, 80%, 85%, 90%, 95%, or 99% identity thereto. In certain embodiments, the NLS sequence, e.g., the second NLS sequence, comprises the amino acid sequence KRTADGSEFEKRTADGSEFESPKKKAKVE (SEQ ID NO: 11,099), or an amino acid sequence having at least 70%, 75%, 80%, 85%, 90%, 95%, or 99% identity thereto.

[0492] In certain embodiments, the gene modifying polypeptide further comprises a spacer sequence between the second NLS and the T2A sequence and/or puromycin sequence. In certain embodiments, the spacer sequence between the second NLS and the T2A sequence and/or puromycin sequence comprises 1, 2, 3, 4, 5, 6, 7, 8, 9, or 10 amino acids. In certain embodiments, the spacer sequence between the second NLS and the T2A sequence and/or puromycin sequence comprises the amino acid sequence GSG.

### Linkers and RT Domains

[0493] In some embodiments, the gene modifying polypeptide comprises a linker (e.g., as described herein) and an RT domain (e.g., as described herein). In certain embodiments, the gene modifying polypeptide comprises, in N-terminal to C-terminal order, a linker (e.g., as described herein) and an RT domain (e.g., as described herein).

[0494] In certain embodiments, the linker comprises a linker sequence as listed in Table 10, or an amino acid sequence having at least 70%, 75%, 80%, 85%, 90%, 95%, or 99% identity thereto. In certain embodiments, the linker comprises a linker sequence of any one of SEQ ID NOs: 1-7743, or an amino acid sequence having at least 70%, 75%, 80%, 85%, 90%, 95%, or 99% identity thereto. In certain embodiments, the linker comprises a linker sequence of any one of SEQ ID NOs: 6001-7743, or an amino acid sequence having at least 70%, 75%, 80%, 85%, 90%, 95%, or 99% identity thereto. In certain embodiments, the linker comprises a linker sequence of any one of SEQ ID NOs: 4501-4541, or an amino acid sequence having at least 70%, 75%, 80%, 85%, 90%, 95%, or 99% identity thereto. In certain embodiments, the linker comprises a linker sequence of an exemplary gene modifying polypeptide listed in any of Tables A1, T1, or T2, or an amino acid sequence having at least 70%, 75%, 80%, 85%, 90%, 95%, or 99% identity thereto. In certain embodiments, the RT domain comprises an RT domain sequence as listed in Table 6, or an amino acid sequence having at least 70%, 75%, 80%, 85%, 90%, 95%, or 99% identity thereto. In certain embodiments, the RT domain comprises an RT domain sequence of an exemplary gene modifying polypeptide listed in any of Tables A1, T1, or T2, or an amino acid sequence having at least 70%, 75%, 80%, 85%, 90%, 95%, or 99% identity thereto.

[0495] In some embodiments, a gene modifying polypeptide comprises a portion of a gene modifying polypeptide of any one of SEQ ID NOs: 1-7743, wherein the portion comprises a linker and RT domain, or an amino acid sequence having at least 70%, 75%, 80%, 85%, 90%, 95%, or 99% identity to said portion.

[0496] In some embodiments, a gene modifying polypeptide comprises a linker of a gene modifying polypeptide of any one of SEQ ID NOs: 1-7743, or an amino acid sequence having at least 70%, 75%, 80%, 85%, 90%, 95%, or 99% identity to said linker. In some embodiments, a gene modifying polypeptide comprises a linker of a gene modifying polypeptide of any one of SEQ ID NOs: 6001-7743, or an amino acid sequence having at least 70%, 75%, 80%, 85%, 90%, 95%, or 99% identity to said linker. In some embodiments, a gene modifying polypeptide comprises a linker of a gene modifying polypeptide of any one of SEQ ID NOs: 4501-4541, or an amino acid sequence having at least 70%, 75%, 80%, 85%, 90%, 95%, or 99% identity to said linker. In some embodiments, a gene modifying polypeptide comprises a linker of a gene modifying polypeptide as listed in any of Tables A1, T1, or T2, or a linker comprising an amino acid sequence having at least 70%, 75%, 80%, 85%, 90%, 95%, or 99% identity thereto.

[0497] In some embodiments, a gene modifying polypeptide comprises an RT domain of a gene modifying polypeptide of any one of SEQ ID NOs: 1-7743, or an amino acid sequence having at least 70%, 75%, 80%, 85%, 90%, 95%, or 99% identity to said RT domain. In some embodiments, a gene modifying polypeptide comprises an RT domain of a gene modifying polypeptide of any one of SEQ ID NOs: 6001-7743, or an amino acid sequence having at least 70%, 75%, 80%, 85%, 90%, 95%, or 99% identity said RT domain. In some embodiments, a gene modifying polypeptide comprises an RT domain of a gene modifying polypeptide of any one of SEQ ID NOs: 4501-4541, or an amino acid sequence having at least 70%, 75%, 80%, 85%, 90%, 95%, or 99% identity said RT domain. In some embodiments, a gene modifying polypeptide comprises an RT domain of a gene modifying polypeptide as listed in any of Tables A1, T1, or T2, or an RT domain comprising an amino acid sequence having at least 70%, 75%, 80%, 85%, 90%, 95%, or 99% identity thereto.

[0498] In certain embodiments, the linker and the RT domain of a gene modifying polypeptide comprise the amino acid sequences of a linker and RT domain (or amino acid sequences having at least 70%, 75%, 80%, 85%, 90%, 95%, or 99% identity thereto) of a gene modifying polypeptide having the amino acid sequence of any one of SEQ ID NOs: 1-7743. In certain embodiments, the linker and the RT domain of a gene modifying polypeptide comprise amino acid sequences of a linker and RT domain having at least 80% identity to the linker and RT domains of any one of SEQ ID NOs: 1-7743. In certain embodiments, the linker and the RT domain of a gene modifying polypeptide comprise amino acid sequences of a linker and RT domain having at least 90% identity to the linker and RT domains of any one of SEQ ID NOs: 1-7743. In certain embodiments, the linker and the RT domain of a gene modifying polypeptide comprise amino acid sequences of a linker and RT domain having at least 95% identity to the linker and RT domains of any one of SEQ ID NOs: 1-7743. In certain embodiments, the linker and the RT domain of a gene modifying polypeptide comprise amino acid sequences of a linker and RT domain having at least 99% identity to the linker and RT domains of any one of SEQ ID NOs: 1-7743. In certain embodiments, the linker and the RT domain of a gene modifying polypeptide comprise the amino acid sequences of a linker and RT domain (or amino acid sequences having at least 70%, 75%, 80%, 85%, 90%, 95%, or 99% identity thereto) of a gene modifying polypeptide having the amino acid sequence of any one of SEQ ID NOs: 6001-7743. In certain embodiments, the linker and the RT domain of a gene modifying polypeptide comprise the amino acid sequences of a linker and RT domain (or amino acid sequences having at least 70%, 75%, 80%, 85%, 90%, 95%, or 99% identity thereto) of a gene modifying polypeptide having the amino acid sequence of any one of SEQ ID NOs: 4501-4541. In certain embodiments, the linker and the RT domain of a gene modifying polypeptide comprise the amino acid sequences of a linker and RT domain (or amino acid sequences having at least 70%, 75%, 80%, 85%, 90%, 95%, or 99% identity thereto) from a single row of any of Tables A1, T1, or T2 (e.g., from a single exemplary gene modifying polypeptide as listed in any of Tables A1, T1, or T2).

[0499] In certain embodiments, the linker and the RT domain of a gene modifying polypeptide comprise the amino acid sequences of a linker and RT domain (or amino acid sequences having at least 70%, 75%, 80%, 85%, 90%, 95%, or 99% identity thereto) from two different amino acid sequences selected from SEQ ID NOs: 1-7743. In certain embodiments, the linker and the RT domain of a gene modifying polypeptide comprise the amino acid sequences of a linker and RT domain (or amino acid sequences having at least 70%, 75%, 80%, 85%, 90%, 95%, or 99% identity thereto) from different rows of any of Tables A1, T1, or T2.

[0500] In certain embodiments, the gene modifying polypeptide further comprises a first NLS (e.g., a 5′ NLS), e.g., as described herein. In certain embodiments, the gene modifying polypeptide further comprises a second NLS (e.g., a 3′ NLS), e.g., as described herein. In certain embodiments, the gene modifying polypeptide further comprises an N-terminal methionine residue.

### RT Families and Mutants

[0501] In certain embodiments, a gene modifying polypeptide comprises the amino acid sequence of an RT domain sequence from a family selected from: AVIRE, BAEVM, FFV, FLV, FOAMV, GALV, KORV, MLVAV, MLVBM, MLVCB, MLVFF, MLVMS, PERV, SFV1, SFV3L, WMSV, XMRV6, BLVAU, BLVJ, HTLIA, HTLIC, HTLIL, HTL32, HTL3P, HTLV2, JSRV, MLVF5, MLVRD, MMTVB, MPMV, SFVCP, SMRVH, SRV1, SRV2, and WDSV. In certain embodiments, a gene modifying polypeptide comprises comprises the amino acid sequence of an RT domain sequence from a family selected from: AVIRE, BAEVM, FFV, FLV, FOAMV, GALV, KORV, MLVAV, MLVBM, MLVCB, MLVFF, MLVMS, PERV, SFV1, SFV3L, WMSV, and XMRV6.

[0502] In certain embodiments, a gene modifying polypeptide comprises comprises the amino acid sequence of an RT domain sequence from an MLVMS RT domain. In embodiments, the amino acid sequence of an RT domain sequence comprises one or more point mutations as listed in column 1 of Table M1, or a point mutation corresponding thereto. In embodiments, the amino acid sequence of an RT domain sequence comprises one or more point mutations as listed in column 3 of Table M1 (Gen1 MLVMS), or a point mutation corresponding thereto. In embodiments, the amino acid sequence of an RT domain sequence comprises one or more point mutations at an amino acid position of the RT domain as listed in columns 1 and 2 of Table M2, or an amino acid position corresponding thereto.

[0503] In certain embodiments, a gene modifying polypeptide comprises comprises the amino acid sequence of an RT domain sequence from an AVIRE RT domain. In embodiments, the amino acid sequence of an RT domain sequence comprises one or more point mutations as listed in column 2 of Table M1, or a point mutation corresponding thereto. In embodiments, the amino acid sequence of an RT domain sequence comprises one or more point mutations as listed in column 4 of Table M1 (Gen2 AVIRE), or a point mutation corresponding thereto. In embodiments, the amino acid sequence of an RT domain sequence comprises one or more point mutations at an amino acid position of the RT domain as listed in columns 3 and 4 of Table M2, or an amino acid position corresponding thereto. In certain embodiments, the RT domain comprises an IENSSP (SEQ ID NO: 22003) (e.g., at the C-terminus).

TABLE M1
Exemplary point mutations in MLVMS and AVIRE RT domains

| RT-linker filing | Corresponding | Gen1 MLVMS | Gen2 AVIRE |
|---|---|---|---|
| (MLVMS) | AVIRE | (PLV4921) | (PLV10990) |
| | | H8Y | |
| P51L | Q51L | | |
| S67R | T67R | | |
| E67K | E67K | | |
| E69K | E69K | | |
| T197A | T197A | | |
| D200N | D200N | D200N | D200N |
| H204R | N204R | | |
| E302K | E302K | | |
| | | T306K | T306K |
| F309N | Y309N | | |
| W313F | W313F | W313F | W313F |
| T330P | G330P | T330P | G330P |
| L435G | T436G | | |
| N454K | N455K | | |
| D524G | D526G | | |
| E562Q | E564Q | | |
| D583N | D585N | | |
| H594Q | H596Q | | |
| L603W | L605W | L603W | L605W |
| D653N | D655N | | |
| L671P | L673P | | |

IENSSP (SEQ ID NO: 22003)
at C-term

TABLE M2
Positions that can be mutated in exemplary MLVMS and AVIRE
RT domains
WT residue & position

| | MLVMS | | AVIRE |
|---|---|---|---|
| MLVMS aa | position # * | AVIRE aa | position # * |
| H | 8 | Y | 8 |
| P | 51 | Q | 51 |
| S | 67 | T | 67 |
| E | 69 | E | 69 |
| T | 197 | T | 197 |
| D | 200 | D | 200 |
| H | 204 | N | 204 |
| E | 302 | E | 302 |
| T | 306 | T | 306 |
| F | 309 | Y | 309 |
| W | 313 | W | 313 |
| T | 330 | G | 330 |
| L | 435 | T | 436 |
| N | 454 | N | 455 |
| D | 524 | D | 526 |
| E | 562 | E | 564 |
| D | 583 | D | 585 |
| H | 594 | H | 596 |
| L | 603 | L | 605 |
| D | 653 | D | 655 |
| L | 671 | S | 673 |

[0504] In certain embodiments, a gene modifying polypeptide comprises a gamma retrovirus derived RT domain. In certain embodiments, the gamma retrovirus-derived RT domain of a gene modifying polypeptide comprises the amino acid sequence of an RT domain sequence from a family selected from: AVIRE, BAEVM, FFV, FLV, FOAMV, GALV, KORV, MLVAV, MLVBM, MLVCB, MLVFF, MLVMS, PERV, SFV1, SFV3L, WMSV, and XMRV6. In some embodiments, the gamma retrovirus-derived RT domain of a gene modifying polypeptide is not derived from PERV. In some embodiments, said RT includes one, two, three, four, five, six or more mutations shown in Table 2A and corresponding to mutations D200N, L603W, T330P, D524G, E562Q, D583N, P51L, S67R, E67K, T197A, H204R, E302K, F309N, W313F, L435G, N454K, H594Q, L671P, E69K, or D653N in the RT domain of murine leukemia virus reverse transcriptase. In some embodiments, the gene modifying polypeptide further comprises a linker having at least 99% identity to a linker domains of any one of SEQ ID NOs: 1-7743. In some embodiments, the gene modifying polypeptide further comprises a linker having at least 99% or 100% identity to SEQ ID NO: 5217 or SEQ ID NO:11,041.

[0505] In embodiments, the RT domain comprises the amino acid sequence of an RT domain of an AVIRE RT (e.g., an AVIRE_P03360 sequence, e.g., SEQ ID NO: 8001), or an amino acid sequence having at least 70%, 75%, 80%, 85%, 90%, 95%, or 99% identity thereto. In some embodiments, the RT domain comprises the amino acid sequence of an AVIRE RT further comprising one, two, three, four, or five mutations selected from the group consisting of D200N, G330P, L605W, T306K, and W313F, or a corresponding position in a homologous RT domain. In some embodiments, the RT domain comprises the amino acid sequence of an AVIRE RT further comprising one, two, or three mutations selected from the group consisting of D200N, G330P, and L605W, or a corresponding position in a homologous RT domain.

[0506] In embodiments, the RT domain comprises the amino acid sequence of an RT domain of a BAEVM RT (e.g., an BAEVM_P10272 sequence, e.g., SEQ ID NO: 8004), or an amino acid sequence having at least 70%, 75%, 80%, 85%, 90%, 95%, or 99% identity thereto. In some embodiments, the RT domain comprises the amino acid sequence of a BAEVM RT further comprising one, two, three, four, or five mutations selected from the group consisting of D198N, E328P, L602W, T304K, and W311F, or a corresponding position in a homologous RT domain. In some embodiments, the RT domain comprises the amino acid sequence of a BAEVM RT further comprising one, two, or three mutations selected from the group consisting of D198N, E328P, and L602W, or a corresponding position in a homologous RT domain.

[0507] In embodiments, the RT domain comprises the amino acid sequence of an RT domain of an FFV RT (e.g., an FFV_093209 sequence, e.g., SEQ ID NO: 8012), or an amino acid sequence having at least 70%, 75%, 80%, 85%, 90%, 95%, or 99% identity thereto. In some embodiments, the RT domain comprises the amino acid sequence of an FFV RT further comprising one, two, three, or four mutations selected from the group consisting of D21N, T293N, T419P, and L393K, or a corresponding position in a homologous RT domain. In some embodiments, the RT domain comprises the amino acid sequence of an FFV RT further comprising one, two, or three mutations selected from the group consisting of D21N, T293N, and T419P, or a corresponding position in a homologous RT domain. In some embodiments, the RT domain comprises the amino acid sequence of an FFV RT further comprising the mutation D21N. In some embodiments, the RT domain comprises the amino acid sequence of an FFV RT further comprising one, two, or three mutations selected from the group consisting of T207N, T333P, and L307K, or a corresponding position in a homologous RT domain. In some embodiments, the RT domain comprises the amino acid sequence of an FFV RT further comprising one or two mutations selected from the group consisting of T207N and T333P, or a corresponding position in a homologous RT domain.

[0508] In embodiments, the RT domain comprises the amino acid sequence of an RT domain of an FLV RT (e.g., an FLV_P10273 sequence, e.g., SEQ ID NO: 8019), or an amino acid sequence having at least 70%, 75%, 80%, 85%, 90%, 95%, or 99% identity thereto. In some embodiments, the RT domain comprises the amino acid sequence of an FLV RT further comprising one, two, three, or four mutations selected from the group consisting of D199N, L602W, T305K, and W312F, or a corresponding position in a homologous RT domain. In some embodiments, the RT domain comprises the amino acid sequence of an FLV RT further comprising one or two mutations selected from the group consisting of D199N and L602W, or a corresponding position in a homologous RT domain.

[0509] In embodiments, the RT domain comprises the amino acid sequence of an RT domain of a FOAMV RT (e.g., an FOAMV_P14350 sequence, e.g., SEQ ID NO: 8021), or an amino acid sequence having at least 70%, 75%, 80%, 85%, 90%, 95%, or 99% identity thereto. In some embodiments, the RT domain comprises the amino acid sequence of an FOAMV RT further comprising one, two, three, or four mutations selected from the group consisting of D24N, T296N, S420P, and L396K, or a corresponding position in a homologous RT domain. In some embodiments, the RT domain comprises the amino acid sequence of an FOAMV RT further comprising one, two, or three mutations selected from the group consisting of D24N, T296N, and S420P, or a corresponding position in a homologous RT domain. In some embodiments, the RT domain comprises the amino acid sequence of an FOAMV RT further comprising the mutation D24N, or a corresponding position in a homologous RT domain. In some embodiments, the RT domain comprises the amino acid sequence of an FOAMV RT further comprising one, two, or three mutations selected from the group consisting of T207N, S331P, and L307K, or a corresponding position in a homologous RT domain. In some embodiments, the RT domain comprises the amino acid sequence of an FOAMV RT further comprising one or two mutations selected from the group consisting of T207N and S331P, or a corresponding position in a homologous RT domain.

[0510] In embodiments, the RT domain comprises the amino acid sequence of an RT domain of a GALV RT (e.g., an GALV_P21414 sequence, e.g., SEQ ID NO: 8027), or an amino acid sequence having at least 70%, 75%, 80%, 85%, 90%, 95%, or 99% identity thereto. In some embodiments, the RT domain comprises the amino acid sequence of a GALV RT further comprising one, two, three, four, or five mutations selected from the group consisting of D198N, E328P, L600W, T304K, and W311F, or a corresponding position in a homologous RT domain. In some embodiments, the RT domain comprises the amino acid sequence of a GALV RT further comprising one, two, or three mutations selected from the group consisting of D198N, E328P, and L600W, or a corresponding position in a homologous RT domain.

[0511] In embodiments, the RT domain comprises the amino acid sequence of an RT domain of a KORV RT (e.g., an KORV_Q9TTC1 sequence, e.g., SEQ ID NO: 8047), or an amino acid sequence having at least 70%, 75%, 80%, 85%, 90%, 95%, or 99% identity thereto. In some embodiments, the RT domain comprises the amino acid sequence of a GALV RT further comprising one, two, three, four, five, or six mutations selected from the group consisting of D32N, D322N, E452P, L274W, T428K, and W435F, or a corresponding position in a homologous RT domain. In some embodiments, the RT domain comprises the amino acid sequence of a GALV RT further comprising one, two, three, or four mutations selected from the group consisting of D32N, D322N, E452P, and L274W, or a corresponding position in a homologous RT domain. In some embodiments, the RT domain comprises the amino acid sequence of a GALV RT further comprising the mutation D32N. In some embodiments, the RT domain comprises the amino acid sequence of a KORV RT further comprising one, two, three, four, or five mutations selected from the group consisting of D23IN, E361P, L633W, T337K, and W344F, or a corresponding position in a homologous RT domain. In some embodiments, the RT domain comprises the amino acid sequence of a KORV RT further comprising one, two, or three mutations selected from the group consisting of D23IN, E361P, and L633W, or a corresponding position in a homologous RT domain.

[0512] In embodiments, the RT domain comprises the amino acid sequence of an RT domain of a MLVAV RT (e.g., an MLVAV_P03356 sequence, e.g., SEQ ID NO: 8053), or an amino acid sequence having at least 70%, 75%, 80%, 85%, 90%, 95%, or 99% identity thereto. In some embodiments, the RT domain comprises the amino acid sequence of a MLVAV RT further comprising one, two, three, four, or five mutations selected from the group consisting of D200N, T330P, L603W, T306K, and W313F, or a corresponding position in a homologous RT domain. In some embodiments, the RT domain comprises the amino acid sequence of a MLVAV RT further comprising one, two, or three mutations selected from the group consisting of D200N, T330P, and L603W, or a corresponding position in a homologous RT domain.

[0513] In embodiments, the RT domain comprises the amino acid sequence of an RT domain of a MLVBM RT (e.g., an MLVBM_Q7SVK7 sequence, e.g., SEQ ID NO: 8056), or an amino acid sequence having at least 70%, 75%, 80%, 85%, 90%, 95%, or 99% identity thereto. In some embodiments, the RT domain comprises the amino acid sequence of a MLVBM RT further comprising one, two, three, four, or five mutations selected from the group consisting of D199N, T329P, L602W, T305K, and W312F, or a corresponding position in a homologous RT domain. In some embodiments, the RT domain comprises the amino acid sequence of a ML VBM RT further comprising one, two, and three mutations selected from the group consisting of D200N, T330P, and L603W, or a corresponding position in a homologous RT domain.

[0514] In embodiments, the RT domain comprises the amino acid sequence of an RT domain of a MLVCB RT (e.g., an MLVCB_P08361 sequence, e.g., SEQ ID NO: 8062), or an amino acid sequence having at least 70%, 75%, 80%, 85%, 90%, 95%, or 99% identity thereto. In some embodiments, the RT domain comprises the amino acid sequence of a ML VCB RT further comprising one, two, three, four, or five mutations selected from the group consisting of D200N, T330P, L603W, T306K, and W313F, or a corresponding position in a homologous RT domain. In some embodiments, the RT domain comprises the amino acid sequence of a MLVCB RT further comprising one, two, and three mutations selected from the group consisting of D200N, T330P, and L603W, or a corresponding position in a homologous RT domain.

[0515] In embodiments, the RT domain comprises the amino acid sequence of an RT domain of a MLVFF RT, or an amino acid sequence having at least 70%, 75%, 80%, 85%, 90%, 95%, or 99% identity thereto. In some embodiments, the RT domain comprises the amino acid sequence of a ML VFF RT further comprising one, two, three, four, or five mutations selected from the group consisting of D200N, T330P, L603W, T306K, and W313F, or a corresponding position in a homologous RT domain. In some embodiments, the RT domain comprises the amino acid sequence of a MLVFF RT further comprising one, two, and three mutations selected from the group consisting of D200N, T330P, and L603W, or a corresponding position in a homologous RT domain.

[0516] In embodiments, the RT domain comprises the amino acid sequence of an RT domain of a MLVMS RT (e.g., an MLVMS_reference sequence, e.g., SEQ ID NO: 8137; or an MLVMS_P03355 sequence, e.g., SEQ ID NO: 8070), or an amino acid sequence having at least 70%, 75%, 80%, 85%, 90%, 95%, or 99% identity thereto. In some embodiments, the RT domain comprises the amino acid sequence of a MLVMS RT further comprising one, two, three, four, five, or six mutations selected from the group consisting of D200N, T330P, L603W, T306K, W313F, and H8Y, or a corresponding position in a homologous RT domain. In some embodiments, the RT domain comprises the amino acid sequence of a MLVMS RT further comprising one, two, three, four, or five mutations selected from the group consisting of D200N, T330P, L603W, T306K, and W313F, or a corresponding position in a homologous RT domain. In some embodiments, the RT domain comprises the amino acid sequence of a MLVMS RT further comprising one, two, or three mutations selected from the group consisting of D200N, T330P, and L603W, or a corresponding position in a homologous RT domain.

[0517] In embodiments, the RT domain comprises the amino acid sequence of an RT domain of a PERV RT (e.g., an PERV_Q4VFZ2 sequence, e.g., SEQ ID NO: 8099), or an amino acid sequence having at least 70%, 75%, 80%, 85%, 90%, 95%, or 99% identity thereto. In some embodiments, the RT domain comprises the amino acid sequence of a PERV RT further comprising one, two, three, four, or five mutations selected from the group consisting of D196N, E326P, L599W, T302K, and W309F, or a corresponding position in a homologous RT domain. In some embodiments, the RT domain comprises the amino acid sequence of a PERV RT further comprising one, two, or three mutations selected from the group consisting of D196N, E326P, and L599W, or a corresponding position in a homologous RT domain.

[0518] In embodiments, the RT domain comprises the amino acid sequence of an RT domain of a SFV1 RT (e.g., an SFV1_P23074 sequence, e.g., SEQ ID NO: 8105), or an amino acid sequence having at least 70%, 75%, 80%, 85%, 90%, 95%, or 99% identity thereto. In some embodiments, the RT domain comprises the amino acid sequence of a SFV1 RT further comprising one, two, three, or four mutations selected from the group consisting of D24N, T296N, N420P, and L396K, or a corresponding position in a homologous RT domain. In some embodiments, the RT domain comprises the amino acid sequence of a SFV1 RT further comprising one, two, or three mutations selected from the group consisting of D24N, T296N, and N420P, or a corresponding position in a homologous RT domain. In some embodiments, the RT domain comprises the amino acid sequence of a SFV1 RT further comprising the D24N, or a corresponding position in a homologous RT domain.

[0519] In embodiments, the RT domain comprises the amino acid sequence of an RT domain of a SFV3L RT (e.g., an SFV3L_P27401 sequence, e.g., SEQ ID NO: 8111), or an amino acid sequence having at least 70%, 75%, 80%, 85%, 90%, 95%, or 99% identity thereto. In some embodiments, the RT domain comprises the amino acid sequence of a SFV3L RT further comprising one, two, three, or four mutations selected from the group consisting of D24N, T296N, N422P, and L396K, or a corresponding position in a homologous RT domain. In some embodiments, the RT domain comprises the amino acid sequence of a SFV3L RT further comprising one, two, or three mutations selected from the group consisting of D24N, T296N, and N422P, or a corresponding position in a homologous RT domain. In some embodiments, the RT domain comprises the amino acid sequence of a SFV3L RT further comprising the mutation D24N, or a corresponding position in a homologous RT domain. In some embodiments, the RT domain comprises the amino acid sequence of a SFV3L RT further comprising one, two, or three mutations selected from the group consisting of T307N, N333P, and L307K, or a corresponding position in a homologous RT domain. In some embodiments, the RT domain comprises the amino acid sequence of a SFV3L RT further comprising one or two mutations selected from the group consisting of T307N and N333P, or a corresponding position in a homologous RT domain.

[0520] In embodiments, the RT domain comprises the amino acid sequence of an RT domain of a WMSV RT (e.g., an WMSV_P03359 sequence, e.g., SEQ ID NO: 8131), or an amino acid sequence having at least 70%, 75%, 80%, 85%, 90%, 95%, or 99% identity thereto. In some embodiments, the RT domain comprises the amino acid sequence of a WMSV RT further comprising one, two, three, four, or five mutations selected from the group consisting of D198N, E328P, L600W, T304K, and W311F, or a corresponding position in a homologous RT domain. In some embodiments, the RT domain comprises the amino acid sequence of a WMSV RT further comprising one, two, or three mutations selected from the group consisting of D198N, E328P, and L600W, or a corresponding position in a homologous RT domain.

[0521] In embodiments, the RT domain comprises the amino acid sequence of an RT domain of a XMRV6 RT (e.g., an XMRV6_AIZ651 sequence, e.g., SEQ ID NO: 8134), or an amino acid sequence having at least 70%, 75%, 80%, 85%, 90%, 95%, or 99% identity thereto. In some embodiments, the RT domain comprises the amino acid sequence of a XMRV6 RT further comprising one, two, three, four, or five mutations selected from the group consisting of D200N, T330P, L603W, T306K, and W313F, or a corresponding position in a homologous RT domain. In some embodiments, the RT domain comprises the amino acid sequence of a XMRV6 RT further comprising one, two, or three mutations selected from the group consisting of D200N, T330P, and L603W, or a corresponding position in a homologous RT domain.

[0522] In certain embodiments, the RT domain of a gene modifying polypeptide comprises the amino acid sequence of an RT domain of an AVIRE RT, or an amino acid sequence having at least 70%, 75%, 80%, 85%, 90%, 95%, or 99% identity thereto. In embodiments, the RT domain comprises the amino acid sequence of an RT domain comprised in a sequence listed in column 1 of Table A5, or an amino acid sequence having at least 70%, 75%, 80%, 85%, 90%, 95%, or 99% identity thereto. In some embodiments, the gene modifying polypeptide further comprises a linker having at least 99% or 100% identity to SEQ ID NO: 5217 or SEQ ID NO:11,041.

[0523] In certain embodiments, the RT domain of a gene modifying polypeptide comprises the amino acid sequence of an RT domain of an MLVMS RT, or an amino acid sequence having at least 70%, 75%, 80%, 85%, 90%, 95%, or 99% identity thereto. In embodiments, the RT domain comprises the amino acid sequence of an RT domain comprised in a sequence listed in any of columns 2-6 of Table A5, or an amino acid sequence having at least 70%, 75%, 80%, 85%, 90%, 95%, or 99% identity thereto. In some embodiments, the gene modifying polypeptide further comprises a linker having at least 99% or 100% identity to SEQ ID NO: 5217 or SEQ ID NO:11,041.

TABLE A5
Exemplary gene modifying polypeptides comprising an A VIRE RT
domain or an MLVMS RT domain.

| AVIRE | | | | | |
|---|---|---|---|---|---|
| SEQ ID | | | | | |
| NOS: | MLVMS SEQ ID NOS: | | | | |
| 1 | 2704 | 3007 | 3038 | 2638 | 2930 |
| 2 | 2706 | 3007 | 3038 | 2639 | 2930 |
| 3 | 2708 | 3008 | 3039 | 2639 | 2931 |
| 4 | 2709 | 3008 | 3039 | 2640 | 2931 |
| 5 | 2709 | 3009 | 3040 | 2640 | 2932 |
| 6 | 2710 | 3010 | 3040 | 2641 | 2932 |
| 7 | 2957 | 3010 | 3041 | 2641 | 2933 |
| 9 | 2957 | 3011 | 3041 | 2642 | 2933 |
| 10 | 2958 | 3012 | 3042 | 2642 | 2934 |
| 12 | 2959 | 3012 | 3042 | 2643 | 2934 |
| 13 | 2960 | 3013 | 3043 | 2643 | 2935 |
| 14 | 2962 | 3013 | 3043 | 2644 | 2935 |
| 6076 | 6042 | 3014 | 3044 | 2644 | 2936 |
| 6143 | 6068 | 3014 | 3044 | 2645 | 2936 |
| 6200 | 6097 | 3015 | 3045 | 2645 | 2937 |
| 6254 | 6136 | 3015 | 3045 | 2646 | 2937 |
| 6274 | 6156 | 3016 | 3046 | 2646 | 2938 |
| 6315 | 6215 | 3016 | 3046 | 2647 | 2938 |
| 6328 | 6216 | 3017 | 3047 | 2647 | 2939 |
| 6337 | 6301 | 3018 | 3047 | 2648 | 2939 |
| 6403 | 6352 | 3018 | 3048 | 2648 | 2940 |
| 6420 | 6365 | 3019 | 3048 | 2649 | 2940 |
| 6440 | 6411 | 3019 | 3049 | 2649 | 2941 |
| 6513 | 6436 | 3020 | 3049 | 2650 | 2941 |
| 6552 | 6458 | 3020 | 3050 | 2650 | 2942 |
| 6613 | 6459 | 3021 | 3051 | 2651 | 2942 |
| 6671 | 6524 | 3021 | 3051 | 2651 | 2943 |
| 6822 | 6562 | 3022 | 3052 | 2652 | 2943 |
| 6840 | 6563 | 3023 | 3052 | 2652 | 2944 |
| 6884 | 6699 | 3023 | 3053 | 2653 | 2945 |
| 6907 | 6865 | 3024 | 3053 | 2653 | 2945 |
| 6970 | 7022 | 3024 | 3054 | 2654 | 2946 |
| 7025 | 7037 | 3025 | 3054 | 2655 | 2946 |
| 7052 | 7088 | 3025 | 3055 | 2655 | 2947 |
| 7078 | 7116 | 3026 | 3055 | 2656 | 2947 |
| 7243 | 7175 | 3026 | 3056 | 2656 | 2948 |
| 7253 | 7200 | 3027 | 3056 | 2657 | 2948 |
| 7318 | 7206 | 3027 | 3057 | 2657 | 2949 |
| 7379 | 7277 | 3028 | 3057 | 2658 | 2949 |
| 7486 | 7294 | 3028 | 3058 | 2658 | 2950 |
| 7524 | 7330 | 3029 | 3058 | 2659 | 2950 |
| 7668 | 7411 | 3030 | 3059 | 2659 | 2951 |
| 7680 | 7455 | 3030 | 3059 | 2660 | 2951 |
| 7720 | 7477 | 3031 | 3060 | 2660 | 2952 |
| 1137 | 7511 | 3031 | 3060 | 2661 | 2952 |
| 1138 | 7538 | 3032 | 3061 | 2661 | 2953 |
| 1139 | 7559 | 3032 | 3061 | 2662 | 2953 |
| 1140 | 7560 | 3033 | 3062 | 2662 | 2954 |
| 1141 | 7593 | 3033 | 3062 | 2663 | 2954 |
| 1142 | 7594 | 3034 | 3063 | 2663 | 2955 |
| 1143 | 7607 | 3034 | 3063 | 2664 | 2955 |
| 1144 | 7623 | 6025 | 3064 | 2664 | 6485 |
| 1145 | 7638 | 6041 | 3064 | 2665 | 6486 |
| 1146 | 7717 | 6043 | 3065 | 2665 | 6504 |
| 1147 | 7731 | 6098 | 3065 | 2666 | 6505 |
| 1148 | 7732 | 6099 | 3066 | 2666 | 6595 |
| 1149 | 2711 | 6180 | 3066 | 2667 | 6596 |
| 1150 | 2711 | 6182 | 3067 | 2667 | 6751 |
| 1151 | 2712 | 6237 | 3067 | 2668 | 6752 |
| 1152 | 2712 | 6238 | 3068 | 2668 | 6777 |
| 1153 | 2713 | 6311 | 3068 | 2669 | 6778 |
| 1154 | 2713 | 6312 | 3069 | 2669 | 7172 |
| 1155 | 2714 | 6578 | 3069 | 2670 | 7174 |
| 1156 | 2714 | 6579 | 3070 | 2670 | 7313 |
| 1157 | 2715 | 6663 | 3070 | 2671 | 7314 |
| 1158 | 2715 | 6664 | 3071 | 2671 | |
| 1159 | 2716 | 6708 | 3071 | 2672 | |
| 1160 | 2716 | 6709 | 3072 | 2672 | |
| 1161 | 2717 | 6809 | 3072 | 2673 | |
| 1162 | 2717 | 6831 | 3073 | 2673 | |
| 1163 | 2718 | 6832 | 3073 | 2674 | |
| 1164 | 2718 | 6864 | 3074 | 2674 | |
| 1165 | 2719 | 6866 | 3074 | 2675 | |
| 1166 | 2719 | 7089 | 3075 | 2675 | |
| 1167 | 2720 | 7157 | 3075 | 2676 | |
| 6015 | 2720 | 7159 | 3076 | 2676 | |
| 6029 | 2721 | 7173 | 3076 | 2677 | |
| 6045 | 2721 | 7176 | 3077 | 2677 | |
| 6077 | 2722 | 7293 | 3077 | 2678 | |
| 6129 | 2722 | 7295 | 3078 | 2678 | |
| 6144 | 2723 | 7343 | 3078 | 2679 | |
| 6164 | 2723 | 7393 | 3079 | 2680 | |
| 6201 | 2724 | 7394 | 3079 | 2680 | |
| 6227 | 2724 | 7425 | 3080 | 2681 | |
| 6244 | 2725 | 7426 | 3080 | 2681 | |
| 6250 | 2725 | 7444 | 3081 | 2682 | |
| 6264 | 2726 | 7445 | 3081 | 2682 | |
| 6289 | 2726 | 7476 | 3082 | 2683 | |
| 6304 | 2727 | 7478 | 3082 | 2683 | |
| 6316 | 2727 | 7496 | 3083 | 2684 | |
| 6384 | 2728 | 7497 | 3083 | 2684 | |
| 6421 | 2728 | 7537 | 3084 | 2685 | |
| 6441 | 2729 | 7539 | 3084 | 2685 | |
| 6492 | 2729 | 2780 | 3085 | 2686 | |
| 6514 | 2730 | 2780 | 3085 | 2686 | |
| 6530 | 2730 | 2781 | 3086 | 2687 | |
| 6569 | 2731 | 2781 | 3086 | 2687 | |
| 6584 | 2731 | 2782 | 3087 | 2688 | |
| 6621 | 2732 | 2782 | 3087 | 2688 | |
| 6651 | 2732 | 2783 | 3088 | 2689 | |
| 6659 | 2733 | 2783 | 3088 | 2689 | |
| 6683 | 2734 | 2784 | 3089 | 2690 | |
| 6703 | 2734 | 2784 | 3089 | 2690 | |
| 6727 | 2735 | 2785 | 3090 | 2691 | |
| 6732 | 2735 | 2785 | 3090 | 2692 | |
| 6745 | 2736 | 2786 | 3091 | 2692 | |
| 6755 | 2736 | 2786 | 3091 | 2693 | |
| 6784 | 2737 | 2787 | 3092 | 2693 | |
| 6817 | 2737 | 2787 | 3092 | 2694 | |
| 6823 | 2738 | 2788 | 3093 | 2694 | |
| 6841 | 2739 | 2788 | 3093 | 2695 | |
| 6871 | 2740 | 2789 | 3094 | 2695 | |
| 6885 | 2740 | 2789 | 3095 | 2696 | |
| 6898 | 2741 | 2790 | 3095 | 2696 | |
| 6908 | 2741 | 2790 | 3096 | 2697 | |
| 6933 | 2742 | 2791 | 3096 | 2697 | |
| 6971 | 2742 | 2791 | 3097 | 2698 | |
| 7009 | 2743 | 2792 | 3097 | 2698 | |
| 7018 | 2743 | 2792 | 3098 | 2699 | |
| 7045 | 2744 | 2793 | 3098 | 2699 | |
| 7053 | 2744 | 2793 | 3099 | 2700 | |
| 7068 | 2745 | 2794 | 3099 | 2700 | |
| 7079 | 2745 | 2794 | 3100 | 2701 | |
| 7096 | 2746 | 2795 | 3100 | 2701 | |
| 7104 | 2746 | 2795 | 3101 | 2702 | |
| 7122 | 2747 | 2796 | 3101 | 2702 | |
| 7151 | 2747 | 2796 | 3102 | 2703 | |
| 7163 | 2748 | 2797 | 3102 | 2703 | |
| 7181 | 2748 | 2797 | 3103 | 2862 | |
| 7244 | 2749 | 2798 | 3103 | 2862 | |
| 7273 | 2750 | 2798 | 3104 | 2863 | |
| 7319 | 2750 | 2799 | 3104 | 2863 | |
| 7336 | 2751 | 2799 | 3105 | 2864 | |
| 7380 | 2751 | 2800 | 3105 | 2864 | |
| 7402 | 2752 | 2800 | 3106 | 2865 | |
| 7462 | 2752 | 2801 | 3106 | 2865 | |
| 7487 | 2753 | 2801 | 3107 | 2866 | |
| 7525 | 2753 | 2802 | 3107 | 2866 | |
| 7569 | 2754 | 2802 | 3108 | 2867 | |
| 7626 | 2754 | 2803 | 3108 | 2867 | |
| 7689 | 2755 | 2803 | 3109 | 2868 | |
| 7707 | 2755 | 2804 | 3109 | 2868 | |
| 7721 | 2756 | 2804 | 3110 | 2869 | |
| 1371 | 2756 | 2805 | 3110 | 2869 | |
| 1372 | 2757 | 2805 | 3111 | 2870 | |
| 1373 | 2758 | 2806 | 3111 | 2870 | |
| 1374 | 2758 | 2806 | 3112 | 2871 | |
| 1375 | 2759 | 2807 | 3112 | 2871 | |
| 1376 | 2759 | 2807 | 3113 | 2872 | |
| 1377 | 2760 | 2808 | 3113 | 2872 | |
| 1378 | 2760 | 2808 | 3114 | 2873 | |
| 1379 | 2761 | 2809 | 3114 | 2873 | |
| 1380 | 2761 | 2809 | 3115 | 2874 | |
| 1381 | 2762 | 2810 | 3115 | 2874 | |
| 1382 | 2762 | 2810 | 3116 | 2875 | |
| 1383 | 2763 | 2811 | 3116 | 2875 | |
| 1384 | 2763 | 2811 | 3117 | 2876 | |
| 1385 | 2764 | 2812 | 3117 | 2876 | |
| 1386 | 2764 | 2812 | 3118 | 2877 | |
| 1387 | 2765 | 2813 | 3118 | 2877 | |
| 1388 | 2765 | 2813 | 3119 | 2878 | |
| 1389 | 2766 | 2814 | 3119 | 2878 | |
| 1390 | 2766 | 2814 | 3120 | 2879 | |
| 1391 | 2767 | 2815 | 3120 | 2879 | |
| 1392 | 2767 | 2815 | 3121 | 2880 | |
| 1393 | 2768 | 2816 | 3121 | 2880 | |
| 1394 | 2768 | 2816 | 3122 | 2881 | |
| 1395 | 2769 | 2817 | 3122 | 2881 | |
| 1396 | 2769 | 2817 | 3123 | 2882 | |
| 1397 | 2770 | 2818 | 3123 | 2882 | |
| 1398 | 2770 | 2818 | 3124 | 2883 | |
| 1399 | 2771 | 2819 | 3124 | 2883 | |
| 1400 | 2771 | 2819 | 3125 | 2884 | |
| 1401 | 2772 | 2820 | 3125 | 2884 | |
| 1402 | 2773 | 2820 | 3126 | 2885 | |
| 1403 | 2773 | 2821 | 3126 | 2885 | |
| 1404 | 2774 | 2821 | 3127 | 2886 | |
| 1405 | 2774 | 2822 | 3127 | 2886 | |
| 1406 | 2775 | 2822 | 3128 | 2887 | |
| 1407 | 2775 | 2823 | 3128 | 2887 | |
| 1408 | 2776 | 2823 | 3129 | 2888 | |
| 1409 | 2776 | 2824 | 3129 | 2888 | |
| 1410 | 2777 | 2824 | 3130 | 2889 | |
| 1411 | 2777 | 2825 | 3130 | 2889 | |
| 1412 | 2778 | 2825 | 3131 | 2890 | |
| 1413 | 2779 | 2826 | 3131 | 2890 | |
| 1414 | 2779 | 2826 | 3132 | 2891 | |
| 1415 | 2965 | 2827 | 3133 | 2891 | |
| 1416 | 2965 | 2827 | 3133 | 2892 | |
| 1417 | 2966 | 2828 | 3134 | 2893 | |
| 1418 | 2966 | 2828 | 3134 | 2893 | |
| 1419 | 2967 | 2829 | 3135 | 2894 | |
| 1420 | 2968 | 2829 | 3135 | 2894 | |
| 1421 | 2968 | 2830 | 3136 | 2895 | |
| 1422 | 2969 | 2830 | 3136 | 2895 | |
| 1423 | 2969 | 2831 | 6181 | 2896 | |
| 1424 | 2970 | 2831 | 6183 | 2896 | |
| 1425 | 2970 | 2832 | 6284 | 2897 | |
| 1426 | 2971 | 2832 | 6285 | 289 | |
| 1427 | 2971 | 2833 | 6760 | 2898 | |
| 1428 | 2972 | 2833 | 6761 | 2898 | |
| 1429 | 2972 | 2834 | 7036 | 2899 | |
| 1430 | 2973 | 2834 | 7038 | 2899 | |
| 1431 | 2974 | 2835 | 7158 | 2900 | |
| 1432 | 2974 | 2835 | 7160 | 2900 | |
| 1433 | 2975 | 2836 | 2610 | 2901 | |
| 1434 | 2976 | 2836 | 2610 | 2901 | |
| 1435 | 2976 | 2837 | 2611 | 2902 | |
| 1436 | 2977 | 2837 | 2611 | 2902 | |
| 1437 | 2977 | 2838 | 2612 | 2903 | |
| 1439 | 2978 | 2838 | 2612 | 2903 | |
| 1440 | 2978 | 2839 | 2613 | 2904 | |
| 1441 | 2979 | 2839 | 2613 | 2904 | |
| 1442 | 2979 | 2840 | 2614 | 2905 | |
| 1443 | 2980 | 2840 | 2614 | 2905 | |
| 1444 | 2980 | 2841 | 2615 | 2906 | |
| 1445 | 2981 | 2841 | 2615 | 2906 | |
| 1446 | 2981 | 2842 | 2616 | 2907 | |
| 1447 | 2982 | 2842 | 2616 | 2907 | |
| 6001 | 2982 | 2843 | 2617 | 2908 | |
| 6030 | 2983 | 2843 | 2617 | 2908 | |
| 6078 | 2983 | 2844 | 2618 | 2909 | |
| 6108 | 2984 | 2844 | 2618 | 2909 | |
| 6130 | 2985 | 2845 | 2619 | 2910 | |
| 6165 | 2985 | 2845 | 2619 | 2910 | |
| 6265 | 2986 | 2846 | 2620 | 2911 | |
| 6275 | 2987 | 2846 | 2620 | 2911 | |
| 6305 | 2987 | 2847 | 2621 | 2912 | |
| 6329 | 2988 | 2847 | 2621 | 2912 | |
| 6370 | 2988 | 2848 | 2622 | 2913 | |
| 6385 | 2989 | 2848 | 2622 | 2913 | |
| 6404 | 2989 | 2849 | 2623 | 2914 | |
| 6531 | 2990 | 2849 | 2623 | 2914 | |
| 6585 | 2990 | 2850 | 2624 | 2915 | |
| 6622 | 2991 | 2850 | 2624 | 2915 | |
| 6652 | 2991 | 2851 | 2625 | 2916 | |
| 6733 | 2992 | 2851 | 2625 | 2916 | |
| 6756 | 2992 | 2852 | 2626 | 2917 | |
| 6765 | 2993 | 2852 | 2626 | 2917 | |
| 6798 | 2993 | 2853 | 2627 | 2918 | |
| 6824 | 2994 | 2853 | 2627 | 2919 | |
| 6972 | 2994 | 2854 | 2628 | 2919 | |
| 7046 | 2995 | 2854 | 2628 | 2920 | |
| 7054 | 2995 | 2855 | 2629 | 2920 | |
| 7069 | 2996 | 2855 | 2629 | 2921 | |
| 7080 | 2996 | 2856 | 2630 | 2921 | |
| 7105 | 2997 | 2856 | 2630 | 2922 | |
| 7123 | 2998 | 2857 | 2631 | 2922 | |
| 7143 | 2998 | 2857 | 2631 | 2923 | |
| 7152 | 2999 | 2858 | 2632 | 2923 | |
| 7204 | 2999 | 2858 | 2632 | 2924 | |
| 7320 | 3001 | 2859 | 2633 | 2924 | |
| 7351 | 3001 | 2859 | 2633 | 2925 | |
| 7381 | 3002 | 2860 | 2634 | 2925 | |
| 7403 | 3002 | 2860 | 2634 | 2926 | |
| 7438 | 3003 | 2861 | 2635 | 2926 | |
| 7488 | 3003 | 2861 | 2635 | 2927 | |
| 7500 | 3004 | 3035 | 2636 | 2927 | |
| 7526 | 3004 | 3036 | 2636 | 2928 | |
| 7588 | 3005 | 3036 | 2637 | 2928 | |
| 7612 | 3005 | 3037 | 2637 | 2929 | |
| 7627 | 3006 | 3037 | 2638 | 2929 | |

### Systems

[0524] In an aspect, the disclosure relates to a system comprising nucleic acid molecule encoding a gene modifying polypeptide (e.g., as described herein) and a template nucleic acid (e.g., a template RNA, e.g., as described herein). In certain embodiments, the nucleic acid molecule encoding the gene modifying polypeptide comprises one or more silent mutations in 310500244.1 the coding region (e.g., in the sequence encoding the RT domain) relative to a nucleic acid molecule as described herein. In certain embodiments, the system further comprises a gRNA (e.g., a gRNA that binds to a polypeptide that induces a nick, e.g., in the opposite strand of the target DNA bound by the gene modifying polypeptide).

[0525] In certain embodiments, the nucleic acid molecule encoding the gene modifying polypeptide encodes a polypeptide having an amino acid sequence selected from SEQ ID NOs: 1-7743, or an amino acid sequence having at least 70%, 75%, 80%, 85%, 90%, 95%, or 99% identity thereto. In certain embodiments, the nucleic acid molecule encoding the gene modifying polypeptide encodes a polypeptide having an amino acid sequence selected from SEQ ID NOs: 6001-7743, or an amino acid sequence having at least 70%, 75%, 80%, 85%, 90%, 95%, or 99% identity thereto. In certain embodiments, the nucleic acid molecule encoding the gene modifying polypeptide encodes a polypeptide having an amino acid sequence selected from SEQ ID NOs: 4501-4541, or an amino acid sequence having at least 70%, 75%, 80%, 85%, 90%, 95%, or 99% identity thereto. In certain embodiments, the nucleic acid molecule encoding the gene modifying polypeptide encodes a polypeptide as listed in any of Tables A1, T1, or T2, or an amino acid sequence having at least 70%, 75%, 80%, 85%, 90%, 95%, or 99% identity thereto.

[0526] In certain embodiments, the nucleic acid molecule encoding the gene modifying polypeptide comprises a sequence encoding a portion of an amino acid sequence selected from SEQ ID NOs: 1-7743, wherein the portion comprises a linker and RT domain, or an amino acid sequence having at least 70%, 75%, 80%, 85%, 90%, 95%, or 99% identity to said portion. In certain embodiments, the nucleic acid molecule encoding the gene modifying polypeptide comprises a sequence encoding a portion of an amino acid sequence selected from SEQ ID NOs: 6001-7743, wherein the portion comprises a linker and RT domain, or an amino acid sequence having at least 70%, 75%, 80%, 85%, 90%, 95%, or 99% identity to said portion. In certain embodiments, the nucleic acid molecule encoding the gene modifying polypeptide comprises a sequence encoding a portion of an amino acid sequence selected from SEQ ID NOs: 4501-4541, wherein the portion comprises a linker and RT domain, or an amino acid sequence having at least 70%, 75%, 80%, 85%, 90%, 95%, or 99% identity to said portion. In certain embodiments, the nucleic acid molecule encoding the gene modifying polypeptide comprises a sequence encoding a portion of a polypeptide listed in any of Tables A1, T1, or T2, wherein the portion comprises a linker and RT domain, or an amino acid sequence having at least 70%, 75%, 80%, 85%, 90%, 95%, or 99% identity to said portion.

[0527] In certain embodiments, the nucleic acid molecule encoding the gene modifying polypeptide comprises a sequence encoding the linker of an amino acid sequence selected from SEQ ID NOs: 1-7743, or an amino acid sequence having at least 70%, 75%, 80%, 85%, 90%, 95%, or 99% identity thereto. In certain embodiments, the nucleic acid molecule encoding the gene modifying polypeptide comprises a sequence encoding the linker of a polypeptide having an amino acid sequence selected from SEQ ID NOs: 6001-7743, or an amino acid sequence having at least 70%, 75%, 80%, 85%, 90%, 95%, or 99% identity thereto. In certain embodiments, the nucleic acid molecule encoding the gene modifying polypeptide comprises a sequence encoding the linker of a polypeptide having an amino acid sequence selected from SEQ ID NOs: 4501-4541, or an amino acid sequence having at least 70%, 75%, 80%, 85%, 90%, 95%, or 99% identity thereto. In certain embodiments, the nucleic acid molecule encoding the gene modifying polypeptide comprises a sequence encoding the linker of a polypeptide as listed in any of Tables A1, T1, or T2, or an amino acid sequence having at least 70%, 75%, 80%, 85%, 90%, 95%, or 99% identity thereto.

[0528] In certain embodiments, the nucleic acid molecule encoding the gene modifying polypeptide comprises a sequence encoding the RT domain of an amino acid sequence selected from SEQ ID NOs: 1-7743, or an amino acid sequence having at least 70%, 75%, 80%, 85%, 90%, 95%, or 99% identity thereto. In certain embodiments, the nucleic acid molecule encoding the gene modifying polypeptide comprises a sequence encoding the RT domain of a polypeptide having an amino acid sequence selected from SEQ ID NOs: 6001-7743, or an amino acid sequence having at least 70%, 75%, 80%, 85%, 90%, 95%, or 99% identity thereto. In certain embodiments, the nucleic acid molecule encoding the gene modifying polypeptide comprises a sequence encoding the RT domain of a polypeptide having an amino acid sequence selected from SEQ ID NOs: 4501-4541, or an amino acid sequence having at least 70%, 75%, 80%, 85%, 90%, 95%, or 99% identity thereto. In certain embodiments, the nucleic acid molecule encoding the gene modifying polypeptide comprises a sequence encoding the RT domain of a polypeptide as listed in any of Tables A1, T1, or T2, or an amino acid sequence having at least 70%, 75%, 80%, 85%, 90%, 95%, or 99% identity thereto.

[0529] In an aspect, the disclosure relates to a system comprising a gene modifying polypeptide (e.g., as described herein) and a template nucleic acid (e.g., a template RNA, e.g., as described herein).

[0530] In certain embodiments, the gene modifying polypeptide comprises a polypeptide having an amino acid sequence selected from SEQ ID NOs: 1-7743, or an amino acid sequence having at least 70%, 75%, 80%, 85%, 90%, 95%, or 99% identity thereto. In certain embodiments, the gene modifying polypeptide comprises a polypeptide having an amino acid sequence selected from SEQ ID NOs: 6001-7743, or an amino acid sequence having at least 70%, 75%, 80%, 85%, 90%, 95%, or 99% identity thereto. In certain embodiments, the gene modifying polypeptide comprises a polypeptide having an amino acid sequence selected from SEQ ID NOs: 4501-4541, or an amino acid sequence having at least 70%, 75%, 80%, 85%, 90%, 95%, or 99% identity thereto. In certain embodiments, the gene modifying polypeptide comprises a polypeptide as listed in any of Tables A1, T1, or T2, or an amino acid sequence having at least 70%, 75%, 80%, 85%, 90%, 95%, or 99% identity thereto.

[0531] In certain embodiments, the gene modifying polypeptide comprises a portion of an amino acid sequence selected from SEQ ID NOs: 1-7743, wherein the portion comprises a linker and RT domain, or an amino acid sequence having at least 70%, 75%, 80%, 85%, 90%, 95%, or 99% identity to said portion. In certain embodiments, the gene modifying polypeptide comprises a portion of an amino acid sequence selected from SEQ ID NOs: 6001-7743, wherein the portion comprises a linker and RT domain, or an amino acid sequence having at least 70%, 75%, 80%, 85%, 90%, 95%, or 99% identity to said portion. In certain embodiments, the gene modifying polypeptide comprises a portion of an amino acid sequence selected from SEQ ID NOs: 4501-4541, wherein the portion comprises a linker and RT domain, or an amino acid sequence having at least 70%, 75%, 80%, 85%, 90%, 95%, or 99% identity to said portion. In certain embodiments, the gene modifying polypeptide comprises a portion of a polypeptide listed in any of Tables A1, T1, or T2, wherein the portion comprises a linker and RT domain, or an amino acid sequence having at least 70%, 75%, 80%, 85%, 90%, 95%, or 99% identity to said portion.

[0532] In certain embodiments, the gene modifying polypeptide comprises the linker of an amino acid sequence selected from SEQ ID NOs: 1-7743, or an amino acid sequence having at least 70%, 75%, 80%, 85%, 90%, 95%, or 99% identity thereto. In certain embodiments, the gene modifying polypeptide comprises a sequence encoding the linker of a polypeptide having an amino acid sequence selected from SEQ ID NOs: 6001-7743, or an amino acid sequence having at least 70%, 75%, 80%, 85%, 90%, 95%, or 99% identity thereto. In certain embodiments, the gene modifying polypeptide comprises a sequence encoding the linker of a polypeptide having an amino acid sequence selected from SEQ ID NOs: 4501-4541, or an amino acid sequence having at least 70%, 75%, 80%, 85%, 90%, 95%, or 99% identity thereto. In certain embodiments, the gene modifying polypeptide comprises the linker of a polypeptide as listed in any of Tables A1, T1, or T2, or an amino acid sequence having at least 70%, 75%, 80%, 85%, 90%, 95%, or 99% identity thereto.

[0533] In certain embodiments, the gene modifying polypeptide comprises the RT domain of an amino acid sequence selected from SEQ ID NOs: 1-7743, or an amino acid sequence having at least 70%, 75%, 80%, 85%, 90%, 95%, or 99% identity thereto. In certain embodiments, the gene modifying polypeptide comprises a sequence encoding the RT domain of a polypeptide having an amino acid sequence selected from SEQ ID NOs: 6001-7743, or an amino acid sequence having at least 70%, 75%, 80%, 85%, 90%, 95%, or 99% identity thereto. In certain embodiments, the gene modifying polypeptide comprises a sequence encoding the RT domain of a polypeptide having an amino acid sequence selected from SEQ ID NOs: 4501-4541, or an amino acid sequence having at least 70%, 75%, 80%, 85%, 90%, 95%, or 99% identity thereto. In certain embodiments, the gene modifying polypeptide comprises the RT domain of a polypeptide as listed in any of Tables A1, T1, or T2, or an amino acid sequence having at least 70%, 75%, 80%, 85%, 90%, 95%, or 99% identity thereto.

Lengthy table referenced here
US20240252682A1-20240801-T00001
Please refer to the end of the specification for access instructions.

### Localization Sequences for Gene Modifying Systems

[0534] In certain embodiments, a gene editor system RNA further comprises an intracellular localization sequence, e.g., a nuclear localization sequence (NLS). In some embodiments, a gene modifying polypeptide comprises an NLS as comprised in SEQ ID NO: 4000 and/or SEQ ID NO: 4001, or an NLS having an amino acid sequence having at least 75%, 80%, 85%, 90%, 95%, 96%, 97%, 98%, or 99% identity thereto.

[0535] The nuclear localization sequence may be an RNA sequence that promotes the import of the RNA into the nucleus. In certain embodiments the nuclear localization signal is located on the template RNA. In certain embodiments, the gene modifying polypeptide is encoded on a first RNA, and the template RNA is a second, separate, RNA, and the nuclear localization signal is located on the template RNA and not on an RNA encoding the gene modifying polypeptide. While not wishing to be bound by theory, in some embodiments, the RNA encoding the gene modifying polypeptide is targeted primarily to the cytoplasm to promote its translation, while the template RNA is targeted primarily to the nucleus to promote insertion into the genome. In some embodiments the nuclear localization signal is at the 3′ end, 5′ end, or in an internal region of the template RNA. In some embodiments the nuclear localization signal is 3′ of the heterologous sequence (e.g., is directly 3′ of the heterologous sequence) or is 5′ of the heterologous sequence (e.g., is directly 5′ of the heterologous sequence). In some embodiments the nuclear localization signal is placed outside of the 5′ UTR or outside of the 3′ UTR of the template RNA. In some embodiments the nuclear localization signal is placed between the 5′ UTR and the 3′ UTR, wherein optionally the nuclear localization signal is not transcribed with the transgene (e.g., the nuclear localization signal is an anti-sense orientation or is downstream of a transcriptional termination signal or polyadenylation signal). In some embodiments the nuclear localization sequence is situated inside of an intron. In some embodiments a plurality of the same or different nuclear localization signals are in the RNA, e.g., in the template RNA. In some embodiments the nuclear localization signal is less than 5, 10, 25, 50, 75, 100, 150, 200, 250, 300, 350, 400, 450, 500, 600, 700, 800, 900 or 1000 bp in length. Various RNA nuclear localization sequences can be used. For example, Lubelsky and Ulitsky, Nature 555 (107-111), 2018 describe RNA sequences which drive RNA localization into the nucleus. In some embodiments, the nuclear localization signal is a SINE-derived nuclear RNA localization (SIRLOIN) signal. In some embodiments the nuclear localization signal binds a nuclear-enriched protein. In some embodiments the nuclear localization signal binds the HNRNPK protein. In some embodiments the nuclear localization signal is rich in pyrimidines, e.g., is a C/T rich, C/U rich, C rich, T rich, or U rich region. In some embodiments the nuclear localization signal is derived from a long non-coding RNA. In some embodiments the nuclear localization signal is derived from MALATI long non-coding RNA or is the 600 nucleotide M region of MALATI (described in Miyagawa et al., RNA 18, (738-751), 2012). In some embodiments the nuclear localization signal is derived from BORG long non-coding RNA or is a AGCCC motif (described in Zhang et al., Molecular and Cellular Biology 34, 2318-2329 (2014). In some embodiments the nuclear localization sequence is described in Shukla et al., The EMBO Journal e98452 (2018). In some embodiments the nuclear localization signal is derived from a retrovirus.

[0536] In some embodiments, a polypeptide described herein comprises one or more (e.g., 2, 3, 4, 5) nuclear targeting sequences, for example a nuclear localization sequence (NLS). In some embodiments, the NLS is a bipartite NLS. In some embodiments, an NLS facilitates the import of a protein comprising an NLS into the cell nucleus. In some embodiments, the NLS is fused to the N-terminus of a gene modifying polypeptide as described herein. In some embodiments, the NLS is fused to the C-terminus of the gene modifying polypeptide. In some embodiments, the NLS is fused to the N-terminus or the C-terminus of a Cas domain. In some embodiments, a linker sequence is disposed between the NLS and the neighboring domain of the gene modifying polypeptide.

[0537] In some embodiments, an NLS comprises the amino acid sequence MDSLLMNRRKFLYQFKNVRWAKGRRETYLC (SEQ ID NO: 5009), PKKRKVEGADKRTADGSEFESPKKKRKV(SEQ ID NO: 5010), RKSGKIAAIWKRPRKPKKKRKV (SEQ ID NO: 5011) KRTADGSEFESPKKKRKV(SEQ ID NO: 5012), KKTELQTTNAENKTKKL (SEQ ID NO: 5013), or KRGINDRNFWRGENGRKTR (SEQ ID NO: 5014), KRPAATKKAGQAKKKK (SEQ ID NO: 5015), PAAKRVKLD (SEQ ID NO: 4644), KRTADGSEFEKRTADGSEFESPKKKAKVE (SEQ ID NO: 4649), KRTADGSEFE (SEQ ID NO: 4650), KRTADGSEFESPKKKAKVE (SEQ ID NO: 4651), AGKRTADGSEFEKRTADGSEFESPKKKAKVE (SEQ ID NO: 4001), or a functional fragment or variant thereof. Exemplary NLS sequences are also described in PCT/EP2000/011690, the contents of which are incorporated herein by reference for their disclosure of exemplary nuclear localization sequences. In some embodiments, an NLS comprises an amino acid sequence as disclosed in Table 11. An NLS of this table may be utilized with one or more copies in a polypeptide in one or more locations in a polypeptide, e.g., 1, 2, 3 or more copies of an NLS in an N-terminal domain, between peptide domains, in a C-terminal domain, or in a combination of locations, in order to improve subcellular localization to the nucleus. Multiple unique sequences may be used within a single polypeptide. Sequences may be naturally monopartite or bipartite, e.g., having one or two stretches of basic amino acids, or may be used as chimeric bipartite sequences. Sequence references correspond to UniProt accession numbers, except where indicated as SeqNLS for sequences mined using a subcellular localization prediction algorithm (Lin et al BMC Bioinformat 13:157 (2012), incorporated herein by reference in its entirety).

TABLE 11
Exemplary nuclear localization
signals for use in gene modifying systems

| Sequence | Sequence References | SEQ ID No. |
|---|---|---|
| AHFKISGEKRPSTDPGKKAK | Q76IQ7 | 5223 |
| NPKKKKKKDP | | |
| AHRAKKMSKTHA | P21827 | 5224 |
| ASPEYVNLPINGNG | SeqNLS | 5225 |
| CTKRPRW | O88622, Q86W56, Q9QYM2, O02776 | 5226 |
| DKAKRVSRNKSEKKRR | O15516, Q5RAK8, Q91YB2, Q91YB0, | 5227 |
| | Q8QGQ6, O08785, Q9WVS9, Q6YGZ4 | |
| EELRLKEELLKGIYA | Q9QY16, Q9UHL0, Q2TBP1, Q9QY15 | 5228 |
| EEQLRRRKNSRLNNTG | G5EFF5 | 5229 |
| EVLKVIRTGKRKKKAWKR | SeqNLS | 5230 |
| MVTKVC | | |
| HHHHHHHHHHHHQPH | Q63934, G3V7L5, Q12837 | 5231 |
| HKKKHPDASVNFSEFSK | P10103, Q4R844, P12682, B0CM99, | 5232 |
| | A9RA84, Q6YKA4, P09429, P63159, | |
| | Q08IE6, P63158, Q9YH06, B1MTB0 | |
| HKRTKK | Q2R2D5 | 5233 |
| IINGRKLKLKKSRRRSSQTS | SeqNLS | 5234 |
| NNSFTSRRS | | |
| KAEQERRK | Q8LH59 | 5235 |
| KEKRKRREELFIEQKKRK | SeqNLS | 5236 |
| KKGKDEWFSRGKKP | P30999 | 5237 |
| KKGPSVQKRKKT | Q6ZN17 | 5238 |
| KKKTVINDLLHYKKEK | SeqNLS, P32354 | 5239 |
| KKNGGKGKNKPSAKIKK | SeqNLS | 5240 |
| KKPKWDDFKKKKK | Q15397, Q8BKS9, Q562C7 | 5241 |
| KKRKKD | SeqNLS, Q91Z62, Q1A730, Q969P5, | 5242 |
| | Q2KHT6, Q9CPU7 | |
| KKRRKRRRK | SeqNLS | 5243 |
| KKRRRRARK | Q9UMS6, D4A702, Q91YE8 | 5244 |
| KKSKRGR | Q9UBS0 | 5245 |
| KKSRKRGS | B4FG96 | 5246 |
| KKSTALSRELGKIMRRR | SeqNLS, P32354 | 5247 |
| KKSYQDPEIIAHSRPRK | Q9U7C9 | 5248 |
| KKTGKNRKLKSKRVKTR | Q9Z301, O54943, Q8K3T2 | 5249 |
| KKVSIAGQSGKLWRWKR | Q6YUL8 | 5250 |
| KKYENVVIKRSPRKRGRPR | SeqNLS | 5251 |
| K | | |
| KNKKRK | SeqNLS | 5252 |
| KPKKKR | SeqNLS | 5253 |
| KRAMKDDSHGNSTSPKRRK | Q0E671 | 5254 |
| KRANSNLVAAYEKAKKK | P23508 | 5255 |
| KRASEDTTSGSPPKKSSAGP | Q9BZZ5, Q5R644 | 5256 |
| KR | | |
| KRFKRRWMVRKMKTKK | SeqNLS | 5257 |
| KRGLNSSFETSPKKVK | Q8IV63 | 5258 |
| KRGNSSIGPNDLSKRKQRK | SeqNLS | 5259 |
| K | | |
| KRIHSVSLSQSQIDPSKKVK | SeqNLS | 5260 |
| RAK | | |
| KRKGKLKNKGSKRKK | O15381 | 5261 |
| KRRRRRRREKRKR | Q96GM8 | 5262 |
| KRSNDRTYSPEEEKQRRA | Q91ZF2 | 5263 |
| KRTVATNGDASGAHRAKK | SeqNLS | 5264 |
| MSK | | |
| KRVYNKGEDEQEHLPKGKK | SeqNLS | 5265 |
| R | | |
| KSGKAPRRRAVSMDNSNK | Q9WVH4, O43524 | 5266 |
| KVNFLDMSLDDIIIYKELE | Q9P127 | 5267 |
| KVQHRIAKKTTRRRR | Q9DXE6 | 5268 |
| LSPSLSPL | Q9Y261, P32182, P35583 | 5269 |
| MDSLLMNRRKFLYQFKNVR | Q9GZX7 | 5270 |
| WAKGRRETYLC | | |
| MPQNEYIELHRKRYGYRLD | SeqNLS | 5271 |
| YHEKKRKKESREAHERSKK | | |
| AKKMIGLKAKLYHK | | |
| MVQLRPRASR | SeqNLS | 5272 |
| NNKLLAKRRKGGASPKDDP | Q965G5 | 5273 |
| MDDIK | | |
| NYKRPMDGTYGPPAKRHEG | O14497, A2BH40 | 5274 |
| E | | |
| PDTKRAKLDSSETTMVKKK | SeqNLS | 5275 |
| PEKRTKI | SeqNLS | 5276 |
| PGGRGKKK | Q719N1, Q9UBP0, A2VDN5 | 5277 |
| PGKMDKGEHRQERRDRPY | Q01844, Q61545 | 5278 |
| PKKGDKYDKTD | Q45FA5 | 5279 |
| PKKKSRK | O35914, Q01954 | 5280 |
| PKKNKPE | Q22663 | 5281 |
| PKKRAKV | P04295, P89438 | 5282 |
| PKPKKLKVE | P55263, P55262, P55264, Q64640 | 5283 |
| PKRGRGR | Q9FYS5, Q43386 | 5284 |
| PKRRLVDDA | P0C797 | 5285 |
| PKRRRTY | SeqNLS | 5286 |
| PLFKRR | A8X6H4, Q9TXJ0 | 5287 |
| PLRKAKR | Q86WB0, Q5R8V9 | 5288 |
| PPAKRKCIF | Q6AZ28, O75928, Q8C5D8 | 5289 |
| PPARRRRL | Q8NAG6 | 5290 |
| PPKKKRKV | Q3L6L5, P03070, P14999, P03071 | 5291 |
| PPNKRMKVKH | Q8BN78 | 5292 |
| PPRIYPQLPSAPT | P0C799 | 5293 |
| PQRSPFPKSSVKR | SeqNLS | 5294 |
| PRPRKVPR | P0C799 | 5295 |
| PRRRVQRKR | SeqNLS, Q5R448, Q5TAQ9 | 5296 |
| PRRVRLK | Q58DJ0, P56477, Q13568 | 5297 |
| PSRKRPR | Q62315, Q5F363, Q92833 | 5298 |
| PSSKKRKV | SeqNLS | 5299 |
| PTKKRVK | P07664 | 5300 |
| QRPGPYDRP | SeqNLS | 5301 |
| RGKGGKGLGKGGAKRHRK | SeqNLS | 5302 |
| RKAGKGGGGHKTTKKRSA | B4FG96 | 5303 |
| KDEKVP | | |
| RKIKLKRAK | A1L3G9 | 5304 |
| RKIKRKRAK | B9X187 | 5305 |
| RKKEAPGPREELRSRGR | O35126, P54258, Q5IS70, P54259 | 5306 |
| RKKRKGK | SeqNLS, Q29243, Q62165, Q28685, | 5307 |
| | O18738, Q9TSZ6, Q14118 | |
| RKKRRQRRR | P04326, P69697, P69698, P05907, | 5308 |
| | P20879, P04613, P19553, P0C1J9, | |
| | P20893, P12506, P04612, Q73370, | |
| | P0C1K0, P05906, P35965, P04609, | |
| | P04610, P04614, P04608, P05905 | |
| RKKSIPLSIKNLKRKHKRKK | Q9C0C9 | 5309 |
| NKITR | | |
| RKLVKPKNTKMKTKLRTNP | Q14190 | 5310 |
| Y | | |
| RKRLILSDKGQLDWKK | SeqNLS, Q91Z62, Q1A730, Q2KHT6, | 5311 |
| | Q9CPU7 | |
| RKRLKSK | Q13309 | 5312 |
| RKRRVRDNM | Q8QPH4, Q809M7, A8C8X1, Q2VNC5, | 5313 |
| | Q38SQ0, O89749, Q6DNQ9, Q809L9, | |
| | Q0A429, Q20NV3, P16509, P16505, | |
| | Q6DNQ5, P16506, Q6XT06, P26118, | |
| | Q2ICQ2, Q2RCG8, Q0A2D0, Q0A2H9, | |
| | Q9IQ46, Q809M3, Q6J847, Q6J856, | |
| | B4URE4, A4GCM7, Q0A440, P26120, | |
| | P16511, | |
| RKRSPKDKKEKDLDGAGKR | Q7RTP6 | 5314 |
| RKT | | |
| RKRTPRVDGQTGENDMNK | O94851 | 5315 |
| RRRK | | |
| RLPVRRRRRR | P04499, P12541, P03269, P48313, | 5316 |
| | P03270 | |
| RLRFRKPKSK | P69469 | 5317 |
| RQQRKR | Q14980 | 5318 |
| RRDLNSSFETSPKKVK | Q8K3G5 | 5319 |
| RRDRAKLR | Q9SLB8 | 5320 |
| RRGDGRRR | Q80WE1, Q5R9B4, Q06787, P35922 | 5321 |
| RRGRKRKAEKQ | Q812D1, Q5XXA9, Q99JF8, Q8MJG1, | 5322 |
| | Q66T72, O75475 | |
| RRKKRR | Q0VD86, Q58DS6, Q5R6G2, Q9ERI5, | 5323 |
| | Q6AYK2, Q6NYC1 | |
| RRKRSKSEDMDSVESKRRR | Q7TT18 | 5324 |
| RRKRSR | Q99PU7, D3ZHS6, Q92560, A2VDM8 | 5325 |
| RRPKGKTLQKRKPK | Q6ZN17 | 5326 |
| RRRGFERFGPDNMGRKRK | Q63014, Q9DBR0 | 5327 |
| RRRGKNKVAAQNCRK | SeqNLS | 5328 |
| RRRKRR | Q5FVH8, Q6MZT1, Q08DH5, Q8BQP9 | 5329 |
| RRRQKQKGGASRRR | SeqNLS | 5330 |
| RRRREGPRARRRR | P08313, P10231 | 5331 |
| RRTIRLKLVYDKCDRSCKIQ | SeqNLS | 5332 |
| KKNRNKCQYCRFHKCLSVG | | |
| MSHNAIRFGRMPRSEKAKL | | |
| KAE | | |
| RRVPQRKEVSRCRKCRK | Q5RJN4, Q32L09, Q8CAK3, Q9NUL5 | 5333 |
| RVGGRRQAVECIEDLLNEP | P03255 | 5334 |
| GQPLDLSCKRPRP | | |
| RVVKLRIAP | P52639, Q8JMN0 | 5335 |
| RVVRRR | P70278 | 5336 |
| SKRKTKISRKTR | Q5RAY1, O00443 | 5337 |
| SYVKTVPNRTRTYIKL | P21935 | 5338 |
| TGKNEAKKRKIA | P52739, Q8K3J5, Q5RAU9 | 5339 |
| TLSPASSPSSVSCPVIPASTD | SeqNLS | 5340 |
| ESPGSALNI | | |
| VSKKQRTGKKIH | P52739, Q8K3J5, Q5RAU9 | 5341 |
| SPKKKRKVE | | 5342 |
| KRTADGSEFESPKKKRKVE | | 5343 |
| PAAKRVKLD | | 5344 |
| PKKKRKV | | 5345 |
| MDSLLMNRRKFLYQFKNVR | | 5346 |
| WAKGRRETYLC | | |
| SPKKKRKVEAS | | 5347 |
| MAPKKKRKVGIHRGVP | | 5348 |
| KRTADGSEFEKRTADGSEFE | | 5349 |
| SPKKKAKVE | | |
| KRTADGSEFE | | 5350 |
| KRTADGSEFESPKKKAKVE | | 5351 |
| AGKRTADGSEFEKRTADGS | | 4001 |
| EFESPKKKAKVE | | |

[0538] In some embodiments, the NLS is a bipartite NLS. A bipartite NLS typically comprises two basic amino acid clusters separated by a spacer sequence (which may be, e.g., about 10 amino acids in length). A monopartite NLS typically lacks a spacer. An example of a bipartite NLS is the nucleoplasmin NLS, having the sequence KR[PAATKKAGQA]KKKK (SEQ ID NO: 5015), wherein the spacer is bracketed. Another exemplary bipartite NLS has the sequence PKKKRKVEGADKRTADGSEFESPKKKRKV (SEQ ID NO: 5016). Exemplary NLSs are described in International Application WO2020051561, which is herein incorporated by reference in its entirety, including for its disclosures regarding nuclear localization sequences.

[0539] In certain embodiments, a gene editor system polypeptide (e.g., a gene modifying polypeptide as described herein) further comprises an intracellular localization sequence, e.g., a nuclear localization sequence and/or a nucleolar localization sequence. The nuclear localization sequence and/or nucleolar localization sequence may be amino acid sequences that promote the import of the protein into the nucleus and/or nucleolus, where it can promote integration of heterologous sequence into the genome. In certain embodiments, a gene editor system polypeptide (e.g., (e.g., a gene modifying polypeptide as described herein) further comprises a nucleolar localization sequence. In certain embodiments, the gene modifying polypeptide is encoded on a first RNA, and the template RNA is a second, separate, RNA, and the nucleolar localization signal is encoded on the RNA encoding the gene modifying polypeptide and not on the template RNA. In some embodiments, the nucleolar localization signal is located at the N-terminus, C-terminus, or in an internal region of the polypeptide. In some embodiments, a plurality of the same or different nucleolar localization signals are used. In some embodiments, the nuclear localization signal is less than 5, 10, 25, 50, 75, or 100 amino acids in length. Various polypeptide nucleolar localization signals can be used. For example, Yang et al., Journal of Biomedical Science 22, 33 (2015), describe a nuclear localization signal that also functions as a nucleolar localization signal. In some embodiments, the nucleolar localization signal may also be a nuclear localization signal. In some embodiments, the nucleolar localization signal may overlap with a nuclear localization signal. In some embodiments, the nucleolar localization signal may comprise a stretch of basic residues. In some embodiments, the nucleolar localization signal may be rich in arginine and lysine residues. In some embodiments, the nucleolar localization signal may be derived from a protein that is enriched in the nucleolus. In some embodiments, the nucleolar localization signal may be derived from a protein enriched at ribosomal RNA loci. In some embodiments, the nucleolar localization signal may be derived from a protein that binds rRNA. In some embodiments, the nucleolar localization signal may be derived from MSP58. In some embodiments, the nucleolar localization signal may be a monopartite motif. In some embodiments, the nucleolar localization signal may be a bipartite motif. In some embodiments, the nucleolar localization signal may consist of a multiple monopartite or bipartite motifs. In some embodiments, the nucleolar localization signal may consist of a mix of monopartite and bipartite motifs. In some embodiments, the nucleolar localization signal may be a dual bipartite motif. In some embodiments, the nucleolar localization motif may be a KRASSQALGTIPKRRSSSRFIKRKK (SEQ ID NO: 5017). In some embodiments, the nucleolar localization signal may be derived from nuclear factor-KB-inducing kinase. In some embodiments, the nucleolar localization signal may be an RKKRKKK motif (SEQ ID NO: 5018) (described in Birbach et al., Journal of Cell Science, 117 (3615-3624), 2004).

### Evolved Variants of Gene Modifying Polypeptides and Systems

[0540] In some embodiments, the invention provides evolved variants of gene modifying polypeptides as described herein. Evolved variants can, in some embodiments, be produced by mutagenizing a reference gene modifying polypeptide, or one of the fragments or domains comprised therein. In some embodiments, one or more of the domains (e.g., the reverse transcriptase domain) is evolved. One or more of such evolved variant domains can, in some embodiments, be evolved alone or together with other domains. An evolved variant domain or domains may, in some embodiments, be combined with unevolved cognate component(s) or evolved variants of the cognate component(s), e.g., which may have been evolved in either a parallel or serial manner.

[0541] In some embodiments, the process of mutagenizing a reference gene modifying polypeptide, or fragment or domain thereof, comprises mutagenizing the reference gene modifying polypeptide or fragment or domain thereof. In embodiments, the mutagenesis comprises a continuous evolution method (e.g., PACE) or non-continuous evolution method (e.g., PANCE), e.g., as described herein. In some embodiments, the evolved gene modifying polypeptide, or a fragment or domain thereof, comprises one or more amino acid variations introduced into its amino acid sequence relative to the amino acid sequence of the reference gene modifying polypeptide, or fragment or domain thereof. In embodiments, amino acid sequence variations may include one or more mutated residues (e.g., conservative substitutions, non-conservative substitutions, or a combination thereof) within the amino acid sequence of a reference gene modifying polypeptide, e.g., as a result of a change in the nucleotide sequence encoding the gene modifying polypeptide that results in, e.g., a change in the codon at any particular position in the coding sequence, the deletion of one or more amino acids (e.g., a truncated protein), the insertion of one or more amino acids, or any combination of the foregoing. The evolved variant gene modifying polypeptide may include variants in one or more components or domains of the gene modifying polypeptide (e.g., variants introduced into a reverse transcriptase domain).

[0542] In some aspects, the disclosure provides gene modifying polypeptides, systems, kits, and methods using or comprising an evolved variant of a gene modifying polypeptide, e.g., employs an evolved variant of a gene modifying polypeptide or a gene modifying polypeptide produced or producible by PACE or PANCE. In embodiments, the unevolved reference gene modifying polypeptide is a gene modifying polypeptide as disclosed herein.

[0543] The term “phage-assisted continuous evolution (PACE),” as used herein, generally refers to continuous evolution that employs phage as viral vectors. Examples of PACE technology have been described, for example, in International PCT Application No. PCT/US 2009/056194, filed Sep. 8, 2009, published as WO 2010/028347 on Mar. 11, 2010; International PCT Application, PCT/US2011/066747, filed Dec. 22, 2011, published as WO 2012/088381 on Jun. 28, 2012; U.S. Pat. No. 9,023,594, issued May 5, 2015; U.S. Pat. No. 9,771,574, issued Sep. 26, 2017; U.S. Pat. No. 9,394,537, issued Jul. 19, 2016; International PCT Application, PCT/US2015/012022, filed Jan. 20, 2015, published as WO 2015/134121 on Sep. 11, 2015; U.S. Pat. No. 10,179,911, issued Jan. 15, 2019; and International PCT Application, PCT/US2016/027795, filed Apr. 15, 2016, published as WO 2016/168631 on Oct. 20, 2016, the entire contents of each of which are incorporated herein by reference.

[0544] The term “phage-assisted non-continuous evolution (PANCE),” as used herein, generally refers to non-continuous evolution that employs phage as viral vectors. Examples of PANCE technology have been described, for example, in Suzuki T. et al, Crystal structures reveal an elusive functional domain of pyrrolysyl-tRNA synthetase, Nat Chem Biol. 13(12): 1261-1266 (2017), incorporated herein by reference in its entirety. Briefly, PANCE is a technique for rapid in vivo directed evolution using serial flask transfers of evolving selection phage (SP), which contain a gene of interest to be evolved, across fresh host cells (e.g., E. coli cells). Genes inside the host cell may be held constant while genes contained in the SP continuously evolve. Following phage growth, an aliquot of infected cells may be used to transfect a subsequent flask containing host E. coli. This process can be repeated and/or continued until the desired phenotype is evolved, e.g., for as many transfers as desired.

[0545] Methods of applying PACE and PANCE to gene modifying polypeptides may be readily appreciated by the skilled artisan by reference to, inter alia, the foregoing references. Additional exemplary methods for directing continuous evolution of genome-modifying proteins or systems, e.g., in a population of host cells, e.g., using phage particles, can be applied to generate evolved variants of gene modifying polypeptides, or fragments or subdomains thereof. Non-limiting examples of such methods are described in International PCT Application, PCT/US2009/056194, filed Sep. 8, 2009, published as WO 2010/028347 on Mar. 11, 2010; International PCT Application, PCT/US2011/066747, filed Dec. 22, 2011, published as WO 2012/088381 on Jun. 28, 2012; U.S. Pat. No. 9,023,594, issued May 5, 2015; U.S. Pat. No. 9,771,574, issued Sep. 26, 2017; U.S. Pat. No. 9,394,537, issued Jul. 19, 2016; International PCT Application, PCT/US2015/012022, filed Jan. 20, 2015, published as WO 2015/134121 on Sep. 11, 2015; U.S. Pat. No. 10,179,911, issued Jan. 15, 2019; International Application No. PCT/US2019/37216, filed Jun. 14, 2019, International Patent Publication WO 2019/023680, published Jan. 31, 2019, International PCT Application, PCT/US2016/027795, filed Apr. 15, 2016, published as WO 2016/168631 on Oct. 20, 2016, and International Patent Publication No. PCT/US2019/47996, filed Aug. 23, 2019, each of which is incorporated herein by reference in its entirety.

[0546] In some non-limiting illustrative embodiments, a method of evolution of a evolved variant gene modifying polypeptide, of a fragment or domain thereof, comprises: (a) contacting a population of host cells with a population of viral vectors comprising the gene of interest (the starting gene modifying polypeptide or fragment or domain thereof), wherein: (1) the host cell is amenable to infection by the viral vector; (2) the host cell expresses viral genes required for the generation of viral particles; (3) the expression of at least one viral gene required for the production of an infectious viral particle is dependent on a function of the gene of interest; and/or (4) the viral vector allows for expression of the protein in the host cell, and can be replicated and packaged into a viral particle by the host cell. In some embodiments, the method comprises (b) contacting the host cells with a mutagen, using host cells with mutations that elevate mutation rate (e.g., either by carrying a mutation plasmid or some genome modification—e.g., proofing-impaired DNA polymerase, SOS genes, such as UmuC, UmuD′, and/or RecA, which mutations, if plasmid-bound, may be under control of an inducible promoter), or a combination thereof. In some embodiments, the method comprises (c) incubating the population of host cells under conditions allowing for viral replication and the production of viral particles, wherein host cells are removed from the host cell population, and fresh, uninfected host cells are introduced into the population of host cells, thus replenishing the population of host cells and creating a flow of host cells. In some embodiments, the cells are incubated under conditions allowing for the gene of interest to acquire a mutation. In some embodiments, the method further comprises (d) isolating a mutated version of the viral vector, encoding an evolved gene product (e.g., an evolved variant gene modifying polypeptide, or fragment or domain thereof), from the population of host cells.

[0547] The skilled artisan will appreciate a variety of features employable within the above-described framework. For example, in some embodiments, the viral vector or the phage is a filamentous phage, for example, an M13 phage, e.g., an M13 selection phage. In certain embodiments, the gene required for the production of infectious viral particles is the M13 gene III (gIII). In embodiments, the phage may lack a functional gIII, but otherwise comprise gl, gII, gIV, gV, gVI, gVII, gVIII, gIX, and a gX. In some embodiments, the generation of infectious VSV particles involves the envelope protein VSV-G. Various embodiments can use different retroviral vectors, for example, Murine Leukemia Virus vectors, or Lentiviral vectors. In embodiments, the retroviral vectors can efficiently be packaged with VSV-G envelope protein, e.g., as a substitute for the native envelope protein of the virus.

[0548] In some embodiments, host cells are incubated according to a suitable number of viral life cycles, e.g., at least 10, at least 20, at least 30, at least 40, at least 50, at least 100, at least 200, at least 300, at least 400, at least, 500, at least 600, at least 700, at least 800, at least 900, at least 1000, at least 1250, at least 1500, at least 1750, at least 2000, at least 2500, at least 3000, at least 4000, at least 5000, at least 7500, at least 10000, or more consecutive viral life cycles, which in on illustrative and non-limiting examples of M13 phage is 10-20 minutes per virus life cycle. Similarly, conditions can be modulated to adjust the time a host cell remains in a population of host cells, e.g., about 10, about 11, about 12, about 13, about 14, about 15, about 16, about 17, about 18, about 19, about 20, about 21, about 22, about 23, about 24, about 25, about 30, about 35, about 40, about 45, about 50, about 55, about 60, about 70, about 80, about 90, about 100, about 120, about 150, or about 180 minutes. Host cell populations can be controlled in part by density of the host cells, or, in some embodiments, the host cell density in an inflow, e.g., 10³ cells/ml, about 10⁴ cells/ml, about 10⁵ cells/ml, about 5-10⁵ cells/ml, about 10⁶ cells/ml, about 5-10⁶ cells/ml, about 10⁷ cells/ml, about 5-10⁷ cells/ml, about 10⁸ cells/ml, about 5-10⁸ cells/ml, about 10⁹ cells/ml, about 5·10⁹ cells/ml, about 10¹⁰ cells/ml, or about 5·10¹⁰ cells/ml.

### Inteins

[0549] In some embodiments, as described in more detail below, an intein-N(intN) domain may be fused to the N-terminal portion of a first domain of a gene modifying polypeptide described herein, and an intein-C(intC) domain may be fused to the C-terminal portion of a second domain of a gene modifying polypeptide described herein for the joining of the N-terminal portion to the C-terminal portion, thereby joining the first and second domains. In some embodiments, the first and second domains are each independently chosen from a DNA binding domain, an RNA binding domain, an RT domain, and an endonuclease domain.

[0550] Inteins can occur as self-splicing protein intron (e.g., peptide), e.g., which ligates flanking N-terminal and C-terminal exteins (e.g., fragments to be joined). An intein may, in some instances, comprise a fragment of a protein that is able to excise itself and join the remaining fragments (the exteins) with a peptide bond in a process known as protein splicing. Inteins are also referred to as “protein introns.” The process of an intein excising itself and joining the remaining portions of the protein is herein termed “protein splicing” or “intein-mediated protein splicing.”

[0551] In some embodiments, an intein of a precursor protein (an intein containing protein prior to intein-mediated protein splicing) comes from two genes. Such intein is referred to herein as a split intein (e.g., split intein-N and split intein-C). Accordingly, an intein-based approach may be used to join a first polypeptide sequence and a second polypeptide sequence together. For example, in cyanobacteria, DnaE, the catalytic subunit a of DNA polymerase III, is encoded by two separate genes, dnaE-n and dnaE-c. An intein-N domain, such as that encoded by the dnaE-n gene, when situated as part of a first polypeptide sequence, may join the first polypeptide sequence with a second polypeptide sequence, wherein the second polypeptide sequence comprises an intein-C domain, such as that encoded by the dnaE-c gene. Accordingly, in some embodiments, a protein can be made by providing nucleic acid encoding the first and second polypeptide sequences (e.g., wherein a first nucleic acid molecule encodes the first polypeptide sequence and a second nucleic acid molecule encodes the second polypeptide sequence), and the nucleic acid is introduced into the cell under conditions that allow for production of the first and second polypeptide sequences, and for joining of the first to the second polypeptide sequence via an intein-based mechanism.

[0552] Use of inteins for joining heterologous protein fragments is described, for example, in Wood et al., J. Biol. Chem.289(21); 14512-9 (2014) (incorporated herein by reference in its entirety). For example, when fused to separate protein fragments, the inteins IntN and IntC may recognize each other, splice themselves out, and/or simultaneously ligate the flanking N- and C-terminal exteins of the protein fragments to which they were fused, thereby reconstituting a full-length protein from the two protein fragments.

[0553] In some embodiments, a synthetic intein based on the dnaE intein, the Cfa-N(e.g., split intein-N) and Cfa-C(e.g., split intein-C) intein pair, is used. Examples of such inteins have been described, e.g., in Stevens et al., J Am Chem Soc. 2016 Feb. 24; 138(7):2162-5 (incorporated herein by reference in its entirety). Non-limiting examples of intein pairs that may be used in accordance with the present disclosure include: Cfa DnaE intein, Ssp GyrB intein, Ssp DnaX intein, Ter DnaE3 intein, Ter Thy X intein, Rma DnaB intein and Cne Prp8 intein (e.g., as described in U.S. Pat. No. 8,394,604, incorporated herein by reference.

[0554] In some embodiments involving a split Cas9, an intein-N domain and an intein-C domain may be fused to the N-terminal portion of the split Cas9 and the C-terminal portion of a split Cas9, respectively, for the joining of the N-terminal portion of the split Cas9 and the C-terminal portion of the split Cas9. For example, in some embodiments, an intein-N is fused to the C—terminus of the N-terminal portion of the split Cas9, i.e., to form a structure of N—[N-terminal portion of the split Cas9]-[intein-N]˜C. In some embodiments, an intein-C is fused to the N-terminus of the C-terminal portion of the split Cas9, i.e., to form a structure of N-[intein-C]˜[C-terminal portion of the split Cas9]-C. The mechanism of intein-mediated protein splicing for joining the proteins the inteins are fused to (e.g., split Cas9) is described in Shah et al., Chem Sci. 2014; 5(1):446-461, incorporated herein by reference. Methods for designing and using inteins are known in the art and described, for example by WO2020051561, WO2014004336, WO2017132580, US20150344549, and US20180127780, each of which is incorporated herein by reference in their entirety.

[0555] In some embodiments, a split refers to a division into two or more fragments. In some embodiments, a split Cas9 protein or split Cas9 comprises a Cas9 protein that is provided as an N-terminal fragment and a C-terminal fragment encoded by two separate nucleotide sequences. The polypeptides corresponding to the N-terminal portion and the C-terminal portion of the Cas9 protein may be spliced to form a reconstituted Cas9 protein. In embodiments, the Cas9 protein is divided into two fragments within a disordered region of the protein, e.g., as described in Nishimasu et al., Cell, Volume 156, Issue 5, pp. 935-949, 2014, or as described in Jiang et al. (2016) Science 351: 867-871 and PDB file: 5F9R (each of which is incorporated herein by reference in its entirety). A disordered region may be determined by one or more protein structure determination techniques known in the art, including, without limitation, X-ray crystallography, NMR spectroscopy, electron microscopy (e.g., cryoEM), and/or in silico protein modeling. In some embodiments, the protein is divided into two fragments at any C, T, A, or S, e.g., within a region of SpCas9 between amino acids A292-G364, F445-K483, or E565-T637, or at corresponding positions in any other Cas9, Cas9 variant (e.g., nCas9, dCas9), or other napDNAbp. In some embodiments, protein is divided into two fragments at SpCas9 T310, T313, A456, S469, or C574. In some embodiments, the process of dividing the protein into two fragments is referred to as splitting the protein.

[0556] In some embodiments, a protein fragment ranges from about 2-1000 amino acids (e.g., between 2-10, 10-50, 50-100, 100-200, 200-300, 300-400, 400-500, 500-600, 600-700, 700-800, 800-900, or 900-1000 amino acids) in length. In some embodiments, a protein fragment ranges from about 5-500 amino acids (e.g., between 5-10, 10-50, 50-100, 100-200, 200-300, 300-400, or 400-500 amino acids) in length. In some embodiments, a protein fragment ranges from about 20-200 amino acids (e.g., between 20-30, 30-40, 40-50, 50-100, or 100-200 amino acids) in length.

[0557] In some embodiments, a portion or fragment of a gene modifying polypeptide is fused to an intein. The nuclease can be fused to the N-terminus or the C-terminus of the intein. In some embodiments, a portion or fragment of a fusion protein is fused to an intein and fused to an AAV capsid protein. The intein, nuclease and capsid protein can be fused together in any arrangement (e.g., nuclease-intein-capsid, intein-nuclease-capsid, capsid-intein-nuclease, etc.). In some embodiments, the N-terminus of an intein is fused to the C-terminus of a fusion protein and the C-terminus of the intein is fused to the N-terminus of an AAV capsid protein.

[0558] In some embodiments, an endonuclease domain (e.g., a nickase Cas9 domain) is fused to intein-N and a polypeptide comprising an RT domain is fused to an intein-C.

[0559] Exemplary nucleotide and amino acid sequences of intein-N domains and compatible intein-C domains are provided below:

DnaE Intein-N DNA:
(SEQ ID NO: 5029)
TGCCTGTCATACGAAACCGAGATACTGACAGTAGAATATGGCCTT
CTGCCAATCGGGAAGATTGTGGAGAAACGGATAGAATGCACAGTT
TACTCTGTCGATAACAATGGTAACATTTATACTCAGCCAGTTGCC
CAGTGGCACGACCGGGGAGAGCAGGAAGTATTCGAATACTGTCTG
GAGGATGGAAGTCTCATTAGGGCCACTAAGGACCACAAATTTATG
ACAGTCGATGGCCAGATGCTGCCTATAGACGAAATCTTTGAGCGA
GAGTTGGACCTCATGCGAGTTGACAACCTTCCTAAT
DnaE Intein-N Protein:
(SEQ ID NO: 5030)
CLSYETEILTVEYGLLPIGKIVEKRIECTVYSVDNNGNIYTQPVA
QWHDRGEQEVFEYCLEDGSLIRATKDHKFMTVDGQMLPIDEIFER
ELDLMRVDNLPN
DnaE Intein-C DNA:
(SEQ ID NO: 5031)
ATGATCAAGATAGCTACAAGGAAGTATCTTGGCAAACAAAACGTT
TATGATATTGGAGTCGAAAGAGATCACAACTTTGCTCTGAAGAAC
GGATTCATAGCTTCTAAT
DnaE Intein-C Protein:
(SEQ ID NO: 5032)
MIKIATRKYLGKQNVYDIGVERDHNFALKNGFIASN
Cfa-N DNA:
(SEQ ID NO: 5033)
TGCCTGTCTTATGATACCGAGATACTTACCGTTGAATATGGCTTC
TTGCCTATTGGAAAGATTGTCGAAGAGAGAATTGAATGCACAGTA
TATACTGTAGACAAGAATGGTTTCGTTTACACACAGCCCATTGCT
CAATGGCACAATCGCGGCGAACAAGAAGTATTTGAGTACTGTCTC
GAGGATGGAAGCATCATACGAGCAACTAAAGATCATAAATTCATG
ACCACTGACGGGCAGATGTTGCCAATAGATGAGATATTCGAGCGG
GGCTTGGATCTCAAACAAGTGGATGGATTGCCA
Cfa-N Protein:
(SEQ ID NO: 5034)
CLSYDTEILTVEYGFLPIGKIVEERIECTVYTVDKNGFVYTQPIA
QWHNRGEQEVFEYCLEDGSIIRATKDHKFMTTDGQMLPIDEIFER
GLDLKQVDGLP
Cfa-C DNA:
(SEQ ID NO: 5035)
ATGAAGAGGACTGCCGATGGATCAGAGTTTGAATCTCCCAAGAAG
AAGAGGAAAGTAAAGATAATATCTCGAAAAAGTCTTGGTACCCAA
AATGTCTATGATATTGGAGTGGAGAAAGATCACAACTTCCTTCTC
AAGAACGGTCTCGTAGCCAGCAAC
Cfa-C Protein:
(SEQ ID NO: 5036)
MKRTADGSEFESPKKKRKVKIISRKSLGTQNVYDIGVEKDHNFLL
KNGLVASN

### Additional Domains

[0560] The gene modifying polypeptide can bind a target DNA sequence and template nucleic acid (e.g., template RNA), nick the target site, and write (e.g., reverse transcribe) the template into DNA, resulting in a modification of the target site. In some embodiments, additional domains may be added to the polypeptide to enhance the efficiency of the process. In some embodiments, the gene modifying polypeptide may contain an additional DNA ligation domain to join reverse transcribed DNA to the DNA of the target site. In some embodiments, the polypeptide may comprise a heterologous RNA-binding domain. In some embodiments, the polypeptide may comprise a domain having 5′ to 3′ exonuclease activity (e.g., wherein the 5′ to 3′ exonuclease activity increases repair of the alteration of the target site, e.g., in favor of alteration over the original genomic sequence). In some embodiments, the polypeptide may comprise a domain having 3′ to 5′ exonuclease activity, e.g., proof-reading activity. In some embodiments, the writing domain, e.g., RT domain, has 3′ to 5′ exonuclease activity, e.g., proof-reading activity.

### Template Nucleic Acids

[0561] The gene modifying systems described herein can modify a host target DNA site using a template nucleic acid sequence. In some embodiments, the gene modifying systems described herein transcribe an RNA sequence template into host target DNA sites by target-primed reverse transcription (TPRT). By modifying DNA sequence(s) via reverse transcription of the RNA sequence template directly into the host genome, the gene modifying system can insert an object sequence into a target genome without the need for exogenous DNA sequences to be introduced into the host cell (unlike, for example, CRISPR systems), as well as eliminate an exogenous DNA insertion step. The gene modifying system can also delete a sequence from the target genome or introduce a substitution using an object sequence. Therefore, the gene modifying system provides a platform for the use of customized RNA sequence templates containing object sequences, e.g., sequences comprising heterologous gene coding and/or function information.

[0562] In some embodiments, the template nucleic acid comprises one or more sequence (e.g., 2 sequences) that binds the gene modifying polypeptide.

[0563] In some embodiments a system or method described herein comprises a single template nucleic acid (e.g., template RNA). In some embodiments a system or method described herein comprises a plurality of template nucleic acids (e.g., template RNAs). For example, a system described herein comprises a first RNA comprising (e.g., from 5′ to 3′) a sequence that binds the gene modifying polypeptide (e.g., the DNA-binding domain and/or the endonuclease domain, e.g., a gRNA) and a sequence that binds a target site (e.g., a second strand of a site in a target genome), and a second RNA (e.g., a template RNA) comprising (e.g., from 5′ to 3′) optionally a sequence that binds the gene modifying polypeptide (e.g., that specifically binds the RT domain), a heterologous object sequence, and a PBS sequence. In some embodiments, when the system comprises a plurality of nucleic acids, each nucleic acid comprises a conjugating domain. In some embodiments, a conjugating domain enables association of nucleic acid molecules, e.g., by hybridization of complementary sequences. For example, in some embodiments a first RNA comprises a first conjugating domain and a second RNA comprises a second conjugating domain, and the first and second conjugating domains are capable of hybridizing to one another, e.g., under stringent conditions. In some embodiments, the stringent conditions for hybridization include hybridization in 4x sodium chloride/sodium citrate (SSC), at about 65 C, followed by a wash in 1×SSC, at about 65 C.

[0564] In some embodiments, the template nucleic acid comprises RNA. In some embodiments, the template nucleic acid comprises DNA (e.g., single stranded or double stranded DNA).

[0565] In some embodiments, the template nucleic acid comprises one or more (e.g., 2) homology domains that have homology to the target sequence. In some embodiments, the homology domains are about 10-20, 20-50, or 50-100 nucleotides in length.

[0566] In some embodiments, a template RNA can comprise a gRNA sequence, e.g., to direct the gene modifying polypeptide to a target site of interest. In some embodiments, a template RNA comprises (e.g., from 5′ to 3′) (i) optionally a gRNA spacer that binds a target site (e.g., a second strand of a site in a target genome), (ii) optionally a gRNA scaffold that binds a polypeptide described herein (e.g., a gene modifying polypeptide or a Cas polypeptide), (iii) a heterologous object sequence comprising a mutation region (optionally the heterologous object sequence comprises, from 5′ to 3′, a first homology region, a mutation region, and a second homology region), and (iv) a primer binding site (PBS) sequence comprising a 3′ target homology domain.

[0567] The template nucleic acid (e.g., template RNA) component of a genome editing system described herein typically is able to bind the gene modifying polypeptide of the system. In some embodiments the template nucleic acid (e.g., template RNA) has a 3′ region that is capable of binding a gene modifying polypeptide. The binding region, e.g., 3′ region, may be a structured RNA region, e.g., having at least 1, 2 or 3 hairpin loops, capable of binding the gene modifying polypeptide of the system. The binding region may associate the template nucleic acid (e.g., template RNA) with any of the polypeptide modules. In some embodiments, the binding region of the template nucleic acid (e.g., template RNA) may associate with an RNA-binding domain in the polypeptide. In some embodiments, the binding region of the template nucleic acid (e.g., template RNA) may associate with the reverse transcription domain of the gene modifying polypeptide (e.g., specifically bind to the RT domain). In some embodiments, the template nucleic acid (e.g., template RNA) may associate with the DNA binding domain of the polypeptide, e.g., a gRNA associating with a Cas9-derived DNA binding domain. In some embodiments, the binding region may also provide DNA target recognition, e.g., a gRNA hybridizing to the target DNA sequence and binding the polypeptide, e.g., a Cas9 domain. In some embodiments, the template nucleic acid (e.g., template RNA) may associate with multiple components of the polypeptide, e.g., DNA binding domain and reverse transcription domain.

[0568] In some embodiments the template RNA has a poly-A tail at the 3′ end. In some embodiments the template RNA does not have a poly-A tail at the 3′ end.

[0569] In some embodiments, the template nucleic acid is a template RNA. In some embodiments, the template RNA comprises one or more modified nucleotides. For example, in some embodiments, the template RNA comprises one or more deoxyribonucleotides. In some embodiments, regions of the template RNA are replaced by DNA nucleotides, e.g., to enhance stability of the molecule. For example, the 3′ end of the template may comprise DNA nucleotides, while the rest of the template comprises RNA nucleotides that can be reverse transcribed. For instance, in some embodiments, the heterologous object sequence is primarily or wholly made up of RNA nucleotides (e.g., at least 90%, 95%, 98%, or 99% RNA nucleotides). In some embodiments, the PBS sequence is primarily or wholly made up of DNA nucleotides (e.g., at least 90%, 95%, 98%, or 99% DNA nucleotides). In other embodiments, the heterologous object sequence for writing into the genome may comprise DNA nucleotides. In some embodiments, the DNA nucleotides in the template are copied into the genome by a domain capable of DNA-dependent DNA polymerase activity. In some embodiments, the DNA-dependent DNA polymerase activity is provided by a DNA polymerase domain in the polypeptide. In some embodiments, the DNA-dependent DNA polymerase activity is provided by a reverse transcriptase domain that is also capable of DNA-dependent DNA polymerization, e.g., second strand synthesis. In some embodiments, the template molecule is composed of only DNA nucleotides.

[0570] In some embodiments, a system described herein comprises two nucleic acids which together comprise the sequences of a template RNA described herein. In some embodiments, the two nucleic acids are associated with each other non-covalently, e.g., directly associated with each other (e.g., via base pairing), or indirectly associated as part of a complex comprising one or more additional molecule.

[0571] A template RNA described herein may comprise, from 5′ to 3′: (1) a gRNA spacer; (2) a gRNA scaffold; (3) heterologous object sequence (4) a primer binding site (PBS) sequence. Each of these components is now described in more detail.

gRNA Spacer and gRNA Scaffold

[0572] A template RNA described herein may comprise a gRNA spacer that directs the gene modifying system to a target nucleic acid, and a gRNA scaffold that promotes association of the template RNA with the Cas domain of the gene modifying polypeptide. The systems described herein can also comprise a gRNA that is not part of a template nucleic acid. For example, a gRNA that comprises a gRNA spacer and gRNA scaffold, but not a heterologous object sequence or a PBS sequence, can be used, e.g., to induce second strand nicking, e.g., as described in the section herein entitled “Second Strand Nicking”.

[0573] In some embodiments, the gRNA is a short synthetic RNA composed of a scaffold sequence that participates in CRISPR-associated protein binding and a user-defined ˜20 nucleotide targeting sequence for a genomic target. The structure of a complete gRNA was described by Nishimasu et al. Cell 156, P935-949 (2014). The gRNA (also referred to as sgRNA for single-guide RNA) consists of crRNA- and tracrRNA-derived sequences connected by an artificial tetraloop. The crRNA sequence can be divided into guide (20 nt) and repeat (12 nt) regions, whereas the tracrRNA sequence can be divided into anti-repeat (14 nt) and three tracrRNA stem loops (Nishimasu et al. Cell 156, P935-949 (2014)). In practice, guide RNA sequences are generally designed to have a length of between 17-24 nucleotides (e.g., 19, 20, or 21 nucleotides) and be complementary to a targeted nucleic acid sequence. Custom gRNA generators and algorithms are available commercially for use in the design of effective guide RNAs. In some embodiments, the gRNA comprises two RNA components from the native CRISPR system, e.g. crRNA and tracrRNA. As is well known in the art, the gRNA may also comprise a chimeric, single guide RNA (sgRNA) containing sequence from both a tracrRNA (for binding the nuclease) and at least one crRNA (to guide the nuclease to the sequence targeted for editing/binding). Chemically modified sgRNAs have also been demonstrated to be effective for use with CRISPR-associated proteins; see, for example, Hendel et al. (2015) Nature Biotechnol., 985-991. In some embodiments, a gRNA spacer comprises a nucleic acid sequence that is complementary to a DNA sequence associated with a target gene.

[0574] In some embodiments, the region of the template nucleic acid, e.g., template RNA, comprising the gRNA adopts an underwound ribbon-like structure of gRNA bound to target DNA (e.g., as described in Mulepati et al. Science 19 Sep. 2014: Vol. 345, Issue 6203, pp. 1479-1484). Without wishing to be bound by theory, this non-canonical structure is thought to be facilitated by rotation of every sixth nucleotide out of the RNA-DNA hybrid. Thus, in some embodiments, the region of the template nucleic acid, e.g., template RNA, comprising the gRNA may tolerate increased mismatching with the target site at some interval, e.g., every sixth base. In some embodiments, the region of the template nucleic acid, e.g., template RNA, comprising the gRNA comprising homology to the target site may possess wobble positions at a regular interval, e.g., every sixth base, that do not need to base pair with the target site.

[0575] In some embodiments, the template nucleic acid (e.g., template RNA) has at least 15, 16, 17, 18, 19, 20, 21, 22, 23, or 24 bases of at least 80%, 85%, 90%, 95%, 99%, or 100% homology to the target site, e.g., at the 5′ end, e.g., comprising a gRNA spacer sequence of length appropriate to the Cas9 domain of the gene modifying polypeptide (Table 8).

[0576] In some embodiments, a Cas9 derivative with enhanced activity may be used in the gene modification polypeptide. In some embodiments, a Cas9 derivative may comprise mutations that improve activity of the HNH endonuclease domain, e.g., SpyCas9 R221K, N394K, or mutations that improve R-loop formation, e.g., SpyCas9 L1245V, or comprise a combination of such mutations, e.g., SpyCas9 R221K/N394K, SpyCas9 N394K/L1245V, SpyCas9 R221K/L1245V, or SpyCas9 R221K/N394K/L1245V (see, e.g., Spencer and Zhang Sci Rep 7:16836 (2017), the Cas9 derivatives and comprising mutations of which are incorporated herein by reference). In some embodiments, a Cas9 derivative may comprise one or more types of mutations described herein, e.g., PAM-modifying mutations, protein stabilizing mutations, activity enhancing mutations, and/or mutations partially or fully inactivating one or two endonuclease domains relative to the parental enzyme (e.g., one or more mutations to abolish endonuclease activity towards one or both strands of a target DNA, e.g., a nickase or catalytically dead enzyme). In some embodiments, a Cas9 enzyme used in a system described herein may comprise mutations that confer nickase activity toward the enzyme (e.g., SpyCas9 N863A or H840A) in addition to mutations improving catalytic efficiency (e.g., SpyCas9 R221K, N394K, and/or L1245V). In some embodiments, a Cas9 enzyme used in a system described herein is a SpyCas9 enzyme or derivative that further comprises an N863A mutation to confer nickase activity in addition to R221K and N394K mutations to improve catalytic efficiency.

[0577] Table 12 provides parameters to define components for designing gRNA and/or Template RNAs to apply Cas variants listed in Table 8 for gene modifying. The cut site indicates the validated or predicted protospacer adjacent motif (PAM) requirements, validated or predicted location of cut site (relative to the most upstream base of the PAM site). The gRNA for a given enzyme can be assembled by concatenating the crRNA, Tetraloop, and tracrRNA sequences, and further adding a 5′ spacer of a length within Spacer (min) and Spacer (max) that matches a protospacer at a target site. Further, the predicted location of the ssDNA nick at the target is important for designing a PBS sequence of a Template RNA that can anneal to the sequence immediately 5′ of the nick in order to initiate target primed reverse transcription. In some embodiments, a gRNA scaffold described herein comprises a nucleic acid sequence comprising, in the 5′ to 3′ direction, a crRNA of Table 12, a tetraloop from the same row of Table 12, and a tracrRNA from the same row of Table 12, or a sequence having at least 70%, 80%, 85%, 90%, 95%, or 99% identity thereto. In some embodiments, the gRNA or template RNA comprising the scaffold further comprises a gRNA spacer having a length within the Spacer (min) and Spacer (max) indicated in the same row of Table 12. In some embodiments, the gRNA or template RNA having a sequence according to Table 12 is comprised by a system that further comprises a gene modifying polypeptide, wherein the gene modifying polypeptide comprises a Cas domain described in the same row of Table 12.

TABLE 12
Parameters to define components for designing gRNA and/or Template RNAs to
apply Cas variants listed in Table 8 in gene modifying systems

| | | | | Spacer | Spacer | | SEQ ID | Tetra- | | SEQ ID |
|---|---|---|---|---|---|---|---|---|---|---|
| Variant | PAM(s) | Cut | Tier | (min) | (max) | crRNA | NO: | loop | tracrRNA | NO: |
| Nme2Cas9 | NNNNCC | -3 | 1 | 22 | 24 | GTTGTAGC | 10,051 | GAAA | CGAAATGAGAACCGTTGCTACAATAAGGC | 10,151 |
| | | | | | | TCCCTTTC | | | CGTCTGAAAAGATGTGCCGCAACGCTCTG | |
| | | | | | | TCATTTCG | | | CCCCTTAAAGCTTCTGCTTTAAGGGGCAT | |
| | | | | | | | | | CGTTTA | |
| PpnCas9 | NNNNRTT | | 1 | 21 | 24 | GTTGTAGC | 10,052 | GAAA | GCGAAATGAAAAACGTTGTTACAATAAGA | 10,152 |
| | | | | | | TCCCTTTT | | | GATGAATTTCTCGCAAAGCTCTGCCTCTT | |
| | | | | | | TCATTTCG | | | GAAATTTCGGTTTCAAGAGGCATC | |
| | | | | | | C | | | | |
| SauCas9 | NNGRR; | -3 | 1 | 21 | 23 | GTTTTAGT | 10,053 | GAAA | CAGAATCTACTAAAACAAGGCAAAATGCC | 10,153 |
| | NNGRRT | | | | | ACTCTG | | | GTGTTTATCTCGTCAACTTGTTGGCGAGA | |
| SauCas9-KKH | NNNRR; | -3 | 1 | 21 | 21 | GTTTTAGT | 10,054 | GAAA | CAGAATCTACTAAAACAAGGCAAAATGCC | 10,154 |
| | NNNRRT | | | | | ACTCTG | | | GTGTTTATCTCGTCAACTTGTTGGCGAGA | |
| SauriCas9 | NNGG | -3 | 1 | 21 | 21 | GTTTTAGT | 10,055 | GAAA | CAGAATCTACTAAAACAAGGCAAAATGCC | 10,155 |
| | | | | | | ACTCTG | | | GTGTTTATCTCGTCAACTTGTTGGCGAGA | |
| SauriCas9- | NNRG | -3 | 1 | 21 | 21 | GTTTTAGT | 10,056 | GAAA | CAGAATCTACTAAAACAAGGCAAAATGCC | 10,156 |
| KKH | | | | | | ACTCTG | | | GTGTTTATCTCGTCAACTTGTTGGCGAGA | |
| ScaCas9-Sc++ | NNG | -3 | 1 | 20 | 20 | GTTTTAGA | 10,057 | GAAA | TAGCAAGTTAAAATAAGGCTAGTCCGTTA | 10,157 |
| | | | | | | GCTA | | | TCAACTTGAAAAAGTGGCACCGAGTCGGT | |
| | | | | | | | | | GC | |
| SpyCas9 | NGG | -3 | 1 | 20 | 20 | GTTTTAGA | 10,058 | GAAA | TAGCAAGTTAAAATAAGGCTAGTCCGTTA | 10,158 |
| | | | | | | GCTA | | | TCAACTTGAAAAAGTGGCACCGAGTCGGT | |
| | | | | | | | | | GC | |
| SpyCas9_i_v1 | NGG | -3 | 1 | 20 | 20 | GTTTTAGA | 10,058 | GAAA | TAGCAAGTTAAAATAAGGCTAGTCCGTTA | 10,193 |
| | | | | | | GCTA | | | TCAACTTGGACTTCGGTCCAAGTGGCACC | |
| | | | | | | | | | GAGTCGGTGC | |
| SpyCas9_i_v2 | NGG | -3 | 1 | 20 | 20 | GTTTTAGA | 10,058 | GAAA | TAGCAAGTTAAAATAAGGCTAGTCCGTTA | 10,194 |
| | | | | | | GCTA | | | TCAACTTGGAGCTTGCTCCAAGTGGCACC | |
| | | | | | | | | | GAGTCGGTGC | |
| SpyCas9_i_v3 | NGG | -3 | 1 | 20 | 20 | GTTTTAGA | 10,058 | GAAA | GTTTTAGAGCTAGAAATAGCAAGTTAAAA | 10,195 |
| | | | | | | GCTA | | | TAAGGCTAGTCCGTTATCGACTTGAAAAA | |
| | | | | | | | | | GTCGCACCGAGTCGGTGC | |
| SpyCas9-NG | NG | -3 | 1 | 20 | 20 | GTTTTAGA | 10,059 | GAAA | TAGCAAGTTAAAATAAGGCTAGTCCGTTA | 10,159 |
| | (NGG = | | | | | GCTA | | | TCAACTTGAAAAAGTGGCACCGAGTCGGT | |
| | NGA = | | | | | | | | GC | |
| | NGT > | | | | | | | | | |
| | NGC) | | | | | | | | | |
| SpyCas9-SpRY | NRN > | -3 | 1 | 20 | 20 | GTTTTAGA | 10,060 | GAAA | TAGCAAGTTAAAATAAGGCTAGTCCGTTA | 10,160 |
| | NYN | | | | | GCTA | | | TCAACTTGAAAAAGTGGCACCGAGTCGGT | |
| | | | | | | | | | GC | |
| St1Cas9 | NNAGAAW > | -3 | 1 | 20 | 20 | GTCTTTGT | 10,061 | GTAC | CAGAAGCTACAAAGATAAGGCTTCATGCC | 10,161 |
| | NNAGGAW = | | | | | ACTCTG | | | GAAATCAACACCCTGTCATTTTATGGCAG | |
| | NNGGAAW | | | | | | | | GGTGTTTT | |
| BlatCas9 | NNNNCNAA > | -3 | 1 | 19 | 23 | GCTATAGT | 10,062 | GAAA | GGTAAGTTGCTATAGTAAGGGCAACAGAC | 10,162 |
| | NNNNCNDD > | | | | | TCCTTACT | | | CCGAGGCGTTGGGGATCGCCTAGCCCGTG | |
| | NNNNC | | | | | | | | TTTACGGGCTCTCCCCATATTCAAAATAA | |
| | | | | | | | | | TGACAGACGAGCACCTTGGAGCATTTATC | |
| | | | | | | | | | TCCGAGGTGCT | |
| cCas9-v16 | NNVACT; | -3 | 2 | 21 | 21 | GTCTTAGT | 10,063 | GAAA | CAGAATCTACTAAGACAAGGCAAAATGCC | 10,163 |
| | NNVATGM; | | | | | ACTCTG | | | GTGTTTATCTCGTCAACTTGTTGGCGAGA | |
| | NNVATT; | | | | | | | | | |
| | NNVGCT; | | | | | | | | | |
| | NNVGTG; | | | | | | | | | |
| | NNVGTT | | | | | | | | | |
| cCas9-v17 | NNVRRN | -3 | 2 | 21 | 21 | GTCTTAGT | 10,064 | GAAA | CAGAATCTACTAAGACAAGGCAAAATGCC | 10,164 |
| | | | | | | ACTCTG | | | GTGTTTATCTCGTCAACTTGTTGGCGAGA | |
| cCas9-v21 | NNVACT; | -3 | 2 | 21 | 21 | GTCTTAGT | 10,065 | GAAA | CAGAATCTACTAAGACAAGGCAAAATGCC | 10,165 |
| | NNVATGM; | | | | | ACTCTG | | | GTGTTTATCTCGTCAACTTGTTGGCGAGA | |
| | NNVATT; | | | | | | | | | |
| | NNVGCT; | | | | | | | | | |
| | NNVGTG; | | | | | | | | | |
| | NNVGTT | | | | | | | | | |
| cCas9-v42 | NNVRRN | -3 | 2 | 21 | 21 | GTCTTAGT | 10,066 | GAAA | CAGAATCTACTAAGACAAGGCAAAATGCC | 10,166 |
| | | | | | | ACTCTG | | | GTGTTTATCTCGTCAACTTGTTGGCGAGA | |
| CdiCas9 | NNRHHHY; | | 2 | 22 | 22 | ACTGGGGT | 10,067 | GAAA | CTGAACCTCAGTAAGCATTGGCTCGTTTC | 10,167 |
| | NNRAAAY | | | | | TCAG | | | CAATGTTGATTGCTCCGCCGGTGCTCCTT | |
| | | | | | | | | | ATTTTTAAGGGCGCCGGC | |
| CjeCas9 | NNNNRYAC | -3 | 2 | 21 | 23 | GTTTTAGT | 10,068 | GAAA | AGGGACTAAAATAAAGAGTTTGCGGGACT | 10,168 |
| | | | | | | CCCT | | | CTGCGGGGTTACAATCCCCTAAAACCGC | |
| GeoCas9 | NNNNCRAA | | 2 | 21 | 23 | GTCATAGT | 10,069 | GAAA | TCAGGGTTACTATGATAAGGGCTTTCTGC | 10,169 |
| | | | | | | TCCCCTGA | | | CTAAGGCAGACTGACCCGCGGCGTTGGGG | |
| | | | | | | | | | ATCGCCTGTCGCCCGCTTTTGGCGGGCAT | |
| | | | | | | | | | TCCCCATCCTT | |
| iSpyMacCas9 | NAAN | -3 | 2 | 19 | 21 | GTTTTAGA | 10,070 | GAAA | TAGCAAGTTAAAATAAGGCTAGTCCGTTA | 10,170 |
| | | | | | | GCTA | | | TCAACTTGAAAAAGTGGCACCGAGTCGGT | |
| | | | | | | | | | GC | |
| NmeCas9 | NNNNGAYT; | -3 | 2 | 20 | 24 | GTTGTAGC | 10,071 | GAAA | CGAAATGAGAACCGTTGCTACAATAAGGC | 10,171 |
| | NNNNGYTT; | | | | | TCCCTTTC | | | CGTCTGAAAAGATGTGCCGCAACGCTCTG | |
| | NNNNGAYA; | | | | | TCATTTCG | | | CCCCTTAAAGCTTCTGCTTTAAGGGGCAT | |
| | NNNNGTCT | | | | | | | | CGTTTA | |
| ScaCas9 | NNG | -3 | 2 | 20 | 20 | GTTTTAGA | 10,072 | GAAA | TAGCAAGTTAAAATAAGGCTAGTCCGTTA | 10,172 |
| | | | | | | GCTA | | | TCAACTTGAAAAAGTGGCACCGAGTCGGT | |
| | | | | | | | | | GC | |
| ScaCas9- | NNG | -3 | 2 | 20 | 20 | GTTTTAGA | 10,073 | GAAA | TAGCAAGTTAAAATAAGGCTAGTCCGTTA | 10,173 |
| HiFi-Sc++ | | | | | | GCTA | | | TCAACTTGAAAAAGTGGCACCGAGTCGGT | |
| | | | | | | | | | GC | |
| SpyCas9- | NRRH | -3 | 2 | 20 | 20 | GTTTAAGA | 10,074 | GAAA | CAGCATAGCAAGTTTAAATAAGGCTAGTC | 10,174 |
| 3var-NRRH | | | | | | GCTATGCT | | | CGTTATCAACTTGAAAAAGTGGCACCGAG | |
| | | | | | | G | | | TCGGTGC | |
| SpyCas9- | NRTH | -3 | 2 | 20 | 20 | GTTTAAGA | 10,075 | GAAA | CAGCATAGCAAGTTTAAATAAGGCTAGTC | 10,175 |
| 3var-NRTH | | | | | | GCTATGCT | | | CGTTATCAACTTGAAAAAGTGGCACCGAG | |
| | | | | | | G | | | TCGGTGC | |
| SpyCas9- | NRCH | -3 | 2 | 20 | 20 | GTTTAAGA | 10,076 | GAAA | CAGCATAGCAAGTTTAAATAAGGCTAGTC | 10,176 |
| 3var-NRCH | | | | | | GCTATGCT | | | CGTTATCAACTTGAAAAAGTGGCACCGAG | |
| | | | | | | G | | | TCGGTGC | |
| SpyCas9-HF1 | NGG | -3 | 2 | 20 | 20 | GTTTTAGA | 10,077 | GAAA | TAGCAAGTTAAAATAAGGCTAGTCCGTTA | 10,177 |
| | | | | | | GCTA | | | TCAACTTGAAAAAGTGGCACCGAGTCGGT | |
| | | | | | | | | | GC | |
| SpyCas9- | NAAG | -3 | 2 | 20 | 20 | GTTTTAGA | 10,078 | GAAA | TAGCAAGTTAAAATAAGGCTAGTCCGTTA | 10,178 |
| QQR1 | | | | | | GCTA | | | TCAACTTGAAAAAGTGGCACCGAGTCGGT | |
| | | | | | | | | | GC | |
| SpyCas9-SpG | NGN | -3 | 2 | 20 | 20 | GTTTTAGA | 10,079 | GAAA | TAGCAAGTTAAAATAAGGCTAGTCCGTTA | 10,179 |
| | | | | | | GCTA | | | TCAACTTGAAAAAGTGGCACCGAGTCGGT | |
| | | | | | | | | | GC | |
| SpyCas9-VQR | NGAN | -3 | 2 | 20 | 20 | GTTTTAGA | 10,080 | GAAA | TAGCAAGTTAAAATAAGGCTAGTCCGTTA | 10,180 |
| | | | | | | GCTA | | | TCAACTTGAAAAAGTGGCACCGAGTCGGT | |
| | | | | | | | | | GC | |
| SpyCas9-VRER | NGCG | -3 | 2 | 20 | 20 | GTTTTAGA | 10,081 | GAAA | TAGCAAGTTAAAATAAGGCTAGTCCGTTA | 10,181 |
| | | | | | | GCTA | | | TCAACTTGAAAAAGTGGCACCGAGTCGGT | |
| | | | | | | | | | GC | |
| SpyCas9-xCas | NG;GAA; | -3 | 2 | 20 | 20 | GTTTAAGA | 10,082 | GAAA | CAGCATAGCAAGTTTAAATAAGGCTAGTC | 10,182 |
| | GAT | | | | | GCTATGCT | | | CGTTATCAACTTGAAAAAGTGGCACCGAG | |
| | | | | | | G | | | TCGGTGC | |
| SpyCas9- | NG | -3 | 2 | 20 | 20 | GTTTAAGA | 10,083 | GAAA | CAGCATAGCAAGTTTAAATAAGGCTAGTC | 10,183 |
| xCas-NG | | | | | | GCTATGCT | | | CGTTATCAACTTGAAAAAGTGGCACCGAG | |
| | | | | | | G | | | TCGGTGC | |
| St1Cas9- | NNACAA | -3 | 2 | 20 | 20 | GTCTTTGT | 10,084 | GTAC | CAGAAGCTACAAAGATAAGGCTTCATGCC | 10,184 |
| CNRZ1066 | | | | | | ACTCTG | | | GAAATCAACACCCTGTCATTTTATGGCAG | |
| | | | | | | | | | GGTGTTTT | |
| St1Cas9- | NNGCAA | -3 | 2 | 20 | 20 | GTCTTTGT | 10,085 | GTAC | CAGAAGCTACAAAGATAAGGCTTCATGCC | 10,185 |
| LMG1831 | | | | | | ACTCTG | | | GAAATCAACACCCTGTCATTTTATGGCAG | |
| | | | | | | | | | GGTGTTTT | |
| St1Cas9- | NNAAAA | -3 | 2 | 20 | 20 | GTCTTTGT | 10,086 | GTAC | CAGAAGCTACAAAGATAAGGCTTCATGCC | 10,186 |
| MTH17CL396 | | | | | | ACTCTG | | | GAAATCAACACCCTGTCATTTTATGGCAG | |
| | | | | | | | | | GGTGTTTT | |
| St1Cas9- | NNGAAA | -3 | 2 | 20 | 20 | GTCTTTGT | 10,087 | GTAC | CAGAAGCTACAAAGATAAGGCTTCATGCC | 10,187 |
| TH1477 | | | | | | ACTCTG | | | GAAATCAACACCCTGTCATTTTATGGCAG | |
| | | | | | | | | | GGTGTTTT | |
| sRGN3.1 | NNGG | | 1 | 21 | 23 | GTTTTAGT | 10,088 | GAAA | CAGAATCTACTGAAACAAGACAATATGTC | 10,188 |
| | | | | | | ACTCTG | | | GTGTTTATCCCATCAATTTATTGGTGGGA | |
| | | | | | | | | | TTTT | |
| sRGN3.3 | NNGG | | 1 | 21 | 23 | GTTTTAGT | 10,089 | GAAA | CAGAATCTACTGAAACAAGACAATATGTC | 10,189 |
| | | | | | | ACTCTG | | | GTGTTTATCCCATCAATTTATTGGTGGGA | |
| | | | | | | | | | TTTT | |

[0578] Herein, when an RNA sequence (e.g., a template RNA sequence) is said to comprise a particular sequence (e.g., a sequence of Table 12 or a portion thereof) that comprises thymine (T), it is of course understood that the RNA sequence may (and frequently does) comprise uracil (U) in place of T. For instance, the RNA sequence may comprise U at every position shown as T in the sequence in Table 12. More specifically, the present disclosure provides an RNA sequence according to every gRNA scaffold sequence of Table 12, wherein the RNA sequence has a U in place of each T in the sequence in Table 12. Additionally, it is understood that terminal Us and Ts may optionally be added or removed from tracrRNA sequences and may be modified or unmodified when provided as RNA. Without wishing to be bound by example, versions of gRNA scaffold sequences alternative to those exemplified in Table 12 may also function with the different Cas9 enzymes or derivatives thereof exemplified in Table 8, e.g., alternate gRNA scaffold sequences with nucleotide additions, substitutions, or deletions, e.g., sequences with stem-loop structures added or removed. It is contemplated herein that the gRNA scaffold sequences represent a component of gene modifying systems that can be similarly optimized for a given system, Cas-RT fusion polypeptide, indication, target mutation, template RNA, or delivery vehicle.

### Heterologous Object Sequence

[0579] A template RNA described herein may comprise a heterologous object sequence that the gene modifying polypeptide can use as a template for reverse transcription, to write a desired sequence into the target nucleic acid. In some embodiments, the heterologous object sequence comprises, from 5′ to 3′, a post-edit homology region, the mutation region, and a pre-edit homology region. Without wishing to be bound by theory, an RT performing reverse transcription on the template RNA first reverse transcribes the pre-edit homology region, then the mutation region, and then the post-edit homology region, thereby creating a DNA strand comprising the desired mutation with a homology region on either side.

[0580] In some embodiments, the heterologous object sequence is at least 32, 33, 34, 35, 36, 37, 38, 39, 40, 41, 42, 43, 44, 45, 46, 47, 48, 49, 50, 51, 52, 53, 54, 55, 56, 57, 58, 59, 60, 61, 62, 63, 64, 65, 66, 67, 68, 69, 70, 71, 72, 73, 74, 75, 76, 77, 78, 79, 80, 81, 82, 83, 84, 85, 86, 87, 88, 89, 90, 91, 92, 93, 94, 95, 96, 97, 98, 99, 100, 120, 140, 160, 180, 200, 500, or 1,000 nucleotides (nts) in length, or at least 1, 1.5, 2, 2.5, 3, 3.5, 4, 4.5, 5, 5.5, 6, 6.5, 7, 7.5, 8, 8.5, 9, 9.5, or 10 kilobases in length. In some embodiments, the heterologous object sequence is no more than 33, 34, 35, 36, 37, 38, 39, 40, 41, 42, 43, 44, 45, 46, 47, 48, 49, 50, 51, 52, 53, 54, 55, 56, 57, 58, 59, 60, 61, 62, 63, 64, 65, 66, 67, 68, 69, 70, 71, 72, 73, 74, 75, 76, 77, 78, 79, 80, 81, 82, 83, 84, 85, 86, 87, 88, 89, 90, 91, 92, 93, 94, 95, 96, 97, 98, 99, 100, 120, 140, 160, 180, 200, 500, 1,000, or 2000 nucleotides (nts) in length, or no more than 20, 15, 10, 9, 8, 7, 6, 5, 4, or 3 kilobases in length. In some embodiments, the heterologous object sequence is 30-1000, 40-1000, 50-1000, 60-1000, 70-1000, 74-1000, 75-1000, 76-1000, 77-1000, 78-1000, 79-1000, 80-1000, 85-1000, 90-1000, 100-1000, 120-1000, 140-1000, 160-1000, 180-1000, 200-1000, 500-1000, 30-500, 40-500, 50-500, 60-500, 70-500, 74-500, 75-500, 76-500, 77-500, 78-500, 79-500, 80-500, 85-500, 90-500, 100-500, 120-500, 140-500, 160-500, 180-500, 200-500, 30-200, 40-200, 50-200, 60-200, 70-200, 74-200, 75-200, 76-200, 77-200, 78-200, 79-200, 80-200, 85-200, 90-200, 100-200, 120-200, 140-200, 160-200, 180-200, 30-100, 40-100, 50-100, 60-100, 70-100, 74-100, 75-100, 76-100, 77-100, 78-100, 79-100, 80-100, 85-100, or 90-100 nucleotides (nts) in length, or 1-20, 1-15, 1-10, 1-9, 1-8, 1-7, 1-6, 1-5, 1-4, 1-3, 1-2, 2-20, 2-15, 2-10, 2-9, 2-8, 2-7, 2-6, 2-5, 2-4, 2-3, 3-20, 3-15, 3-10, 3-9, 3-8, 3-7, 3-6, 3-5, 3-4, 4-20, 4-15, 4-10, 4-9, 4-8, 4-7, 4-6, 4-5, 5-20, 5-15, 5-10, 5-9, 5-8, 5-7, 5-6, 6-20, 6-15, 6-10, 6-9, 6-8, 6-7, 7-20, 7-15, 7-10, 7-9, 7-8, 8-20, 8-15, 8-10, 8-9, 9-20, 9-15, 9-10, 10-15, 10-20, or 15-20 kilobases in length. In some embodiments, the heterologous object sequence is 10-100, 10-90, 10-80, 10-70, 10-60, 10-50, 10-40, 10-30, or 10-20 nt in length, e.g., 10-80, 10-50, or 10-20 nt in length, e.g., about 10-20 nt in length. In some embodiments, the heterologous object sequence is 8-30, 9-25, 10-20, 11-16, or 12-15 nucleotides in length, e.g., is 11-16 nt in length. Without wishing to be bound by theory, in some embodiments, a larger insertion size, larger region of editing (e.g., the distance between a first edit/substitution and a second edit/substitution in the target region), and/or greater number of desired edits (e.g., mismatches of the heterologous object sequence to the target genome), may result in a longer optimal heterologous object sequence.

[0581] In certain embodiments, the template nucleic acid comprises a customized RNA sequence template which can be identified, designed, engineered and constructed to contain sequences altering or specifying host genome function, for example by introducing a heterologous coding region into a genome; affecting or causing exon structure/alternative splicing, e.g., leading to exon skipping of one or more exons; causing disruption of an endogenous gene, e.g., creating a genetic knockout; causing transcriptional activation of an endogenous gene; causing epigenetic regulation of an endogenous DNA; causing up-regulation of one or more operably linked genes, e.g., leading to gene activation or overexpression; causing down-regulation of one or more operably linked genes, e.g., creating a genetic knock-down; etc. In certain embodiments, a customized RNA sequence template can be engineered to contain sequences coding for exons and/or transgenes, provide binding sites for transcription factor activators, repressors, enhancers, etc., and combinations thereof. In some embodiments, a customized template can be engineered to encode a nucleic acid or peptide tag to be expressed in an endogenous RNA transcript or endogenous protein operably linked to the target site. In other embodiments, the coding sequence can be further customized with splice donor sites, splice acceptor sites, or poly-A tails.

[0582] The template nucleic acid (e.g., template RNA) of the system typically comprises an object sequence (e.g., a heterologous object sequence) for writing a desired sequence into a target DNA. The object sequence may be coding or non-coding. The template nucleic acid (e.g., template RNA) can be designed to result in insertions, mutations, or deletions at the target DNA locus. In some embodiments, the template nucleic acid (e.g., template RNA) may be designed to cause an insertion in the target DNA. For example, the template nucleic acid (e.g., template RNA) may contain a heterologous sequence, wherein the reverse transcription will result in insertion of the heterologous sequence into the target DNA. In other embodiments, the RNA template may be designed to introduce a deletion into the target DNA. For example, the template nucleic acid (e.g., template RNA) may match the target DNA upstream and downstream of the desired deletion, wherein the reverse transcription will result in the copying of the upstream and downstream sequences from the template nucleic acid (e.g., template RNA) without the intervening sequence, e.g., causing deletion of the intervening sequence. In other embodiments, the template nucleic acid (e.g., template RNA) may be designed to introduce an edit into the target DNA. For example, the template RNA may match the target DNA sequence with the exception of one or more nucleotides, wherein the reverse transcription will result in the copying of these edits into the target DNA, e.g., resulting in mutations, e.g., transition or transversion mutations.

[0583] In some embodiments, writing of an object sequence into a target site results in the substitution of nucleotides, e.g., where the full length of the object sequence corresponds to a matching length of the target site with one or more mismatched bases. In some embodiments, a heterologous object sequence may be designed such that a combination of sequence alterations may occur, e.g., a simultaneous addition and deletion, addition and substitution, or deletion and substitution.

[0584] In some embodiments, the heterologous object sequence may contain an open reading frame or a fragment of an open reading frame. In some embodiments the heterologous object sequence has a Kozak sequence. In some embodiments the heterologous object sequence has an internal ribosome entry site. In some embodiments the heterologous object sequence has a self-cleaving peptide such as a T2A or P2A site. In some embodiments the heterologous object sequence has a start codon. In some embodiments the template RNA has a splice acceptor site. In some embodiments the template RNA has a splice donor site. Exemplary splice acceptor and splice donor sites are described in WO2016044416, incorporated herein by reference in its entirety. Exemplary splice acceptor site sequences are known to those of skill in the art. In some embodiments the template RNA has a microRNA binding site downstream of the stop codon. In some embodiments the template RNA has a poly A tail downstream of the stop codon of an open reading frame. In some embodiments the template RNA comprises one or more exons. In some embodiments the template RNA comprises one or more introns. In some embodiments the template RNA comprises a eukaryotic transcriptional terminator. In some embodiments the template RNA comprises an enhanced translation element or a translation enhancing element. In some embodiments the RNA comprises the human T-cell leukemia virus (HTLV-1) R region. In some embodiments the RNA comprises a posttranscriptional regulatory element that enhances nuclear export, such as that of Hepatitis B Virus (HPRE) or Woodchuck Hepatitis Virus (WPRE).

[0585] In some embodiments, the heterologous object sequence may contain a non-coding sequence. For example, the template nucleic acid (e.g., template RNA) may comprise a regulatory element, e.g., a promoter or enhancer sequence or miRNA binding site. In some embodiments, integration of the object sequence at a target site will result in upregulation of an endogenous gene. In some embodiments, integration of the object sequence at a target site will result in downregulation of an endogenous gene. In some embodiments the template nucleic acid (e.g., template RNA) comprises a tissue specific promoter or enhancer, each of which may be unidirectional or bidirectional. In some embodiments the promoter is an RNA polymerase I promoter, RNA polymerase II promoter, or RNA polymerase III promoter. In some embodiments the promoter comprises a TATA element. In some embodiments the promoter comprises a B recognition element. In some embodiments the promoter has one or more binding sites for transcription factors.

[0586] In some embodiments, the template nucleic acid (e.g., template RNA) comprises a site that coordinates epigenetic modification. In some embodiments, the template nucleic acid (e.g., template RNA) comprises a chromatin insulator. For example, the template nucleic acid (e.g., template RNA) comprises a CTCF site or a site targeted for DNA methylation.

[0587] In some embodiments, the template nucleic acid (e.g., template RNA) comprises a gene expression unit composed of at least one regulatory region operably linked to an effector sequence. The effector sequence may be a sequence that is transcribed into RNA (e.g., a coding sequence or a non-coding sequence such as a sequence encoding a micro RNA).

[0588] In some embodiments, the heterologous object sequence of the template nucleic acid (e.g., template RNA) is inserted into a target genome in an endogenous intron. In some embodiments, the heterologous object sequence of the template nucleic acid (e.g., template RNA) is inserted into a target genome and thereby acts as a new exon. In some embodiments, the insertion of the heterologous object sequence into the target genome results in replacement of a natural exon or the skipping of a natural exon.

[0589] The template nucleic acid (e.g., template RNA) can be designed to result in insertions, mutations, or deletions at the target DNA locus. In some embodiments, the template nucleic acid (e.g., template RNA) may be designed to cause an insertion in the target DNA. For example, the template nucleic acid (e.g., template RNA) may contain a heterologous object sequence, wherein the reverse transcription will result in insertion of the heterologous object sequence into the target DNA. In other embodiments, the RNA template may be designed to write a deletion into the target DNA. For example, the template nucleic acid (e.g., template RNA) may match the target DNA upstream and downstream of the desired deletion, wherein the reverse transcription will result in the copying of the upstream and downstream sequences from the template nucleic acid (e.g., template RNA) without the intervening sequence, e.g., causing deletion of the intervening sequence. In other embodiments, the template nucleic acid (e.g., template RNA) may be designed to write an edit into the target DNA. For example, the template RNA may match the target DNA sequence with the exception of one or more nucleotides, wherein the reverse transcription will result in the copying of these edits into the target DNA, e.g., resulting in mutations, e.g., transition or transversion mutations.

[0590] In some embodiments, the pre-edit homology domain comprises a nucleic acid sequence having 100% sequence identity with a nucleic acid sequence comprised in a target nucleic acid molecule.

[0591] In some embodiments, the post-edit homology domain comprises a nucleic acid sequence having 100% sequence identity with a nucleic acid sequence comprised in a target nucleic acid molecule.

### PBS Sequence

[0592] In some embodiments, a template nucleic acid (e.g., template RNA) comprises a PBS sequence. In some embodiments, a PBS sequence is disposed 3′ of the heterologous object sequence and is complementary to a sequence adjacent to a site to be modified by a system described herein, or comprises no more than 1, 2, 3, 4, or 5 mismatches to a sequence complementary to the sequence adjacent to a site to be modified by the system/gene modifying polypeptide. In some embodiments, the PBS sequence binds within 1, 2, 3, 4, 5, 6, 7, 8, 9, or 10 nucleotides of a nick site in the target nucleic acid molecule. In some embodiments, binding of the PBS sequence to the target nucleic acid molecule permits initiation of target-primed reverse transcription (TPRT), e.g., with the 3′ homology domain acting as a primer for TPRT. In some embodiments, the PBS sequence is 3-5, 5-10, 10-30, 10-25, 10-20, 10-19, 10-18, 10-17, 10-16, 10-15, 10-14, 10-13, 10-12, 10-11, 11-30, 11-25, 11-20, 11-19, 11-18, 11-17, 11-16, 11-15, 11-14, 11-13, 11-12, 12-30, 12-25, 12-20, 12-19, 12-18, 12-17, 12-16, 12-15, 12-14, 12-13, 13-30, 13-25, 13-20, 13-19, 13-18, 13-17, 13-16, 13-15, 13-14, 14-30, 14-25, 14-20, 14-19, 14-18, 14-17, 14-16, 14-15, 15-30, 15-25, 15-20, 15-19, 15-18, 15-17, 15-16, 16-30, 16-25, 16-20, 16-19, 16-18, 16-17, 17-30, 17-25, 17-20, 17-19, 17-18, 18-30, 18-25, 18-20, 18-19, 19-30, 19-25, 19-20, 20-30, 20-25, or 25-30 nucleotides in length, e.g., 10-17, 12-16, or 12-14 nucleotides in length. In some embodiments, the PBS sequence is 5-20, 8-16, 8-14, 8-13, 9-13, 9-12, or 10-12 nucleotides in length, e.g., 9-12 nucleotides in length.

[0593] The template nucleic acid (e.g., template RNA) may have some homology to the target DNA. In some embodiments, the template nucleic acid (e.g., template RNA) PBS sequence domain may serve as an annealing region to the target DNA, such that the target DNA is positioned to prime the reverse transcription of the template nucleic acid (e.g., template RNA). In some embodiments the template nucleic acid (e.g., template RNA) has at least 2, 3, 4, 5, 6, 7, 8, 9, 10, 11, 12, 13, 14, 15, 20, 25, 30, 35, 40, 45, 50, 60, 70, 80, 90, 100, 110, 120, 130, 140, 150, 175, 200 or more bases of exact homology to the target DNA at the 3′ end of the RNA. In some embodiments the template nucleic acid (e.g., template RNA) has at least 2, 3, 4, 5, 6, 7, 8, 9, 10, 11, 12, 13, 14, 15, 20, 25, 30, 35, 40, 45, 50, 60, 70, 80, 90, 100, 110, 120, 130, 140, 150, 175, 200 or more bases of at least 50%, 60%, 70%, 80%, 85%, 90%, 95%, 97%, 98%, 99% or 100% homology to the target DNA, e.g., at the 5′ end of the template nucleic acid (e.g., template RNA).

### Exemplary Template Sequences

[0594] In some embodiments of the systems and methods herein, the template RNA comprises a gRNA spacer comprising the core nucleotides of a gRNA spacer sequence of Table 1. In some embodiments, the gRNA spacer additionally comprises one or more (e.g., 2, 3, or all) consecutive nucleotides starting with the 3′ end of the flanking nucleotides of the gRNA spacer. In some embodiments, the template RNA comprising a sequence of Table 1 is comprised by a system that further comprises a gene modifying polypeptide having an RT domain listed in the same line of Table 1. RT domain amino acid sequences can be found, e.g., in Table 6 herein.

TABLE 1
Exemplary gRNA spacer Cas pairs
Table 1 provides a gRNA database for correcting
the pathogenic EV6 mutation in HBB. List of spacers,
PAMs, and Cas variants for generating a nick at an
appropriate position to enable installation of a desired
genomic edit with a gene modifying system. The spacers
in this table are designed to be used with a gene
modifying polypeptide comprising a nickase variant of
the Cas species indicated in the table. Tables 2, 3,
and 4 detail the other components of the system and
are organized such that the ID number shown here in
Column 1 (“ID”) is meant to correspond to the same ID
number in the subsequent tables.

| | PAM | | SEQ | Cas | | Overlaps |
|---|---|---|---|---|---|---|
| ID | sequence | gRNA spacer | ID NO | species | distance | mutation |
| 1 | AGAAG | TGGTGCATCTGACTCCTGTGG | 16917 | SauCas9KKH | 0 | 0 |
| 2 | AGAAGT | TGGTGCATCTGACTCCTGTGG | 16918 | SauCas9KKH | 0 | 0 |
| 3 | AGAAGT | TGGTGCATCTGACTCCTGTGG | 16919 | cCas9-v17 | 0 | 0 |
| 4 | AGAAGT | TGGTGCATCTGACTCCTGTGG | 16920 | cCas9-v42 | 0 | 0 |
| 5 | AG | GGTGCATCTGACTCCTGTGG | 16921 | SpyCas9-NG | 0 | 0 |
| 6 | AG | GGTGCATCTGACTCCTGTGG | 16922 | SpyCas9- | 0 | 0 |
| | | | | xCas | | |
| 7 | AG | GGTGCATCTGACTCCTGTGG | 16923 | SpyCas9- | 0 | 0 |
| | | | | xCas-NG | | |
| 8 | AGA | GGTGCATCTGACTCCTGTGG | 16924 | SpyCas9- | 0 | 0 |
| | | | | SpG | | |
| 9 | AGA | GGTGCATCTGACTCCTGTGG | 16925 | SpyCas9- | 0 | 0 |
| | | | | SpRY | | |
| 10 | AGAAGTCT | ccatGGTGCATCTGACTCCTGTGG | 16926 | NmeCas9 | 0 | 0 |
| 11 | AGAA | GGTGCATCTGACTCCTGTGG | 16927 | SpyCas9- | 0 | 0 |
| | | | | 3var-NRRH | | |
| 12 | AGAA | GGTGCATCTGACTCCTGTGG | 16928 | SpyCas9- | 0 | 0 |
| | | | | VQR | | |
| 13 | GAGAA | ccATGGTGCATCTGACTCCTGTG | 16929 | SauCas9 | 1 | 0 |
| 14 | GAGAA | ATGGTGCATCTGACTCCTGTG | 16930 | SauCas9KKH | 1 | 0 |
| 15 | AGGAG | gcAGTAACGGCAGACTTCTCCAC | 16931 | SauCas9 | 1 | 0 |
| 16 | AGGAG | AGTAACGGCAGACTTCTCCAC | 16932 | SauCas9KKH | 1 | 0 |
| 17 | AGGAGT | gcAGTAACGGCAGACTTCTCCAC | 16933 | SauCas9 | 1 | 0 |
| 18 | AGGAGT | AGTAACGGCAGACTTCTCCAC | 16934 | SauCas9KKH | 1 | 0 |
| 19 | AGGAGT | AGTAACGGCAGACTTCTCCAC | 16935 | cCas9-v17 | 1 | 0 |
| 20 | AGGAGT | AGTAACGGCAGACTTCTCCAC | 16936 | cCas9-v42 | 1 | 0 |
| 21 | GAG | TGGTGCATCTGACTCCTGTG | 16937 | ScaCas9 | 1 | 0 |
| 22 | GAG | TGGTGCATCTGACTCCTGTG | 16938 | ScaCas9- | 1 | 0 |
| | | | | HiFi-Sc++ | | |
| 23 | GAG | TGGTGCATCTGACTCCTGTG | 16939 | ScaCas9- | 1 | 0 |
| | | | | Sc++ | | |
| 24 | GAG | TGGTGCATCTGACTCCTGTG | 16940 | SpyCas9- | 1 | 0 |
| | | | | SpRY | | |
| 25 | AGG | GTAACGGCAGACTTCTCCAC | 16941 | ScaCas9 | 1 | 0 |
| 26 | AGG | GTAACGGCAGACTTCTCCAC | 16942 | ScaCas9- | 1 | 0 |
| | | | | HiFi-Sc++ | | |
| 27 | AGG | GTAACGGCAGACTTCTCCAC | 16943 | ScaCas9- | 1 | 0 |
| | | | | Sc++ | | |
| 28 | AGG | GTAACGGCAGACTTCTCCAC | 16944 | SpyCas9 | 1 | 0 |
| 29 | AGG | GTAACGGCAGACTTCTCCAC | 16945 | SpyCas9- | 1 | 0 |
| | | | | HF1 | | |
| 30 | AGG | GTAACGGCAGACTTCTCCAC | 16946 | SpyCas9- | 1 | 0 |
| | | | | SpG | | |
| 31 | AGG | GTAACGGCAGACTTCTCCAC | 16947 | SpyCas9- | 1 | 0 |
| | | | | SpRY | | |
| 32 | AG | GTAACGGCAGACTTCTCCAC | 16948 | SpyCas9-NG | 1 | 0 |
| 33 | AG | GTAACGGCAGACTTCTCCAC | 16949 | SpyCas9- | 1 | 0 |
| | | | | xCas | | |
| 34 | AG | GTAACGGCAGACTTCTCCAC | 16950 | SpyCas9- | 1 | 0 |
| | | | | xCas-NG | | |
| 35 | GAGAAG | ATGGTGCATCTGACTCCTGTG | 16951 | cCas9-v17 | 1 | 0 |
| 36 | GAGAAG | ATGGTGCATCTGACTCCTGTG | 16952 | cCas9-v42 | 1 | 0 |
| 37 | GAGA | TGGTGCATCTGACTCCTGTG | 16953 | SpyCas9- | 1 | 0 |
| | | | | 3var-NRRH | | |
| 38 | AGGA | GTAACGGCAGACTTCTCCAC | 16954 | SpyCas9- | 1 | 0 |
| | | | | 3var-NRRH | | |
| 39 | CAGGA | ggCAGTAACGGCAGACTTCTCCA | 16955 | SauCas9 | 2 | 0 |
| 40 | CAGGA | CAGTAACGGCAGACTTCTCCA | 16956 | SauCas9KKH | 2 | 0 |
| 41 | GGAGA | CATGGTGCATCTGACTCCTGT | 16957 | SauCas9KKH | 2 | 0 |
| 42 | CAGG | CAGTAACGGCAGACTTCTCCA | 16958 | SauriCas9 | 2 | 0 |
| 43 | CAGG | CAGTAACGGCAGACTTCTCCA | 16959 | SauriCas9- | 2 | 0 |
| | | | | KKH | | |
| 44 | GGAG | CATGGTGCATCTGACTCCTGT | 16960 | SauriCas9- | 2 | 0 |
| | | | | KKH | | |
| 45 | GGAG | ATGGTGCATCTGACTCCTGT | 16961 | SpyCas9- | 2 | 0 |
| | | | | VQR | | |
| 46 | CAG | AGTAACGGCAGACTTCTCCA | 16962 | ScaCas9 | 2 | 0 |
| 47 | CAG | AGTAACGGCAGACTTCTCCA | 16963 | ScaCas9- | 2 | 0 |
| | | | | HiFi-Sc++ | | |
| 48 | CAG | AGTAACGGCAGACTTCTCCA | 16964 | ScaCas9- | 2 | 0 |
| | | | | Sc++ | | |
| 49 | CAG | AGTAACGGCAGACTTCTCCA | 16965 | SpyCas9- | 2 | 0 |
| | | | | SpRY | | |
| 50 | GG | ATGGTGCATCTGACTCCTGT | 16966 | SpyCas9-NG | 2 | 0 |
| 51 | GG | ATGGTGCATCTGACTCCTGT | 16967 | SpyCas9- | 2 | 0 |
| | | | | xCas | | |
| 52 | GG | ATGGTGCATCTGACTCCTGT | 16968 | SpyCas9- | 2 | 0 |
| | | | | xCas-NG | | |
| 53 | GGA | ATGGTGCATCTGACTCCTGT | 16969 | SpyCas9- | 2 | 0 |
| | | | | SpG | | |
| 54 | GGA | ATGGTGCATCTGACTCCTGT | 16970 | SpyCas9- | 2 | 0 |
| | | | | SpRY | | |
| 55 | GGAGAA | CATGGTGCATCTGACTCCTGT | 16971 | cCas9-v17 | 2 | 0 |
| 56 | GGAGAA | CATGGTGCATCTGACTCCTGT | 16972 | cCas9-v42 | 2 | 0 |
| 57 | CAGGAG | CAGTAACGGCAGACTTCTCCA | 16973 | cCas9-v17 | 2 | 0 |
| 58 | CAGGAG | CAGTAACGGCAGACTTCTCCA | 16974 | cCas9-v42 | 2 | 0 |
| 59 | tGGAG | caCCATGGTGCATCTGACTCCTG | 16975 | SauCas9 | 3 | 1 |
| 60 | tGGAG | CCATGGTGCATCTGACTCCTG | 16976 | SauCas9KKH | 3 | 1 |
| 61 | aCAGG | GCAGTAACGGCAGACTTCTCC | 16977 | SauCas9KKH | 3 | 1 |
| 62 | aCAG | GCAGTAACGGCAGACTTCTCC | 16978 | SauriCas9- | 3 | 1 |
| | | | | KKH | | |
| 63 | tGG | CATGGTGCATCTGACTCCTG | 16979 | ScaCas9 | 3 | 1 |
| 64 | tGG | CATGGTGCATCTGACTCCTG | 16980 | ScaCas9- | 3 | 1 |
| | | | | HiFi-Sc++ | | |
| 65 | tGG | CATGGTGCATCTGACTCCTG | 16981 | ScaCas9- | 3 | 1 |
| | | | | Sc++ | | |
| 66 | tGG | CATGGTGCATCTGACTCCTG | 16982 | SpyCas9 | 3 | 1 |
| 67 | tGG | CATGGTGCATCTGACTCCTG | 16983 | SpyCas9- | 3 | 1 |
| | | | | HF1 | | |
| 68 | tGG | CATGGTGCATCTGACTCCTG | 16984 | SpyCas9- | 3 | 1 |
| | | | | SpG | | |
| 69 | tGG | CATGGTGCATCTGACTCCTG | 16985 | SpyCas9- | 3 | 1 |
| | | | | SpRY | | |
| 70 | tG | CATGGTGCATCTGACTCCTG | 16986 | SpyCas9-NG | 3 | 1 |
| 71 | tG | CATGGTGCATCTGACTCCTG | 16987 | SpyCas9- | 3 | 1 |
| | | | | xCas | | |
| 72 | tG | CATGGTGCATCTGACTCCTG | 16988 | SpyCas9- | 3 | 1 |
| | | | | xCas-NG | | |
| 73 | aCA | CAGTAACGGCAGACTTCTCC | 16989 | SpyCas9- | 3 | 1 |
| | | | | SpRY | | |
| 74 | tGGAGA | CCATGGTGCATCTGACTCCTG | 16990 | cCas9-v17 | 3 | 1 |
| 75 | tGGAGA | CCATGGTGCATCTGACTCCTG | 16991 | cCas9-v42 | 3 | 1 |
| 76 | aCAGGA | GCAGTAACGGCAGACTTCTCC | 16992 | cCas9-v17 | 3 | 1 |
| 77 | aCAGGA | GCAGTAACGGCAGACTTCTCC | 16993 | cCas9-v42 | 3 | 1 |
| 78 | tGGA | CATGGTGCATCTGACTCCTG | 16994 | SpyCas9- | 3 | 1 |
| | | | | 3var-NRRH | | |
| 79 | GtGGA | acACCATGGTGCATCTGACTCCT | 16995 | SauCas9 | 4 | 1 |
| 80 | GtGGA | ACCATGGTGCATCTGACTCCT | 16996 | SauCas9KKH | 4 | 1 |
| 81 | CaCAG | GGCAGTAACGGCAGACTTCTC | 16997 | SauCas9KKH | 4 | 1 |
| 82 | GtGG | ACCATGGTGCATCTGACTCCT | 16998 | SauriCas9 | 4 | 1 |
| 83 | GtGG | ACCATGGTGCATCTGACTCCT | 16999 | SauriCas9- | 4 | 1 |
| | | | | KKH | | |
| 84 | GtG | CCATGGTGCATCTGACTCCT | 17000 | ScaCas9 | 4 | 1 |
| 85 | GtG | CCATGGTGCATCTGACTCCT | 17001 | ScaCas9- | 4 | 1 |
| | | | | HiFi-Sc++ | | |
| 86 | GtG | CCATGGTGCATCTGACTCCT | 17002 | ScaCas9- | 4 | 1 |
| | | | | Sc++ | | |
| 87 | GtG | CCATGGTGCATCTGACTCCT | 17003 | SpyCas9- | 4 | 1 |
| | | | | SpRY | | |
| 88 | CaC | GCAGTAACGGCAGACTTCTC | 17004 | SpyCas9- | 4 | 1 |
| | | | | SpRY | | |
| 89 | GtGGAG | ACCATGGTGCATCTGACTCCT | 17005 | cCas9-v17 | 4 | 1 |
| 90 | GtGGAG | ACCATGGTGCATCTGACTCCT | 17006 | cCas9-v42 | 4 | 1 |
| 91 | CaCAGG | GGCAGTAACGGCAGACTTCTC | 17007 | cCas9-v17 | 4 | 1 |
| 92 | CaCAGG | GGCAGTAACGGCAGACTTCTC | 17008 | cCas9-v42 | 4 | 1 |
| 93 | CaCA | GCAGTAACGGCAGACTTCTC | 17009 | SpyCas9- | 4 | 1 |
| | | | | 3var-NRCH | | |
| 94 | TGtGG | CACCATGGTGCATCTGACTCC | 17010 | SauCas9KKH | 5 | 1 |
| 95 | TG | ACCATGGTGCATCTGACTCC | 17011 | SpyCas9-NG | 5 | 0 |
| 96 | TG | ACCATGGTGCATCTGACTCC | 17012 | SpyCas9- | 5 | 0 |
| | | | | xCas | | |
| 97 | TG | ACCATGGTGCATCTGACTCC | 17013 | SpyCas9- | 5 | 0 |
| | | | | xCas-NG | | |
| 98 | TGt | ACCATGGTGCATCTGACTCC | 17014 | SpyCas9- | 5 | 1 |
| | | | | SpG | | |
| 99 | TGt | ACCATGGTGCATCTGACTCC | 17015 | SpyCas9- | 5 | 1 |
| | | | | SpRY | | |
| 100 | CCa | GGCAGTAACGGCAGACTTCT | 17016 | SpyCas9- | 5 | 1 |
| | | | | SpRY | | |
| 101 | CTG | CACCATGGTGCATCTGACTC | 17017 | ScaCas9 | 6 | 0 |
| 102 | CTG | CACCATGGTGCATCTGACTC | 17018 | ScaCas9- | 6 | 0 |
| | | | | HiFi-Sc++ | | |
| 103 | CTG | CACCATGGTGCATCTGACTC | 17019 | ScaCas9- | 6 | 0 |
| | | | | Sc++ | | |
| 104 | CTG | CACCATGGTGCATCTGACTC | 17020 | SpyCas9- | 6 | 0 |
| | | | | SpRY | | |
| 105 | TCC | GGGCAGTAACGGCAGACTTC | 17021 | SpyCas9- | 6 | 0 |
| | | | | SpRY | | |
| 106 | TCCaCAGG | acagGGCAGTAACGGCAGACTTC | 17022 | BlatCas9 | 6 | 1 |
| 107 | TCCaC | acagGGCAGTAACGGCAGACTTC | 17023 | BlatCas9 | 6 | 1 |
| 108 | CTC | AGGGCAGTAACGGCAGACTT | 17024 | SpyCas9- | 7 | 0 |
| | | | | SpRY | | |
| 109 | CCT | ACACCATGGTGCATCTGACT | 17025 | SpyCas9- | 7 | 0 |
| | | | | SpRY | | |
| 110 | TCT | CAGGGCAGTAACGGCAGACT | 17026 | SpyCas9- | 8 | 0 |
| | | | | SpRY | | |
| 111 | TCC | GACACCATGGTGCATCTGAC | 17027 | SpyCas9- | 8 | 0 |
| | | | | SpRY | | |
| 112 | TCTCC | ccacAGGGCAGTAACGGCAGACT | 17028 | BlatCas9 | 8 | 0 |
| 113 | TTCTCC | ccCCACAGGGCAGTAACGGCAG | 17029 | Nme2Cas9 | 9 | 0 |
| | | AC | | | | |
| 114 | TTC | ACAGGGCAGTAACGGCAGAC | 17030 | SpyCas9- | 9 | 0 |
| | | | | SpRY | | |
| 115 | CTC | AGACACCATGGTGCATCTGA | 17031 | SpyCas9- | 9 | 0 |
| | | | | SpRY | | |
| 116 | TTCTC | cccaCAGGGCAGTAACGGCAGAC | 17032 | BlatCas9 | 9 | 0 |
| 117 | CTT | CACAGGGCAGTAACGGCAGA | 17033 | SpyCas9- | 10 | 0 |
| | | | | SpRY | | |
| 118 | ACT | CAGACACCATGGTGCATCTG | 17034 | SpyCas9- | 10 | 0 |
| | | | | SpRY | | |
| 119 | ACTCCTGt | aaacAGACACCATGGTGCATCTG | 17035 | BlatCas9 | 10 | 1 |
| 120 | ACTCC | aaacAGACACCATGGTGCATCTG | 17036 | BlatCas9 | 10 | 0 |
| 121 | GACTCC | tcAAACAGACACCATGGTGCATCT | 17037 | Nme2Cas9 | 11 | 0 |
| 122 | GAC | ACAGACACCATGGTGCATCT | 17038 | SpyCas9- | 11 | 0 |
| | | | | SpRY | | |
| 123 | ACT | CCACAGGGCAGTAACGGCAG | 17039 | SpyCas9- | 11 | 0 |
| | | | | SpRY | | |
| 124 | GACTCCTG | caaaCAGACACCATGGTGCATCT | 17040 | BlatCas9 | 11 | 0 |
| 125 | ACTTC | gcccCACAGGGCAGTAACGGCAG | 17041 | BlatCas9 | 11 | 0 |
| 126 | GACTC | caaaCAGACACCATGGTGCATCT | 17042 | BlatCas9 | 11 | 0 |
| 127 | GACT | ACAGACACCATGGTGCATCT | 17043 | SpyCas9- | 11 | 0 |
| | | | | 3var-NRCH | | |
| 128 | TG | AACAGACACCATGGTGCATC | 17044 | SpyCas9-NG | 12 | 0 |
| 129 | TG | AACAGACACCATGGTGCATC | 17045 | SpyCas9- | 12 | 0 |
| | | | | xCas | | |
| 130 | TG | AACAGACACCATGGTGCATC | 17046 | SpyCas9- | 12 | 0 |
| | | | | xCas-NG | | |
| 131 | GAC | CCCACAGGGCAGTAACGGCA | 17047 | SpyCas9- | 12 | 0 |
| | | | | SpRY | | |
| 132 | TGA | AACAGACACCATGGTGCATC | 17048 | SpyCas9- | 12 | 0 |
| | | | | SpG | | |
| 133 | TGA | AACAGACACCATGGTGCATC | 17049 | SpyCas9- | 12 | 0 |
| | | | | SpRY | | |
| 134 | TGACTCC | CAAACAGACACCATGGTGCATC | 17050 | CdiCas9 | 12 | 0 |
| 135 | TGAC | AACAGACACCATGGTGCATC | 17051 | SpyCas9- | 12 | 0 |
| | | | | 3var-NRRH | | |
| 136 | TGAC | AACAGACACCATGGTGCATC | 17052 | SpyCas9- | 12 | 0 |
| | | | | VQR | | |
| 137 | GACT | CCCACAGGGCAGTAACGGCA | 17053 | SpyCas9- | 12 | 0 |
| | | | | 3var-NRCH | | |
| 138 | CTG | AAACAGACACCATGGTGCAT | 17054 | ScaCas9 | 13 | 0 |
| 139 | CTG | AAACAGACACCATGGTGCAT | 17055 | ScaCas9- | 13 | 0 |
| | | | | HiFi-Sc++ | | |
| 140 | CTG | AAACAGACACCATGGTGCAT | 17056 | ScaCas9- | 13 | 0 |
| | | | | Sc++ | | |
| 141 | CTG | AAACAGACACCATGGTGCAT | 17057 | SpyCas9- | 13 | 0 |
| | | | | SpRY | | |
| 142 | AG | CCCCACAGGGCAGTAACGGC | 17058 | SpyCas9-NG | 13 | 0 |
| 143 | AG | CCCCACAGGGCAGTAACGGC | 17059 | SpyCas9- | 13 | 0 |
| | | | | xCas | | |
| 144 | AG | CCCCACAGGGCAGTAACGGC | 17060 | SpyCas9- | 13 | 0 |
| | | | | xCas-NG | | |
| 145 | AGA | CCCCACAGGGCAGTAACGGC | 17061 | SpyCas9- | 13 | 0 |
| | | | | SpG | | |
| 146 | AGA | CCCCACAGGGCAGTAACGGC | 17062 | SpyCas9- | 13 | 0 |
| | | | | SpRY | | |
| 147 | CTGAC | ctcaAACAGACACCATGGTGCAT | 17063 | BlatCas9 | 13 | 0 |
| 148 | CTGACT | CAAACAGACACCATGGTGCAT | 17064 | cCas9-v16 | 13 | 0 |
| 149 | CTGACT | CAAACAGACACCATGGTGCAT | 17065 | cCas9-v21 | 13 | 0 |
| 150 | AGACTTC | TGCCCCACAGGGCAGTAACGGC | 17066 | CdiCas9 | 13 | 0 |
| 151 | CTGACTC | TCAAACAGACACCATGGTGCAT | 17067 | CdiCas9 | 13 | 0 |
| 152 | AGAC | CCCCACAGGGCAGTAACGGC | 17068 | SpyCas9- | 13 | 0 |
| | | | | 3var-NRRH | | |
| 153 | AGAC | CCCCACAGGGCAGTAACGGC | 17069 | SpyCas9- | 13 | 0 |
| | | | | VQR | | |
| 154 | TCTGA | TCAAACAGACACCATGGTGCA | 17070 | SauCas9KKH | 14 | 0 |
| 155 | CAG | GCCCCACAGGGCAGTAACGG | 17071 | ScaCas9 | 14 | 0 |
| 156 | CAG | GCCCCACAGGGCAGTAACGG | 17072 | ScaCas9- | 14 | 0 |
| | | | | HiFi-Sc++ | | |
| 157 | CAG | GCCCCACAGGGCAGTAACGG | 17073 | ScaCas9- | 14 | 0 |
| | | | | Sc++ | | |
| 158 | CAG | GCCCCACAGGGCAGTAACGG | 17074 | SpyCas9- | 14 | 0 |
| | | | | SpRY | | |
| 159 | TCT | CAAACAGACACCATGGTGCA | 17075 | SpyCas9- | 14 | 0 |
| | | | | SpRY | | |
| 160 | CAGAC | cttgCCCCACAGGGCAGTAACGG | 17076 | BlatCas9 | 14 | 0 |
| 161 | CAGACT | TGCCCCACAGGGCAGTAACGG | 17077 | cCas9-v16 | 14 | 0 |
| 162 | CAGACT | TGCCCCACAGGGCAGTAACGG | 17078 | cCas9-v21 | 14 | 0 |
| 163 | CAGACTT | TTGCCCCACAGGGCAGTAACGG | 17079 | CdiCas9 | 14 | 0 |
| 164 | CAGA | GCCCCACAGGGCAGTAACGG | 17080 | SpyCas9- | 14 | 0 |
| | | | | 3var-NRRH | | |
| 165 | GCAGA | TTGCCCCACAGGGCAGTAACG | 17081 | SauCas9KKH | 15 | 0 |
| 166 | GCAG | TTGCCCCACAGGGCAGTAACG | 17082 | SauriCas9- | 15 | 0 |
| | | | | KKH | | |
| 167 | GCA | TGCCCCACAGGGCAGTAACG | 17083 | SpyCas9- | 15 | 0 |
| | | | | SpRY | | |
| 168 | ATC | TCAAACAGACACCATGGTGC | 17084 | SpyCas9- | 15 | 0 |
| | | | | SpRY | | |
| 169 | GCAGAC | TTGCCCCACAGGGCAGTAACG | 17085 | cCas9-v17 | 15 | 0 |
| 170 | GCAGAC | TTGCCCCACAGGGCAGTAACG | 17086 | cCas9-v42 | 15 | 0 |
| 171 | ATCTGACT | aaccTCAAACAGACACCATGGTGC | 17087 | NmeCas9 | 15 | 0 |
| 172 | GGCAG | CTTGCCCCACAGGGCAGTAAC | 17088 | SauCas9KKH | 16 | 0 |
| 173 | GG | TTGCCCCACAGGGCAGTAAC | 17089 | SpyCas9-NG | 16 | 0 |
| 174 | GG | TTGCCCCACAGGGCAGTAAC | 17090 | SpyCas9- | 16 | 0 |
| | | | | xCas | | |
| 175 | GG | TTGCCCCACAGGGCAGTAAC | 17091 | SpyCas9- | 16 | 0 |
| | | | | xCas-NG | | |
| 176 | GGC | TTGCCCCACAGGGCAGTAAC | 17092 | SpyCas9- | 16 | 0 |
| | | | | SpG | | |
| 177 | GGC | TTGCCCCACAGGGCAGTAAC | 17093 | SpyCas9- | 16 | 0 |
| | | | | SpRY | | |
| 178 | CAT | CTCAAACAGACACCATGGTG | 17094 | SpyCas9- | 16 | 0 |
| | | | | SpRY | | |
| 179 | GGCAGA | CTTGCCCCACAGGGCAGTAAC | 17095 | cCas9-v17 | 16 | 0 |
| 180 | GGCAGA | CTTGCCCCACAGGGCAGTAAC | 17096 | cCas9-v42 | 16 | 0 |
| 181 | GGCAGACT | caccTTGCCCCACAGGGCAGTAAC | 17097 | NmeCas9 | 16 | 0 |
| 182 | CATC | CTCAAACAGACACCATGGTG | 17098 | SpyCas9- | 16 | 0 |
| | | | | 3var-NRTH | | |
| 183 | GGCA | TTGCCCCACAGGGCAGTAAC | 17099 | SpyCas9- | 16 | 0 |
| | | | | 3var-NRCH | | |
| 184 | CGG | CTTGCCCCACAGGGCAGTAA | 17100 | ScaCas9 | 17 | 0 |
| 185 | CGG | CTTGCCCCACAGGGCAGTAA | 17101 | ScaCas9- | 17 | 0 |
| | | | | HiFi-Sc++ | | |
| 186 | CGG | CTTGCCCCACAGGGCAGTAA | 17102 | ScaCas9- | 17 | 0 |
| | | | | Sc++ | | |
| 187 | CGG | CTTGCCCCACAGGGCAGTAA | 17103 | SpyCas9 | 17 | 0 |
| 188 | CGG | CTTGCCCCACAGGGCAGTAA | 17104 | SpyCas9- | 17 | 0 |
| | | | | HF1 | | |
| 189 | CGG | CTTGCCCCACAGGGCAGTAA | 17105 | SpyCas9- | 17 | 0 |
| | | | | SpG | | |
| 190 | CGG | CTTGCCCCACAGGGCAGTAA | 17106 | SpyCas9- | 17 | 0 |
| | | | | SpRY | | |
| 191 | CG | CTTGCCCCACAGGGCAGTAA | 17107 | SpyCas9-NG | 17 | 0 |
| 192 | CG | CTTGCCCCACAGGGCAGTAA | 17108 | SpyCas9- | 17 | 0 |
| | | | | xCas | | |
| 193 | CG | CTTGCCCCACAGGGCAGTAA | 17109 | SpyCas9- | 17 | 0 |
| | | | | xCas-NG | | |
| 194 | GCA | CCTCAAACAGACACCATGGT | 17110 | SpyCas9- | 17 | 0 |
| | | | | SpRY | | |
| 195 | GCATCTGA | caacCTCAAACAGACACCATGGT | 17111 | BlatCas9 | 17 | 0 |
| 196 | GCATC | caacCTCAAACAGACACCATGGT | 17112 | BlatCas9 | 17 | 0 |
| 197 | CGGC | CTTGCCCCACAGGGCAGTAA | 17113 | SpyCas9- | 17 | 0 |
| | | | | 3var-NRRH | | |
| 198 | ACGG | ACCTTGCCCCACAGGGCAGTA | 17114 | SauriCas9 | 18 | 0 |
| 199 | ACGG | ACCTTGCCCCACAGGGCAGTA | 17115 | SauriCas9- | 18 | 0 |
| | | | | KKH | | |
| 200 | ACG | CCTTGCCCCACAGGGCAGTA | 17116 | ScaCas9 | 18 | 0 |
| 201 | ACG | CCTTGCCCCACAGGGCAGTA | 17117 | ScaCas9- | 18 | 0 |
| | | | | HiFi-Sc++ | | |
| 202 | ACG | CCTTGCCCCACAGGGCAGTA | 17118 | ScaCas9- | 18 | 0 |
| | | | | Sc++ | | |
| 203 | ACG | CCTTGCCCCACAGGGCAGTA | 17119 | SpyCas9- | 18 | 0 |
| | | | | SpRY | | |
| 204 | TG | ACCTCAAACAGACACCATGG | 17120 | SpyCas9-NG | 18 | 0 |
| 205 | TG | ACCTCAAACAGACACCATGG | 17121 | SpyCas9- | 18 | 0 |
| | | | | xCas | | |
| 206 | TG | ACCTCAAACAGACACCATGG | 17122 | SpyCas9- | 18 | 0 |
| | | | | xCas-NG | | |
| 207 | TGC | ACCTCAAACAGACACCATGG | 17123 | SpyCas9- | 18 | 0 |
| | | | | SpG | | |
| 208 | TGC | ACCTCAAACAGACACCATGG | 17124 | SpyCas9- | 18 | 0 |
| | | | | SpRY | | |
| 209 | ACGGCAGA | tcacCTTGCCCCACAGGGCAGTA | 17125 | BlatCas9 | 18 | 0 |
| 210 | ACGGC | tcacCTTGCCCCACAGGGCAGTA | 17126 | BlatCas9 | 18 | 0 |
| 211 | TGCA | ACCTCAAACAGACACCATGG | 17127 | SpyCas9- | 18 | 0 |
| | | | | 3var-NRCH | | |
| 212 | AACGG | CACCTTGCCCCACAGGGCAGT | 17128 | SauCas9KKH | 19 | 0 |
| 213 | GTG | AACCTCAAACAGACACCATG | 17129 | ScaCas9 | 19 | 0 |
| 214 | GTG | AACCTCAAACAGACACCATG | 17130 | ScaCas9- | 19 | 0 |
| | | | | HiFi-Sc++ | | |
| 215 | GTG | AACCTCAAACAGACACCATG | 17131 | ScaCas9- | 19 | 0 |
| | | | | Sc++ | | |
| 216 | GTG | AACCTCAAACAGACACCATG | 17132 | SpyCas9- | 19 | 0 |
| | | | | SpRY | | |
| 217 | AAC | ACCTTGCCCCACAGGGCAGT | 17133 | SpyCas9- | 19 | 0 |
| | | | | SpRY | | |
| 218 | AACGGC | CACCTTGCCCCACAGGGCAGT | 17134 | cCas9-v17 | 19 | 0 |
| 219 | AACGGC | CACCTTGCCCCACAGGGCAGT | 17135 | cCas9-v42 | 19 | 0 |
| 220 | GTGCATC | GCAACCTCAAACAGACACCATG | 17136 | CdiCas9 | 19 | 0 |
| 221 | GG | CAACCTCAAACAGACACCAT | 17137 | SpyCas9-NG | 20 | 0 |
| 222 | GG | CAACCTCAAACAGACACCAT | 17138 | SpyCas9- | 20 | 0 |
| | | | | xCas | | |
| 223 | GG | CAACCTCAAACAGACACCAT | 17139 | SpyCas9- | 20 | 0 |
| | | | | xCas-NG | | |
| 224 | TAA | CACCTTGCCCCACAGGGCAG | 17140 | SpyCas9- | 20 | 0 |
| | | | | SpRY | | |
| 225 | GGT | CAACCTCAAACAGACACCAT | 17141 | SpyCas9- | 20 | 0 |
| | | | | SpG | | |
| 226 | GGT | CAACCTCAAACAGACACCAT | 17142 | SpyCas9- | 20 | 0 |
| | | | | SpRY | | |
| 227 | GGTGC | tagcAACCTCAAACAGACACCAT | 17143 | BlatCas9 | 20 | 0 |
| 228 | TAAC | CACCTTGCCCCACAGGGCAG | 17144 | SpyCas9- | 20 | 0 |
| | | | | 3var-NRRH | | |
| 229 | TAAC | tcACCTTGCCCCACAGGGCAG | 17145 | iSpyMacCas9 | 20 | 0 |
| 230 | TGG | GCAACCTCAAACAGACACCA | 17146 | ScaCas9 | 21 | 0 |
| 231 | TGG | GCAACCTCAAACAGACACCA | 17147 | ScaCas9- | 21 | 0 |
| | | | | HiFi-Sc++ | | |
| 232 | TGG | GCAACCTCAAACAGACACCA | 17148 | ScaCas9- | 21 | 0 |
| | | | | Sc++ | | |
| 233 | TGG | GCAACCTCAAACAGACACCA | 17149 | SpyCas9 | 21 | 0 |
| 234 | TGG | GCAACCTCAAACAGACACCA | 17150 | SpyCas9- | 21 | 0 |
| | | | | HF1 | | |
| 235 | TGG | GCAACCTCAAACAGACACCA | 17151 | SpyCas9- | 21 | 0 |
| | | | | SpG | | |
| 236 | TGG | GCAACCTCAAACAGACACCA | 17152 | SpyCas9- | 21 | 0 |
| | | | | SpRY | | |
| 237 | TG | GCAACCTCAAACAGACACCA | 17153 | SpyCas9-NG | 21 | 0 |
| 238 | TG | GCAACCTCAAACAGACACCA | 17154 | SpyCas9- | 21 | 0 |
| | | | | xCas | | |
| 239 | TG | GCAACCTCAAACAGACACCA | 17155 | SpyCas9- | 21 | 0 |
| | | | | xCas-NG | | |
| 240 | GTA | TCACCTTGCCCCACAGGGCA | 17156 | SpyCas9- | 21 | 0 |
| | | | | SpRY | | |
| 241 | GTAAC | cgttCACCTTGCCCCACAGGGCA | 17157 | BlatCas9 | 21 | 0 |
| 242 | TGGT | GCAACCTCAAACAGACACCA | 17158 | SpyCas9- | 21 | 0 |
| | | | | 3var-NRRH | | |
| 243 | AGTAA | GTTCACCTTGCCCCACAGGGC | 17159 | SauCas9KKH | 22 | 0 |
| 244 | ATGG | TAGCAACCTCAAACAGACACC | 17160 | SauriCas9 | 22 | 0 |
| 245 | ATGG | TAGCAACCTCAAACAGACACC | 17161 | SauriCas9- | 22 | 0 |
| | | | | KKH | | |
| 246 | ATG | AGCAACCTCAAACAGACACC | 17162 | ScaCas9 | 22 | 0 |
| 247 | ATG | AGCAACCTCAAACAGACACC | 17163 | ScaCas9- | 22 | 0 |
| | | | | HiFi-Sc++ | | |
| 248 | ATG | AGCAACCTCAAACAGACACC | 17164 | ScaCas9- | 22 | 0 |
| | | | | Sc++ | | |
| 249 | ATG | AGCAACCTCAAACAGACACC | 17165 | SpyCas9- | 22 | 0 |
| | | | | SpRY | | |
| 250 | AG | TTCACCTTGCCCCACAGGGC | 17166 | SpyCas9-NG | 22 | 0 |
| 251 | AG | TTCACCTTGCCCCACAGGGC | 17167 | SpyCas9- | 22 | 0 |
| | | | | xCas | | |
| 252 | AG | TTCACCTTGCCCCACAGGGC | 17168 | SpyCas9- | 22 | 0 |
| | | | | xCas-NG | | |
| 253 | AGT | TTCACCTTGCCCCACAGGGC | 17169 | SpyCas9- | 22 | 0 |
| | | | | SpG | | |
| 254 | AGT | TTCACCTTGCCCCACAGGGC | 17170 | SpyCas9- | 22 | 0 |
| | | | | SpRY | | |
| 255 | ATGGTG | TAGCAACCTCAAACAGACACC | 17171 | cCas9-v16 | 22 | 0 |
| 256 | ATGGTG | TAGCAACCTCAAACAGACACC | 17172 | cCas9-v21 | 22 | 0 |
| 257 | AGTA | TTCACCTTGCCCCACAGGGC | 17173 | SpyCas9- | 22 | 0 |
| | | | | 3var-NRTH | | |
| 258 | CATGG | CTAGCAACCTCAAACAGACAC | 17174 | SauCas9KKH | 23 | 0 |
| 259 | CATGGT | CTAGCAACCTCAAACAGACAC | 17175 | SauCas9KKH | 23 | 0 |
| 260 | CAG | GTTCACCTTGCCCCACAGGG | 17176 | ScaCas9 | 23 | 0 |
| 261 | CAG | GTTCACCTTGCCCCACAGGG | 17177 | ScaCas9- | 23 | 0 |
| | | | | HiFi-Sc++ | | |
| 262 | CAG | GTTCACCTTGCCCCACAGGG | 17178 | ScaCas9- | 23 | 0 |
| | | | | Sc++ | | |
| 263 | CAG | GTTCACCTTGCCCCACAGGG | 17179 | SpyCas9- | 23 | 0 |
| | | | | SpRY | | |
| 264 | CAT | TAGCAACCTCAAACAGACAC | 17180 | SpyCas9- | 23 | 0 |
| | | | | SpRY | | |
| 265 | CAGTAAC | ACGTTCACCTTGCCCCACAGGG | 17181 | CdiCas9 | 23 | 0 |
| 266 | CAGT | GTTCACCTTGCCCCACAGGG | 17182 | SpyCas9- | 23 | 0 |
| | | | | 3var-NRRH | | |
| 267 | GCAG | ACGTTCACCTTGCCCCACAGG | 17183 | SauriCas9- | 24 | 0 |
| | | | | KKH | | |
| 268 | GCA | CGTTCACCTTGCCCCACAGG | 17184 | SpyCas9- | 24 | 0 |
| | | | | SpRY | | |
| 269 | CCA | CTAGCAACCTCAAACAGACA | 17185 | SpyCas9- | 24 | 0 |
| | | | | SpRY | | |
| 270 | GGCAG | CACGTTCACCTTGCCCCACAG | 17186 | SauCas9KKH | 25 | 0 |
| 271 | GGCAGT | CACGTTCACCTTGCCCCACAG | 17187 | SauCas9KKH | 25 | 0 |
| 272 | GGCAGT | CACGTTCACCTTGCCCCACAG | 17188 | cCas9-v17 | 25 | 0 |
| 273 | GGCAGT | CACGTTCACCTTGCCCCACAG | 17189 | cCas9-v42 | 25 | 0 |
| 274 | GG | ACGTTCACCTTGCCCCACAG | 17190 | SpyCas9-NG | 25 | 0 |
| 275 | GG | ACGTTCACCTTGCCCCACAG | 17191 | SpyCas9- | 25 | 0 |
| | | | | xCas | | |
| 276 | GG | ACGTTCACCTTGCCCCACAG | 17192 | SpyCas9- | 25 | 0 |
| | | | | xCas-NG | | |
| 277 | GGC | ACGTTCACCTTGCCCCACAG | 17193 | SpyCas9- | 25 | 0 |
| | | | | SpG | | |
| 278 | GGC | ACGTTCACCTTGCCCCACAG | 17194 | SpyCas9- | 25 | 0 |
| | | | | SpRY | | |
| 279 | ACC | ACTAGCAACCTCAAACAGAC | 17195 | SpyCas9- | 25 | 0 |
| | | | | SpRY | | |
| 280 | GGCA | ACGTTCACCTTGCCCCACAG | 17196 | SpyCas9- | 25 | 0 |
| | | | | 3var-NRCH | | |
| 281 | GGG | CACGTTCACCTTGCCCCACA | 17197 | ScaCas9 | 26 | 0 |
| 282 | GGG | CACGTTCACCTTGCCCCACA | 17198 | ScaCas9- | 26 | 0 |
| | | | | HiFi-Sc++ | | |
| 283 | GGG | CACGTTCACCTTGCCCCACA | 17199 | ScaCas9- | 26 | 0 |
| | | | | Sc++ | | |
| 284 | GGG | CACGTTCACCTTGCCCCACA | 17200 | SpyCas9 | 26 | 0 |
| 285 | GGG | CACGTTCACCTTGCCCCACA | 17201 | SpyCas9- | 26 | 0 |
| | | | | HF1 | | |
| 286 | GGG | CACGTTCACCTTGCCCCACA | 17202 | SpyCas9- | 26 | 0 |
| | | | | SpG | | |
| 287 | GGG | CACGTTCACCTTGCCCCACA | 17203 | SpyCas9- | 26 | 0 |
| | | | | SpRY | | |
| 288 | GG | CACGTTCACCTTGCCCCACA | 17204 | SpyCas9-NG | 26 | 0 |
| 289 | GG | CACGTTCACCTTGCCCCACA | 17205 | SpyCas9- | 26 | 0 |
| | | | | xCas | | |
| 290 | GG | CACGTTCACCTTGCCCCACA | 17206 | SpyCas9- | 26 | 0 |
| | | | | xCas-NG | | |
| 291 | CAC | CACTAGCAACCTCAAACAGA | 17207 | SpyCas9- | 26 | 0 |
| | | | | SpRY | | |
| 292 | GGGC | CACGTTCACCTTGCCCCACA | 17208 | SpyCas9- | 26 | 0 |
| | | | | 3var-NRRH | | |
| 293 | CACC | CACTAGCAACCTCAAACAGA | 17209 | SpyCas9- | 26 | 0 |
| | | | | 3var-NRCH | | |
| 294 | AGGG | TCCACGTTCACCTTGCCCCAC | 17210 | SauriCas9 | 27 | 0 |
| 295 | AGGG | TCCACGTTCACCTTGCCCCAC | 17211 | SauriCas9- | 27 | 0 |
| | | | | KKH | | |
| 296 | AGG | CCACGTTCACCTTGCCCCAC | 17212 | ScaCas9 | 27 | 0 |
| 297 | AGG | CCACGTTCACCTTGCCCCAC | 17213 | ScaCas9- | 27 | 0 |
| | | | | HiFi-Sc++ | | |
| 298 | AGG | CCACGTTCACCTTGCCCCAC | 17214 | ScaCas9- | 27 | 0 |
| | | | | Sc++ | | |
| 299 | AGG | CCACGTTCACCTTGCCCCAC | 17215 | SpyCas9 | 27 | 0 |
| 300 | AGG | CCACGTTCACCTTGCCCCAC | 17216 | SpyCas9- | 27 | 0 |
| | | | | HF1 | | |
| 301 | AGG | CCACGTTCACCTTGCCCCAC | 17217 | SpyCas9- | 27 | 0 |
| | | | | SpG | | |
| 302 | AGG | CCACGTTCACCTTGCCCCAC | 17218 | SpyCas9- | 27 | 0 |
| | | | | SpRY | | |
| 303 | AG | CCACGTTCACCTTGCCCCAC | 17219 | SpyCas9-NG | 27 | 0 |
| 304 | AG | CCACGTTCACCTTGCCCCAC | 17220 | SpyCas9- | 27 | 0 |
| | | | | xCas | | |
| 305 | AG | CCACGTTCACCTTGCCCCAC | 17221 | SpyCas9- | 27 | 0 |
| | | | | xCas-NG | | |
| 306 | ACA | TCACTAGCAACCTCAAACAG | 17222 | SpyCas9- | 27 | 0 |
| | | | | SpRY | | |
| 307 | AGGGCAGT | catcCACGTTCACCTTGCCCCAC | 17223 | BlatCas9 | 27 | 0 |
| 308 | ACACCATG | tgttCACTAGCAACCTCAAACAG | 17224 | BlatCas9 | 27 | 0 |
| 309 | AGGGC | catcCACGTTCACCTTGCCCCAC | 17225 | BlatCas9 | 27 | 0 |
| 310 | ACACC | tgttCACTAGCAACCTCAAACAG | 17226 | BlatCas9 | 27 | 0 |
| 311 | ACACCAT | GTTCACTAGCAACCTCAAACAG | 17227 | CdiCas9 | 27 | 0 |
| 312 | GACACC | tgTGTTCACTAGCAACCTCAAACA | 17228 | Nme2Cas9 | 28 | 0 |
| 313 | CAGGG | tcATCCACGTTCACCTTGCCCCA | 17229 | SauCas9 | 28 | 0 |
| 314 | CAGGG | ATCCACGTTCACCTTGCCCCA | 17230 | SauCas9KKH | 28 | 0 |
| 315 | CAGG | ATCCACGTTCACCTTGCCCCA | 17231 | SauriCas9 | 28 | 0 |
| 316 | CAGG | ATCCACGTTCACCTTGCCCCA | 17232 | SauriCas9- | 28 | 0 |
| | | | | KKH | | |
| 317 | CAG | TCCACGTTCACCTTGCCCCA | 17233 | ScaCas9 | 28 | 0 |
| 318 | CAG | TCCACGTTCACCTTGCCCCA | 17234 | ScaCas9- | 28 | 0 |
| | | | | HiFi-Sc++ | | |
| 319 | CAG | TCCACGTTCACCTTGCCCCA | 17235 | ScaCas9- | 28 | 0 |
| | | | | Sc++ | | |
| 320 | CAG | TCCACGTTCACCTTGCCCCA | 17236 | SpyCas9- | 28 | 0 |
| | | | | SpRY | | |
| 321 | GAC | TTCACTAGCAACCTCAAACA | 17237 | SpyCas9- | 28 | 0 |
| | | | | SpRY | | |
| 322 | GACACCAT | gtgtTCACTAGCAACCTCAAACA | 17238 | BlatCas9 | 28 | 0 |
| 323 | GACAC | gtgtTCACTAGCAACCTCAAACA | 17239 | BlatCas9 | 28 | 0 |
| 324 | CAGGGC | ATCCACGTTCACCTTGCCCCA | 17240 | cCas9-v17 | 28 | 0 |
| 325 | CAGGGC | ATCCACGTTCACCTTGCCCCA | 17241 | cCas9-v42 | 28 | 0 |
| 326 | GACA | TTCACTAGCAACCTCAAACA | 17242 | SpyCas9- | 28 | 0 |
| | | | | 3var-NRCH | | |
| 327 | ACAGG | CATCCACGTTCACCTTGCCCC | 17243 | SauCas9KKH | 29 | 0 |
| 328 | ACAG | CATCCACGTTCACCTTGCCCC | 17244 | SauriCas9- | 29 | 0 |
| | | | | KKH | | |
| 329 | AG | GTTCACTAGCAACCTCAAAC | 17245 | SpyCas9-NG | 29 | 0 |
| 330 | AG | GTTCACTAGCAACCTCAAAC | 17246 | SpyCas9- | 29 | 0 |
| | | | | xCas | | |
| 331 | AG | GTTCACTAGCAACCTCAAAC | 17247 | SpyCas9- | 29 | 0 |
| | | | | xCas-NG | | |
| 332 | AGA | GTTCACTAGCAACCTCAAAC | 17248 | SpyCas9- | 29 | 0 |
| | | | | SpG | | |
| 333 | AGA | GTTCACTAGCAACCTCAAAC | 17249 | SpyCas9- | 29 | 0 |
| | | | | SpRY | | |
| 334 | ACA | ATCCACGTTCACCTTGCCCC | 17250 | SpyCas9- | 29 | 0 |
| | | | | SpRY | | |
| 335 | ACAGGG | CATCCACGTTCACCTTGCCCC | 17251 | cCas9-v17 | 29 | 0 |
| 336 | ACAGGG | CATCCACGTTCACCTTGCCCC | 17252 | cCas9-v42 | 29 | 0 |
| 337 | AGACACC | GTGTTCACTAGCAACCTCAAAC | 17253 | CdiCas9 | 29 | 0 |
| 338 | AGAC | GTTCACTAGCAACCTCAAAC | 17254 | SpyCas9- | 29 | 0 |
| | | | | 3var-NRRH | | |
| 339 | AGAC | GTTCACTAGCAACCTCAAAC | 17255 | SpyCas9- | 29 | 0 |
| | | | | VQR | | |
| 340 | CACAG | TCATCCACGTTCACCTTGCCC | 17256 | SauCas9KKH | 30 | 0 |
| 341 | CAG | TGTTCACTAGCAACCTCAAA | 17257 | ScaCas9 | 30 | 0 |
| 342 | CAG | TGTTCACTAGCAACCTCAAA | 17258 | ScaCas9- | 30 | 0 |
| | | | | HiFi-Sc++ | | |
| 343 | CAG | TGTTCACTAGCAACCTCAAA | 17259 | ScaCas9- | 30 | 0 |
| | | | | Sc++ | | |
| 344 | CAG | TGTTCACTAGCAACCTCAAA | 17260 | SpyCas9- | 30 | 0 |
| | | | | SpRY | | |
| 345 | CAC | CATCCACGTTCACCTTGCCC | 17261 | SpyCas9- | 30 | 0 |
| | | | | SpRY | | |
| 346 | CAGAC | ctgtGTTCACTAGCAACCTCAAA | 17262 | BlatCas9 | 30 | 0 |
| 347 | CACAGG | TCATCCACGTTCACCTTGCCC | 17263 | cCas9-v17 | 30 | 0 |
| 348 | CACAGG | TCATCCACGTTCACCTTGCCC | 17264 | cCas9-v42 | 30 | 0 |
| 349 | CAGACAC | TGTGTTCACTAGCAACCTCAAA | 17265 | CdiCas9 | 30 | 0 |
| 350 | CAGA | TGTTCACTAGCAACCTCAAA | 17266 | SpyCas9- | 30 | 0 |
| | | | | 3var-NRRH | | |
| 351 | CACA | CATCCACGTTCACCTTGCCC | 17267 | SpyCas9- | 30 | 0 |
| | | | | 3var-NRCH | | |
| 352 | ACAGA | TGTGTTCACTAGCAACCTCAA | 17268 | SauCas9KKH | 31 | 0 |
| 353 | ACAG | TGTGTTCACTAGCAACCTCAA | 17269 | SauriCas9- | 31 | 0 |
| | | | | KKH | | |
| 354 | CCA | TCATCCACGTTCACCTTGCC | 17270 | SpyCas9- | 31 | 0 |
| | | | | SpRY | | |
| 355 | ACA | GTGTTCACTAGCAACCTCAA | 17271 | SpyCas9- | 31 | 0 |
| | | | | SpRY | | |
| 356 | ACAGAC | TGTGTTCACTAGCAACCTCAA | 17272 | cCas9-v17 | 31 | 0 |
| 357 | ACAGAC | TGTGTTCACTAGCAACCTCAA | 17273 | cCas9-v42 | 31 | 0 |
| 358 | ACAGACAC | acTGTGTTCACTAGCAACCTCAA | 17274 | CjeCas9 | 31 | 0 |
| 359 | AACAG | CTGTGTTCACTAGCAACCTCA | 17275 | SauCas9KKH | 32 | 0 |
| 360 | AAC | TGTGTTCACTAGCAACCTCA | 17276 | SpyCas9- | 32 | 0 |
| | | | | SpRY | | |
| 361 | CCC | TTCATCCACGTTCACCTTGC | 17277 | SpyCas9- | 32 | 0 |
| | | | | SpRY | | |
| 362 | CCCACAGG | aactTCATCCACGTTCACCTTGC | 17278 | BlatCas9 | 32 | 0 |
| 363 | CCCAC | aactTCATCCACGTTCACCTTGC | 17279 | BlatCas9 | 32 | 0 |
| 364 | AACAGA | CTGTGTTCACTAGCAACCTCA | 17280 | cCas9-v17 | 32 | 0 |
| 365 | AACAGA | CTGTGTTCACTAGCAACCTCA | 17281 | cCas9-v42 | 32 | 0 |
| 366 | AACAGACA | caacTGTGTTCACTAGCAACCTCA | 17282 | NmeCas9 | 32 | 0 |
| 367 | AACA | TGTGTTCACTAGCAACCTCA | 17283 | SpyCas9- | 32 | 0 |
| | | | | 3var-NRCH | | |
| 368 | AAA | CTGTGTTCACTAGCAACCTC | 17284 | SpyCas9- | 33 | 0 |
| | | | | SpRY | | |
| 369 | CCC | CTTCATCCACGTTCACCTTG | 17285 | SpyCas9- | 33 | 0 |
| | | | | SpRY | | |
| 370 | AAAC | CTGTGTTCACTAGCAACCTC | 17286 | SpyCas9- | 33 | 0 |
| | | | | 3var-NRRH | | |
| 371 | AAAC | acTGTGTTCACTAGCAACCTC | 17287 | iSpyMacCas9 | 33 | 0 |
| 372 | CAA | ACTGTGTTCACTAGCAACCT | 17288 | SpyCas9- | 34 | 0 |
| | | | | SpRY | | |
| 373 | GCC | ACTTCATCCACGTTCACCTT | 17289 | SpyCas9- | 34 | 0 |
| | | | | SpRY | | |
| 374 | CAAACAGA | acaaCTGTGTTCACTAGCAACCT | 17290 | BlatCas9 | 34 | 0 |
| 375 | GCCCC | ccaaCTTCATCCACGTTCACCTT | 17291 | BlatCas9 | 34 | 0 |
| 376 | CAAAC | acaaCTGTGTTCACTAGCAACCT | 17292 | BlatCas9 | 34 | 0 |
| 377 | CAAA | ACTGTGTTCACTAGCAACCT | 17293 | SpyCas9- | 34 | 0 |
| | | | | 3var-NRRH | | |
| 378 | CAAA | aaCTGTGTTCACTAGCAACCT | 17294 | iSpyMacCas9 | 34 | 0 |
| 379 | TGCCCC | caCCAACTTCATCCACGTTCACCT | 17295 | Nme2Cas9 | 35 | 0 |
| 380 | TCAAA | CAACTGTGTTCACTAGCAACC | 17296 | SauCas9KKH | 35 | 0 |
| 381 | TG | AACTTCATCCACGTTCACCT | 17297 | SpyCas9-NG | 35 | 0 |
| 382 | TG | AACTTCATCCACGTTCACCT | 17298 | SpyCas9- | 35 | 0 |
| | | | | xCas | | |
| 383 | TG | AACTTCATCCACGTTCACCT | 17299 | SpyCas9- | 35 | 0 |
| | | | | xCas-NG | | |
| 384 | TGC | AACTTCATCCACGTTCACCT | 17300 | SpyCas9- | 35 | 0 |
| | | | | SpG | | |
| 385 | TGC | AACTTCATCCACGTTCACCT | 17301 | SpyCas9- | 35 | 0 |
| | | | | SpRY | | |
| 386 | TCA | AACTGTGTTCACTAGCAACC | 17302 | SpyCas9- | 35 | 0 |
| | | | | SpRY | | |
| 387 | TGCCC | accaACTTCATCCACGTTCACCT | 17303 | BlatCas9 | 35 | 0 |
| 388 | TCAAAC | CAACTGTGTTCACTAGCAACC | 17304 | cCas9-v17 | 35 | 0 |
| 389 | TCAAAC | CAACTGTGTTCACTAGCAACC | 17305 | cCas9-v42 | 35 | 0 |
| 390 | TGCC | AACTTCATCCACGTTCACCT | 17306 | SpyCas9- | 35 | 0 |
| | | | | 3var-NRCH | | |
| 391 | TTGCCC | ccACCAACTTCATCCACGTTCACC | 17307 | Nme2Cas9 | 36 | 0 |
| 392 | CTCAA | ACAACTGTGTTCACTAGCAAC | 17308 | SauCas9KKH | 36 | 0 |
| 393 | TTG | CAACTTCATCCACGTTCACC | 17309 | ScaCas9 | 36 | 0 |
| 394 | TTG | CAACTTCATCCACGTTCACC | 17310 | ScaCas9- | 36 | 0 |
| | | | | HiFi-Sc++ | | |
| 395 | TTG | CAACTTCATCCACGTTCACC | 17311 | ScaCas9- | 36 | 0 |
| | | | | Sc++ | | |
| 396 | TTG | CAACTTCATCCACGTTCACC | 17312 | SpyCas9- | 36 | 0 |
| | | | | SpRY | | |
| 397 | CTC | CAACTGTGTTCACTAGCAAC | 17313 | SpyCas9- | 36 | 0 |
| | | | | SpRY | | |
| 398 | TTGCC | caccAACTTCATCCACGTTCACC | 17314 | BlatCas9 | 36 | 0 |
| 399 | CTCAAA | ACAACTGTGTTCACTAGCAAC | 17315 | cCas9-v17 | 36 | 0 |
| 400 | CTCAAA | ACAACTGTGTTCACTAGCAAC | 17316 | cCas9-v42 | 36 | 0 |
| 401 | TTGCCCC | ACCAACTTCATCCACGTTCACC | 17317 | CdiCas9 | 36 | 0 |
| 402 | CTTGCC | acCACCAACTTCATCCACGTTCAC | 17318 | Nme2Cas9 | 37 | 0 |
| 403 | CTT | CCAACTTCATCCACGTTCAC | 17319 | SpyCas9- | 37 | 0 |
| | | | | SpRY | | |
| 404 | CCT | ACAACTGTGTTCACTAGCAA | 17320 | SpyCas9- | 37 | 0 |
| | | | | SpRY | | |
| 405 | CTTGC | ccacCAACTTCATCCACGTTCAC | 17321 | BlatCas9 | 37 | 0 |
| 406 | CCT | ACCAACTTCATCCACGTTCA | 17322 | SpyCas9- | 38 | 0 |
| | | | | SpRY | | |
| 407 | ACC | CACAACTGTGTTCACTAGCA | 17323 | SpyCas9- | 38 | 0 |
| | | | | SpRY | | |
| 408 | ACCTCAAA | tgacACAACTGTGTTCACTAGCA | 17324 | BlatCas9 | 38 | 0 |
| 409 | ACCTCAAA | tgacACAACTGTGTTCACTAGCA | 17325 | BlatCas9 | 38 | 0 |
| 410 | ACCTCAAA | tgACACAACTGTGTTCACTAGCA | 17326 | GeoCas9 | 38 | 0 |
| 411 | ACCTC | tgacACAACTGTGTTCACTAGCA | 17327 | BlatCas9 | 38 | 0 |
| 412 | AAC | ACACAACTGTGTTCACTAGC | 17328 | SpyCas9- | 39 | 0 |
| | | | | SpRY | | |
| 413 | ACC | CACCAACTTCATCCACGTTC | 17329 | SpyCas9- | 39 | 0 |
| | | | | SpRY | | |
| 414 | AACC | ACACAACTGTGTTCACTAGC | 17330 | SpyCas9- | 39 | 0 |
| | | | | 3var-NRCH | | |
| 415 | CAC | CCACCAACTTCATCCACGTT | 17331 | SpyCas9- | 40 | 0 |
| | | | | SpRY | | |
| 416 | CAA | GACACAACTGTGTTCACTAG | 17332 | SpyCas9- | 40 | 0 |
| | | | | SpRY | | |
| 417 | CAACC | tctgACACAACTGTGTTCACTAG | 17333 | BlatCas9 | 40 | 0 |
| 418 | CAACCTC | CTGACACAACTGTGTTCACTAG | 17334 | CdiCas9 | 40 | 0 |
| 419 | CAAC | GACACAACTGTGTTCACTAG | 17335 | SpyCas9- | 40 | 0 |
| | | | | 3var-NRRH | | |
| 420 | CAAC | tgACACAACTGTGTTCACTAG | 17336 | iSpyMacCas9 | 40 | 0 |
| 421 | CACC | CCACCAACTTCATCCACGTT | 17337 | SpyCas9- | 40 | 0 |
| | | | | 3var-NRCH | | |
| 422 | GCAACC | ctTCTGACACAACTGTGTTCACTA | 17338 | Nme2Cas9 | 41 | 0 |
| 423 | TCA | ACCACCAACTTCATCCACGT | 17339 | SpyCas9- | 41 | 0 |
| | | | | SpRY | | |
| 424 | GCA | TGACACAACTGTGTTCACTA | 17340 | SpyCas9- | 41 | 0 |
| | | | | SpRY | | |
| 425 | TCACCTTG | ctcaCCACCAACTTCATCCACGT | 17341 | BlatCas9 | 41 | 0 |
| 426 | TCACC | ctcaCCACCAACTTCATCCACGT | 17342 | BlatCas9 | 41 | 0 |
| 427 | GCAAC | ttctGACACAACTGTGTTCACTA | 17343 | BlatCas9 | 41 | 0 |
| 428 | TCACCTT | TCACCACCAACTTCATCCACGT | 17344 | CdiCas9 | 41 | 0 |
| 429 | GCAACCT | TCTGACACAACTGTGTTCACTA | 17345 | CdiCas9 | 41 | 0 |
| 430 | TTCACC | gcCTCACCACCAACTTCATCCACG | 17346 | Nme2Cas9 | 42 | 0 |
| 431 | AGCAA | TCTGACACAACTGTGTTCACT | 17347 | SauCas9KKH | 42 | 0 |
| 432 | AG | CTGACACAACTGTGTTCACT | 17348 | SpyCas9-NG | 42 | 0 |
| 433 | AG | CTGACACAACTGTGTTCACT | 17349 | SpyCas9- | 42 | 0 |
| | | | | xCas | | |
| 434 | AG | CTGACACAACTGTGTTCACT | 17350 | SpyCas9- | 42 | 0 |
| | | | | xCas-NG | | |
| 435 | AGC | CTGACACAACTGTGTTCACT | 17351 | SpyCas9- | 42 | 0 |
| | | | | SpG | | |
| 436 | AGC | CTGACACAACTGTGTTCACT | 17352 | SpyCas9- | 42 | 0 |
| | | | | SpRY | | |
| 437 | TTC | CACCACCAACTTCATCCACG | 17353 | SpyCas9- | 42 | 0 |
| | | | | SpRY | | |
| 438 | TTCACCTT | cctcACCACCAACTTCATCCACG | 17354 | BlatCas9 | 42 | 0 |
| 439 | TTCAC | cctcACCACCAACTTCATCCACG | 17355 | BlatCas9 | 42 | 0 |
| 440 | AGCAAC | TCTGACACAACTGTGTTCACT | 17356 | cCas9-v17 | 42 | 0 |
| 441 | AGCAAC | TCTGACACAACTGTGTTCACT | 17357 | cCas9-v42 | 42 | 0 |
| 442 | AGCA | CTGACACAACTGTGTTCACT | 17358 | SpyCas9- | 42 | 0 |
| | | | | 3var-NRCH | | |
| 443 | TAG | TCTGACACAACTGTGTTCAC | 17359 | ScaCas9 | 43 | 0 |
| 444 | TAG | TCTGACACAACTGTGTTCAC | 17360 | ScaCas9- | 43 | 0 |
| | | | | HiFi-Sc++ | | |
| 445 | TAG | TCTGACACAACTGTGTTCAC | 17361 | ScaCas9- | 43 | 0 |
| | | | | Sc++ | | |
| 446 | TAG | TCTGACACAACTGTGTTCAC | 17362 | SpyCas9- | 43 | 0 |
| | | | | SpRY | | |
| 447 | GTT | TCACCACCAACTTCATCCAC | 17363 | SpyCas9- | 43 | 0 |
| | | | | SpRY | | |
| 448 | TAGCAAC | CTTCTGACACAACTGTGTTCAC | 17364 | CdiCas9 | 43 | 0 |
| 449 | TAGC | TCTGACACAACTGTGTTCAC | 17365 | SpyCas9- | 43 | 0 |
| | | | | 3var-NRRH | | |
| 450 | TAGCAA | TCTGACACAACTGTGTTCAC | 17366 | St1Cas9- | 43 | 0 |
| | | | | LMG1831 | | |
| 451 | CTAG | CTTCTGACACAACTGTGTTCA | 17367 | SauriCas9- | 44 | 0 |
| | | | | KKH | | |
| 452 | CG | CTCACCACCAACTTCATCCA | 17368 | SpyCas9-NG | 44 | 0 |
| 453 | CG | CTCACCACCAACTTCATCCA | 17369 | SpyCas9- | 44 | 0 |
| | | | | xCas | | |
| 454 | CG | CTCACCACCAACTTCATCCA | 17370 | SpyCas9- | 44 | 0 |
| | | | | xCas-NG | | |
| 455 | CGT | CTCACCACCAACTTCATCCA | 17371 | SpyCas9- | 44 | 0 |
| | | | | SpG | | |
| 456 | CGT | CTCACCACCAACTTCATCCA | 17372 | SpyCas9- | 44 | 0 |
| | | | | SpRY | | |
| 457 | CTA | TTCTGACACAACTGTGTTCA | 17373 | SpyCas9- | 44 | 0 |
| | | | | SpRY | | |
| 458 | CGTTC | ggccTCACCACCAACTTCATCCA | 17374 | BlatCas9 | 44 | 0 |
| 459 | CTAGC | tgctTCTGACACAACTGTGTTCA | 17375 | BlatCas9 | 44 | 0 |
| 460 | CGTT | CTCACCACCAACTTCATCCA | 17376 | SpyCas9- | 44 | 0 |
| | | | | 3var-NRTH | | |
| 461 | ACTAG | GCTTCTGACACAACTGTGTTC | 17377 | SauCas9KKH | 45 | 0 |
| 462 | ACG | CCTCACCACCAACTTCATCC | 17378 | ScaCas9 | 45 | 0 |
| 463 | ACG | CCTCACCACCAACTTCATCC | 17379 | ScaCas9- | 45 | 0 |
| | | | | HiFi-Sc++ | | |
| 464 | ACG | CCTCACCACCAACTTCATCC | 17380 | ScaCas9- | 45 | 0 |
| | | | | Sc++ | | |
| 465 | ACG | CCTCACCACCAACTTCATCC | 17381 | SpyCas9- | 45 | 0 |
| | | | | SpRY | | |
| 466 | ACT | CTTCTGACACAACTGTGTTC | 17382 | SpyCas9- | 45 | 0 |
| | | | | SpRY | | |
| 467 | CAC | GCCTCACCACCAACTTCATC | 17383 | SpyCas9- | 46 | 0 |
| | | | | SpRY | | |
| 468 | CAC | GCTTCTGACACAACTGTGTT | 17384 | SpyCas9- | 46 | 0 |
| | | | | SpRY | | |
| 469 | CACGTT | GGCCTCACCACCAACTTCATC | 17385 | cCas9-v16 | 46 | 0 |
| 470 | CACGTT | GGCCTCACCACCAACTTCATC | 17386 | cCas9-v21 | 46 | 0 |
| 471 | CACT | GCTTCTGACACAACTGTGTT | 17387 | SpyCas9- | 46 | 0 |
| | | | | 3var-NRCH | | |
| 472 | CCACGTT | ccaGGGCCTCACCACCAACTTCAT | 17388 | PpnCas9 | 47 | 0 |
| 473 | CCA | GGCCTCACCACCAACTTCAT | 17389 | SpyCas9- | 47 | 0 |
| | | | | SpRY | | |
| 474 | TCA | TGCTTCTGACACAACTGTGT | 17390 | SpyCas9- | 47 | 0 |
| | | | | SpRY | | |
| 475 | TCC | GGGCCTCACCACCAACTTCA | 17391 | SpyCas9- | 48 | 0 |
| | | | | SpRY | | |
| 476 | TTC | TTGCTTCTGACACAACTGTG | 17392 | SpyCas9- | 48 | 0 |
| | | | | SpRY | | |
| 477 | TCCACGTT | ccagGGCCTCACCACCAACTTCA | 17393 | BlatCas9 | 48 | 0 |
| 478 | TTCACTAG | cattTGCTTCTGACACAACTGTG | 17394 | BlatCas9 | 48 | 0 |
| 479 | TCCAC | ccagGGCCTCACCACCAACTTCA | 17395 | BlatCas9 | 48 | 0 |
| 480 | TTCAC | cattTGCTTCTGACACAACTGTG | 17396 | BlatCas9 | 48 | 0 |
| 481 | TTCACT | TTTGCTTCTGACACAACTGTG | 17397 | cCas9-v16 | 48 | 0 |
| 482 | TTCACT | TTTGCTTCTGACACAACTGTG | 17398 | cCas9-v21 | 48 | 0 |
| 483 | ATC | AGGGCCTCACCACCAACTTC | 17399 | SpyCas9- | 49 | 0 |
| | | | | SpRY | | |
| 484 | GTT | TTTGCTTCTGACACAACTGT | 17400 | SpyCas9- | 49 | 0 |
| | | | | SpRY | | |
| 485 | TG | ATTTGCTTCTGACACAACTG | 17401 | SpyCas9-NG | 50 | 0 |
| 486 | TG | ATTTGCTTCTGACACAACTG | 17402 | SpyCas9- | 50 | 0 |
| | | | | xCas | | |
| 487 | TG | ATTTGCTTCTGACACAACTG | 17403 | SpyCas9- | 50 | 0 |
| | | | | xCas-NG | | |
| 488 | CAT | CAGGGCCTCACCACCAACTT | 17404 | SpyCas9- | 50 | 0 |
| | | | | SpRY | | |
| 489 | TGT | ATTTGCTTCTGACACAACTG | 17405 | SpyCas9- | 50 | 0 |
| | | | | SpG | | |
| 490 | TGT | ATTTGCTTCTGACACAACTG | 17406 | SpyCas9- | 50 | 0 |
| | | | | SpRY | | |
| 491 | CATCC | gcccAGGGCCTCACCACCAACTT | 17407 | BlatCas9 | 50 | 0 |
| 492 | TGTTC | tacaTTTGCTTCTGACACAACTG | 17408 | BlatCas9 | 50 | 0 |
| 493 | CATC | CAGGGCCTCACCACCAACTT | 17409 | SpyCas9- | 50 | 0 |
| | | | | 3var-NRTH | | |
| 494 | TGTT | ATTTGCTTCTGACACAACTG | 17410 | SpyCas9- | 50 | 0 |
| | | | | 3var-NRTH | | |
| 495 | TCATCC | ctGCCCAGGGCCTCACCACCAACT | 17411 | Nme2Cas9 | 51 | 0 |
| 496 | GTG | CATTTGCTTCTGACACAACT | 17412 | ScaCas9 | 51 | 0 |
| 497 | GTG | CATTTGCTTCTGACACAACT | 17413 | ScaCas9- | 51 | 0 |
| | | | | HiFi-Sc++ | | |
| 498 | GTG | CATTTGCTTCTGACACAACT | 17414 | ScaCas9- | 51 | 0 |
| | | | | Sc++ | | |
| 499 | GTG | CATTTGCTTCTGACACAACT | 17415 | SpyCas9- | 51 | 0 |
| | | | | SpRY | | |
| 500 | TCA | CCAGGGCCTCACCACCAACT | 17416 | SpyCas9- | 51 | 0 |
| | | | | SpRY | | |
| 501 | TCATC | tgccCAGGGCCTCACCACCAACT | 17417 | BlatCas9 | 51 | 0 |
| 502 | TG | ACATTTGCTTCTGACACAAC | 17418 | SpyCas9-NG | 52 | 0 |
| 503 | TG | ACATTTGCTTCTGACACAAC | 17419 | SpyCas9- | 52 | 0 |
| | | | | xCas | | |
| 504 | TG | ACATTTGCTTCTGACACAAC | 17420 | SpyCas9- | 52 | 0 |
| | | | | xCas-NG | | |
| 505 | TGT | ACATTTGCTTCTGACACAAC | 17421 | SpyCas9- | 52 | 0 |
| | | | | SpG | | |
| 506 | TGT | ACATTTGCTTCTGACACAAC | 17422 | SpyCas9- | 52 | 0 |
| | | | | SpRY | | |
| 507 | TTC | CCCAGGGCCTCACCACCAAC | 17423 | SpyCas9- | 52 | 0 |
| | | | | SpRY | | |
| 508 | CTGTGTT | tgcTTACATTTGCTTCTGACACAA | 17424 | PpnCas9 | 53 | 0 |
| 509 | CTG | TACATTTGCTTCTGACACAA | 17425 | ScaCas9 | 53 | 0 |
| 510 | CTG | TACATTTGCTTCTGACACAA | 17426 | ScaCas9- | 53 | 0 |
| | | | | HiFi-Sc++ | | |
| 511 | CTG | TACATTTGCTTCTGACACAA | 17427 | ScaCas9- | 53 | 0 |
| | | | | Sc++ | | |
| 512 | CTG | TACATTTGCTTCTGACACAA | 17428 | SpyCas9- | 53 | 0 |
| | | | | SpRY | | |
| 513 | CTT | GCCCAGGGCCTCACCACCAA | 17429 | SpyCas9- | 53 | 0 |
| | | | | SpRY | | |
| 514 | ACT | TGCCCAGGGCCTCACCACCA | 17430 | SpyCas9- | 54 | 0 |
| | | | | SpRY | | |
| 515 | ACT | TTACATTTGCTTCTGACACA | 17431 | SpyCas9- | 54 | 0 |
| | | | | SpRY | | |
| 516 | ACTTC | acctGCCCAGGGCCTCACCACCA | 17432 | BlatCas9 | 54 | 0 |
| 517 | AAC | CTGCCCAGGGCCTCACCACC | 17433 | SpyCas9- | 55 | 0 |
| | | | | SpRY | | |
| 518 | AAC | CTTACATTTGCTTCTGACAC | 17434 | SpyCas9- | 55 | 0 |
| | | | | SpRY | | |
| 519 | AACT | CTGCCCAGGGCCTCACCACC | 17435 | SpyCas9- | 55 | 0 |
| | | | | 3var-NRCH | | |
| 520 | AACT | CTTACATTTGCTTCTGACAC | 17436 | SpyCas9- | 55 | 0 |
| | | | | 3var-NRCH | | |
| 521 | CAA | CCTGCCCAGGGCCTCACCAC | 17437 | SpyCas9- | 56 | 0 |
| | | | | SpRY | | |
| 522 | CAA | GCTTACATTTGCTTCTGACA | 17438 | SpyCas9- | 56 | 0 |
| | | | | SpRY | | |
| 523 | CAACTTC | AACCTGCCCAGGGCCTCACCAC | 17439 | CdiCas9 | 56 | 0 |
| 524 | CAAC | CCTGCCCAGGGCCTCACCAC | 17440 | SpyCas9- | 56 | 0 |
| | | | | 3var-NRRH | | |
| 525 | CAAC | acCTGCCCAGGGCCTCACCAC | 17441 | iSpyMacCas9 | 56 | 0 |
| 526 | CAAC | GCTTACATTTGCTTCTGACA | 17442 | SpyCas9- | 56 | 0 |
| | | | | 3var-NRRH | | |
| 527 | CAAC | tgCTTACATTTGCTTCTGACA | 17443 | iSpyMacCas9 | 56 | 0 |
| 528 | CCA | ACCTGCCCAGGGCCTCACCA | 17444 | SpyCas9- | 57 | 0 |
| | | | | SpRY | | |
| 529 | ACA | TGCTTACATTTGCTTCTGAC | 17445 | SpyCas9- | 57 | 0 |
| | | | | SpRY | | |
| 530 | ACAACTGT | tattGCTTACATTTGCTTCTGAC | 17446 | BlatCas9 | 57 | 0 |
| 531 | CCAAC | ccaaCCTGCCCAGGGCCTCACCA | 17447 | BlatCas9 | 57 | 0 |
| 532 | ACAAC | tattGCTTACATTTGCTTCTGAC | 17448 | BlatCas9 | 57 | 0 |
| 533 | CCAACT | AACCTGCCCAGGGCCTCACCA | 17449 | cCas9-v16 | 57 | 0 |
| 534 | CCAACT | AACCTGCCCAGGGCCTCACCA | 17450 | cCas9-v21 | 57 | 0 |
| 535 | ACAACT | TTGCTTACATTTGCTTCTGAC | 17451 | cCas9-v16 | 57 | 0 |
| 536 | ACAACT | TTGCTTACATTTGCTTCTGAC | 17452 | cCas9-v21 | 57 | 0 |
| 537 | CCAACTT | CAACCTGCCCAGGGCCTCACCA | 17453 | CdiCas9 | 57 | 0 |
| 538 | ACCAA | CAACCTGCCCAGGGCCTCACC | 17454 | SauCas9KKH | 58 | 0 |
| 539 | CACAA | ATTGCTTACATTTGCTTCTGA | 17455 | SauCas9KKH | 58 | 0 |
| 540 | CAC | TTGCTTACATTTGCTTCTGA | 17456 | SpyCas9- | 58 | 0 |
| | | | | SpRY | | |
| 541 | ACC | AACCTGCCCAGGGCCTCACC | 17457 | SpyCas9- | 58 | 0 |
| | | | | SpRY | | |
| 542 | ACCAAC | CAACCTGCCCAGGGCCTCACC | 17458 | cCas9-v17 | 58 | 0 |
| 543 | ACCAAC | CAACCTGCCCAGGGCCTCACC | 17459 | cCas9-v42 | 58 | 0 |
| 544 | CACAAC | ATTGCTTACATTTGCTTCTGA | 17460 | cCas9-v17 | 58 | 0 |
| 545 | CACAAC | ATTGCTTACATTTGCTTCTGA | 17461 | cCas9-v42 | 58 | 0 |
| 546 | CACA | TTGCTTACATTTGCTTCTGA | 17462 | SpyCas9- | 58 | 0 |
| | | | | 3var-NRCH | | |
| 547 | CAC | CAACCTGCCCAGGGCCTCAC | 17463 | SpyCas9- | 59 | 0 |
| | | | | SpRY | | |
| 548 | ACA | ATTGCTTACATTTGCTTCTG | 17464 | SpyCas9- | 59 | 0 |
| | | | | SpRY | | |
| 549 | ACACAAC | CTATTGCTTACATTTGCTTCTG | 17465 | CdiCas9 | 59 | 0 |
| 550 | CACC | CAACCTGCCCAGGGCCTCAC | 17466 | SpyCas9- | 59 | 0 |
| | | | | 3var-NRCH | | |
| 551 | ACACAA | ATTGCTTACATTTGCTTCTG | 17467 | St1Cas9- | 59 | 0 |
| | | | | CNRZ1066 | | |
| 552 | GAC | TATTGCTTACATTTGCTTCT | 17468 | SpyCas9- | 60 | 0 |
| | | | | SpRY | | |
| 553 | CCA | CCAACCTGCCCAGGGCCTCA | 17469 | SpyCas9- | 60 | 0 |
| | | | | SpRY | | |
| 554 | CCACC | atacCAACCTGCCCAGGGCCTCA | 17470 | BlatCas9 | 60 | 0 |
| 555 | GACAC | atctATTGCTTACATTTGCTTCT | 17471 | BlatCas9 | 60 | 0 |
| 556 | GACA | TATTGCTTACATTTGCTTCT | 17472 | SpyCas9- | 60 | 0 |
| | | | | 3var-NRCH | | |
| 557 | ACCACC | tgATACCAACCTGCCCAGGGCCTC | 17473 | Nme2Cas9 | 61 | 0 |
| 558 | TG | CTATTGCTTACATTTGCTTC | 17474 | SpyCas9-NG | 61 | 0 |
| 559 | TG | CTATTGCTTACATTTGCTTC | 17475 | SpyCas9- | 61 | 0 |
| | | | | xCas | | |
| 560 | TG | CTATTGCTTACATTTGCTTC | 17476 | SpyCas9- | 61 | 0 |
| | | | | xCas-NG | | |
| 561 | TGA | CTATTGCTTACATTTGCTTC | 17477 | SpyCas9- | 61 | 0 |
| | | | | SpG | | |
| 562 | TGA | CTATTGCTTACATTTGCTTC | 17478 | SpyCas9- | 61 | 0 |
| | | | | SpRY | | |
| 563 | ACC | ACCAACCTGCCCAGGGCCTC | 17479 | SpyCas9- | 61 | 0 |
| | | | | SpRY | | |
| 564 | ACCACCAA | gataCCAACCTGCCCAGGGCCTC | 17480 | BlatCas9 | 61 | 0 |
| 565 | ACCACCAA | gataCCAACCTGCCCAGGGCCTC | 17481 | BlatCas9 | 61 | 0 |
| 566 | ACCAC | gataCCAACCTGCCCAGGGCCTC | 17482 | BlatCas9 | 61 | 0 |
| 567 | TGAC | CTATTGCTTACATTTGCTTC | 17483 | SpyCas9- | 61 | 0 |
| | | | | 3var-NRRH | | |
| 568 | TGAC | CTATTGCTTACATTTGCTTC | 17484 | SpyCas9- | 61 | 0 |
| | | | | VQR | | |
| 569 | CTG | TCTATTGCTTACATTTGCTT | 17485 | ScaCas9 | 62 | 0 |
| 570 | CTG | TCTATTGCTTACATTTGCTT | 17486 | ScaCas9- | 62 | 0 |
| | | | | HiFi-Sc++ | | |
| 571 | CTG | TCTATTGCTTACATTTGCTT | 17487 | ScaCas9- | 62 | 0 |
| | | | | Sc++ | | |
| 572 | CTG | TCTATTGCTTACATTTGCTT | 17488 | SpyCas9- | 62 | 0 |
| | | | | SpRY | | |
| 573 | CAC | TACCAACCTGCCCAGGGCCT | 17489 | SpyCas9- | 62 | 0 |
| | | | | SpRY | | |
| 574 | CTGAC | ccatCTATTGCTTACATTTGCTT | 17490 | BlatCas9 | 62 | 0 |
| 575 | CTGACAC | CATCTATTGCTTACATTTGCTT | 17491 | CdiCas9 | 62 | 0 |
| 576 | CACC | TACCAACCTGCCCAGGGCCT | 17492 | SpyCas9- | 62 | 0 |
| | | | | 3var-NRCH | | |
| 577 | TCTGA | CATCTATTGCTTACATTTGCT | 17493 | SauCas9KKH | 63 | 0 |
| 578 | TCA | ATACCAACCTGCCCAGGGCC | 17494 | SpyCas9- | 63 | 0 |
| | | | | SpRY | | |
| 579 | TCT | ATCTATTGCTTACATTTGCT | 17495 | SpyCas9- | 63 | 0 |
| | | | | SpRY | | |
| 580 | TCACC | ttgaTACCAACCTGCCCAGGGCC | 17496 | BlatCas9 | 63 | 0 |
| 581 | TCACCAC | TGATACCAACCTGCCCAGGGCC | 17497 | CdiCas9 | 63 | 0 |
| 582 | TCTGACAC | gcCATCTATTGCTTACATTTGCT | 17498 | CjeCas9 | 63 | 0 |
| 583 | CTCACC | ccTTGATACCAACCTGCCCAGGGC | 17499 | Nme2Cas9 | 64 | 0 |
| 584 | CTC | GATACCAACCTGCCCAGGGC | 17500 | SpyCas9- | 64 | 0 |
| | | | | SpRY | | |
| 585 | TTC | CATCTATTGCTTACATTTGC | 17501 | SpyCas9- | 64 | 0 |
| | | | | SpRY | | |
| 586 | CTCAC | cttgATACCAACCTGCCCAGGGC | 17502 | BlatCas9 | 64 | 0 |
| 587 | TTCTGACA | gagcCATCTATTGCTTACATTTGC | 17503 | NmeCas9 | 64 | 0 |
| 588 | CCT | TGATACCAACCTGCCCAGGG | 17504 | SpyCas9- | 65 | 0 |
| | | | | SpRY | | |
| 589 | CTT | CCATCTATTGCTTACATTTG | 17505 | SpyCas9- | 65 | 0 |
| | | | | SpRY | | |
| 590 | GCC | TTGATACCAACCTGCCCAGG | 17506 | SpyCas9- | 66 | 0 |
| | | | | SpRY | | |
| 591 | GCT | GCCATCTATTGCTTACATTT | 17507 | SpyCas9- | 66 | 0 |
| | | | | SpRY | | |
| 592 | GCTTCTGA | agagCCATCTATTGCTTACATTT | 17508 | BlatCas9 | 66 | 0 |
| 593 | GCCTC | acctTGATACCAACCTGCCCAGG | 17509 | BlatCas9 | 66 | 0 |
| 594 | GCTTC | agagCCATCTATTGCTTACATTT | 17510 | BlatCas9 | 66 | 0 |
| 595 | GG | CTTGATACCAACCTGCCCAG | 17511 | SpyCas9-NG | 67 | 0 |
| 596 | GG | CTTGATACCAACCTGCCCAG | 17512 | SpyCas9- | 67 | 0 |
| | | | | xCas | | |
| 597 | GG | CTTGATACCAACCTGCCCAG | 17513 | SpyCas9- | 67 | 0 |
| | | | | xCas-NG | | |
| 598 | TG | AGCCATCTATTGCTTACATT | 17514 | SpyCas9-NG | 67 | 0 |
| 599 | TG | AGCCATCTATTGCTTACATT | 17515 | SpyCas9- | 67 | 0 |
| | | | | xCas | | |
| 600 | TG | AGCCATCTATTGCTTACATT | 17516 | SpyCas9- | 67 | 0 |
| | | | | xCas-NG | | |
| 601 | GGC | CTTGATACCAACCTGCCCAG | 17517 | SpyCas9- | 67 | 0 |
| | | | | SpG | | |
| 602 | GGC | CTTGATACCAACCTGCCCAG | 17518 | SpyCas9- | 67 | 0 |
| | | | | SpRY | | |
| 603 | TGC | AGCCATCTATTGCTTACATT | 17519 | SpyCas9- | 67 | 0 |
| | | | | SpG | | |
| 604 | TGC | AGCCATCTATTGCTTACATT | 17520 | SpyCas9- | 67 | 0 |
| | | | | SpRY | | |
| 605 | GGCC | CTTGATACCAACCTGCCCAG | 17521 | SpyCas9- | 67 | 0 |
| | | | | 3var-NRCH | | |
| 606 | TGCT | AGCCATCTATTGCTTACATT | 17522 | SpyCas9- | 67 | 0 |
| | | | | 3var-NRCH | | |
| 607 | GGG | CCTTGATACCAACCTGCCCA | 17523 | ScaCas9 | 68 | 0 |
| 608 | GGG | CCTTGATACCAACCTGCCCA | 17524 | ScaCas9- | 68 | 0 |
| | | | | HiFi-Sc++ | | |
| 609 | GGG | CCTTGATACCAACCTGCCCA | 17525 | ScaCas9- | 68 | 0 |
| | | | | Sc++ | | |
| 610 | GGG | CCTTGATACCAACCTGCCCA | 17526 | SpyCas9 | 68 | 0 |
| 611 | GGG | CCTTGATACCAACCTGCCCA | 17527 | SpyCas9- | 68 | 0 |
| | | | | HF1 | | |
| 612 | GGG | CCTTGATACCAACCTGCCCA | 17528 | SpyCas9- | 68 | 0 |
| | | | | SpG | | |
| 613 | GGG | CCTTGATACCAACCTGCCCA | 17529 | SpyCas9- | 68 | 0 |
| | | | | SpRY | | |
| 614 | TTG | GAGCCATCTATTGCTTACAT | 17530 | ScaCas9 | 68 | 0 |
| 615 | TTG | GAGCCATCTATTGCTTACAT | 17531 | ScaCas9- | 68 | 0 |
| | | | | HiFi-Sc++ | | |
| 616 | TTG | GAGCCATCTATTGCTTACAT | 17532 | ScaCas9- | 68 | 0 |
| | | | | Sc++ | | |
| 617 | TTG | GAGCCATCTATTGCTTACAT | 17533 | SpyCas9- | 68 | 0 |
| | | | | SpRY | | |
| 618 | GG | CCTTGATACCAACCTGCCCA | 17534 | SpyCas9-NG | 68 | 0 |
| 619 | GG | CCTTGATACCAACCTGCCCA | 17535 | SpyCas9- | 68 | 0 |
| | | | | xCas | | |
| 620 | GG | CCTTGATACCAACCTGCCCA | 17536 | SpyCas9- | 68 | 0 |
| | | | | xCas-NG | | |
| 621 | GGGCC | taacCTTGATACCAACCTGCCCA | 17537 | BlatCas9 | 68 | 0 |
| 622 | GGGCCTC | AACCTTGATACCAACCTGCCCA | 17538 | CdiCas9 | 68 | 0 |
| 623 | TTGCTTC | CAGAGCCATCTATTGCTTACAT | 17539 | CdiCas9 | 68 | 0 |
| 624 | GGGC | CCTTGATACCAACCTGCCCA | 17540 | SpyCas9- | 68 | 0 |
| | | | | 3var-NRRH | | |
| 625 | AGGGCC | tgTAACCTTGATACCAACCTGCCC | 17541 | Nme2Cas9 | 69 | 0 |
| 626 | AGGG | AACCTTGATACCAACCTGCCC | 17542 | SauriCas9 | 69 | 0 |
| 627 | AGGG | AACCTTGATACCAACCTGCCC | 17543 | SauriCas9- | 69 | 0 |
| | | | | KKH | | |
| 628 | AGG | ACCTTGATACCAACCTGCCC | 17544 | ScaCas9 | 69 | 0 |
| 629 | AGG | ACCTTGATACCAACCTGCCC | 17545 | ScaCas9- | 69 | 0 |
| | | | | HiFi-Sc++ | | |
| 630 | AGG | ACCTTGATACCAACCTGCCC | 17546 | ScaCas9- | 69 | 0 |
| | | | | Sc++ | | |
| 631 | AGG | ACCTTGATACCAACCTGCCC | 17547 | SpyCas9 | 69 | 0 |
| 632 | AGG | ACCTTGATACCAACCTGCCC | 17548 | SpyCas9- | 69 | 0 |
| | | | | HF1 | | |
| 633 | AGG | ACCTTGATACCAACCTGCCC | 17549 | SpyCas9- | 69 | 0 |
| | | | | SpG | | |
| 634 | AGG | ACCTTGATACCAACCTGCCC | 17550 | SpyCas9- | 69 | 0 |
| | | | | SpRY | | |
| 635 | AG | ACCTTGATACCAACCTGCCC | 17551 | SpyCas9-NG | 69 | 0 |
| 636 | AG | ACCTTGATACCAACCTGCCC | 17552 | SpyCas9- | 69 | 0 |
| | | | | xCas | | |
| 637 | AG | ACCTTGATACCAACCTGCCC | 17553 | SpyCas9- | 69 | 0 |
| | | | | xCas-NG | | |
| 638 | TTT | AGAGCCATCTATTGCTTACA | 17554 | SpyCas9- | 69 | 0 |
| | | | | SpRY | | |
| 639 | AGGGC | gtaaCCTTGATACCAACCTGCCC | 17555 | BlatCas9 | 69 | 0 |
| 640 | TTTGC | ggcaGAGCCATCTATTGCTTACA | 17556 | BlatCas9 | 69 | 0 |
| 641 | CAGGG | tgTAACCTTGATACCAACCTGCC | 17557 | SauCas9 | 70 | 0 |
| 642 | CAGGG | TAACCTTGATACCAACCTGCC | 17558 | SauCas9KKH | 70 | 0 |
| 643 | CAGG | TAACCTTGATACCAACCTGCC | 17559 | SauriCas9 | 70 | 0 |
| 644 | CAGG | TAACCTTGATACCAACCTGCC | 17560 | SauriCas9- | 70 | 0 |
| | | | | KKH | | |
| 645 | CAG | AACCTTGATACCAACCTGCC | 17561 | ScaCas9 | 70 | 0 |
| 646 | CAG | AACCTTGATACCAACCTGCC | 17562 | ScaCas9- | 70 | 0 |
| | | | | HiFi-Sc++ | | |
| 647 | CAG | AACCTTGATACCAACCTGCC | 17563 | ScaCas9- | 70 | 0 |
| | | | | Sc++ | | |
| 648 | CAG | AACCTTGATACCAACCTGCC | 17564 | SpyCas9- | 70 | 0 |
| | | | | SpRY | | |
| 649 | ATT | CAGAGCCATCTATTGCTTAC | 17565 | SpyCas9- | 70 | 0 |
| | | | | SpRY | | |
| 650 | CAGGGC | TAACCTTGATACCAACCTGCC | 17566 | cCas9-v17 | 70 | 0 |
| 651 | CAGGGC | TAACCTTGATACCAACCTGCC | 17567 | cCas9-v42 | 70 | 0 |
| 652 | ATTTGCTT | agggCAGAGCCATCTATTGCTTAC | 17568 | NmeCas9 | 70 | 0 |
| 653 | CCAGG | GTAACCTTGATACCAACCTGC | 17569 | SauCas9KKH | 71 | 0 |
| 654 | CCAG | GTAACCTTGATACCAACCTGC | 17570 | SauriCas9- | 71 | 0 |
| | | | | KKH | | |
| 655 | CAT | GCAGAGCCATCTATTGCTTA | 17571 | SpyCas9- | 71 | 0 |
| | | | | SpRY | | |
| 656 | CCA | TAACCTTGATACCAACCTGC | 17572 | SpyCas9- | 71 | 0 |
| | | | | SpRY | | |
| 657 | CCAGGG | GTAACCTTGATACCAACCTGC | 17573 | cCas9-v17 | 71 | 0 |
| 658 | CCAGGG | GTAACCTTGATACCAACCTGC | 17574 | cCas9-v42 | 71 | 0 |
| 659 | CATT | GCAGAGCCATCTATTGCTTA | 17575 | SpyCas9- | 71 | 0 |
| | | | | 3var-NRTH | | |
| 660 | CCCAG | TGTAACCTTGATACCAACCTG | 17576 | SauCas9KKH | 72 | 0 |
| 661 | CCC | GTAACCTTGATACCAACCTG | 17577 | SpyCas9- | 72 | 0 |
| | | | | SpRY | | |
| 662 | ACA | GGCAGAGCCATCTATTGCTT | 17578 | SpyCas9- | 72 | 0 |
| | | | | SpRY | | |
| 663 | CCCAGG | TGTAACCTTGATACCAACCTG | 17579 | cCas9-v17 | 72 | 0 |
| 664 | CCCAGG | TGTAACCTTGATACCAACCTG | 17580 | cCas9-v42 | 72 | 0 |
| 665 | TAC | GGGCAGAGCCATCTATTGCT | 17581 | SpyCas9- | 73 | 0 |
| | | | | SpRY | | |
| 666 | GCC | TGTAACCTTGATACCAACCT | 17582 | SpyCas9- | 73 | 0 |
| | | | | SpRY | | |
| 667 | TACATT | AGGGCAGAGCCATCTATTGCT | 17583 | cCas9-v16 | 73 | 0 |
| 668 | TACATT | AGGGCAGAGCCATCTATTGCT | 17584 | cCas9-v21 | 73 | 0 |
| 669 | TACA | GGGCAGAGCCATCTATTGCT | 17585 | SpyCas9- | 73 | 0 |
| | | | | 3var-NRCH | | |
| 670 | TTACATT | TCAGGGCAGAGCCATCTATTGC | 17586 | CdiCas9 | 74 | 0 |
| 671 | TTACATT | agtCAGGGCAGAGCCATCTATTGC | 17587 | PpnCas9 | 74 | 0 |
| 672 | TG | TTGTAACCTTGATACCAACC | 17588 | SpyCas9-NG | 74 | 0 |
| 673 | TG | TTGTAACCTTGATACCAACC | 17589 | SpyCas9- | 74 | 0 |
| | | | | xCas | | |
| 674 | TG | TTGTAACCTTGATACCAACC | 17590 | SpyCas9- | 74 | 0 |
| | | | | xCas-NG | | |
| 675 | TGC | TTGTAACCTTGATACCAACC | 17591 | SpyCas9- | 74 | 0 |
| | | | | SpG | | |
| 676 | TGC | TTGTAACCTTGATACCAACC | 17592 | SpyCas9- | 74 | 0 |
| | | | | SpRY | | |
| 677 | TTA | AGGGCAGAGCCATCTATTGC | 17593 | SpyCas9- | 74 | 0 |
| | | | | SpRY | | |
| 678 | TGCCCAGG | gtctTGTAACCTTGATACCAACC | 17594 | BlatCas9 | 74 | 0 |
| 679 | TGCCC | gtctTGTAACCTTGATACCAACC | 17595 | BlatCas9 | 74 | 0 |
| 680 | TGCC | TTGTAACCTTGATACCAACC | 17596 | SpyCas9- | 74 | 0 |
| | | | | 3var-NRCH | | |
| 681 | CTGCCC | ctGTCTTGTAACCTTGATACCAAC | 17597 | Nme2Cas9 | 75 | 0 |
| 682 | CTG | CTTGTAACCTTGATACCAAC | 17598 | ScaCas9 | 75 | 0 |
| 683 | CTG | CTTGTAACCTTGATACCAAC | 17599 | ScaCas9- | 75 | 0 |
| | | | | HiFi-Sc++ | | |
| 684 | CTG | CTTGTAACCTTGATACCAAC | 17600 | ScaCas9- | 75 | 0 |
| | | | | Sc++ | | |
| 685 | CTG | CTTGTAACCTTGATACCAAC | 17601 | SpyCas9- | 75 | 0 |
| | | | | SpRY | | |
| 686 | CTT | CAGGGCAGAGCCATCTATTG | 17602 | SpyCas9- | 75 | 0 |
| | | | | SpRY | | |
| 687 | CTGCCCAG | tgtcTTGTAACCTTGATACCAAC | 17603 | BlatCas9 | 75 | 0 |
| 688 | CTTACATT | agtcAGGGCAGAGCCATCTATTG | 17604 | BlatCas9 | 75 | 0 |
| 689 | CTGCC | tgtcTTGTAACCTTGATACCAAC | 17605 | BlatCas9 | 75 | 0 |
| 690 | CTTAC | agtcAGGGCAGAGCCATCTATTG | 17606 | BlatCas9 | 75 | 0 |
| 691 | CCTGCC | ccTGTCTTGTAACCTTGATACCAA | 17607 | Nme2Cas9 | 76 | 0 |
| 692 | CCT | TCTTGTAACCTTGATACCAA | 17608 | SpyCas9- | 76 | 0 |
| | | | | SpRY | | |
| 693 | GCT | TCAGGGCAGAGCCATCTATT | 17609 | SpyCas9- | 76 | 0 |
| | | | | SpRY | | |
| 694 | CCTGC | ctgtCTTGTAACCTTGATACCAA | 17610 | BlatCas9 | 76 | 0 |
| 695 | TG | GTCAGGGCAGAGCCATCTAT | 17611 | SpyCas9-NG | 77 | 0 |
| 696 | TG | GTCAGGGCAGAGCCATCTAT | 17612 | SpyCas9- | 77 | 0 |
| | | | | xCas | | |
| 697 | TG | GTCAGGGCAGAGCCATCTAT | 17613 | SpyCas9- | 77 | 0 |
| | | | | xCas-NG | | |
| 698 | TGC | GTCAGGGCAGAGCCATCTAT | 17614 | SpyCas9- | 77 | 0 |
| | | | | SpG | | |
| 699 | TGC | GTCAGGGCAGAGCCATCTAT | 17615 | SpyCas9- | 77 | 0 |
| | | | | SpRY | | |
| 700 | ACC | GTCTTGTAACCTTGATACCA | 17616 | SpyCas9- | 77 | 0 |
| | | | | SpRY | | |
| 701 | TGCT | GTCAGGGCAGAGCCATCTAT | 17617 | SpyCas9- | 77 | 0 |
| | | | | 3var-NRCH | | |
| 702 | TTG | AGTCAGGGCAGAGCCATCTA | 17618 | ScaCas9 | 78 | 0 |
| 703 | TTG | AGTCAGGGCAGAGCCATCTA | 17619 | ScaCas9- | 78 | 0 |
| | | | | HiFi-Sc++ | | |
| 704 | TTG | AGTCAGGGCAGAGCCATCTA | 17620 | ScaCas9- | 78 | 0 |
| | | | | Sc++ | | |
| 705 | TTG | AGTCAGGGCAGAGCCATCTA | 17621 | SpyCas9- | 78 | 0 |
| | | | | SpRY | | |
| 706 | AAC | TGTCTTGTAACCTTGATACC | 17622 | SpyCas9- | 78 | 0 |
| | | | | SpRY | | |
| 707 | AACC | TGTCTTGTAACCTTGATACC | 17623 | SpyCas9- | 78 | 0 |
| | | | | 3var-NRCH | | |
| 708 | CAA | CTGTCTTGTAACCTTGATAC | 17624 | SpyCas9- | 79 | 0 |
| | | | | SpRY | | |
| 709 | ATT | AAGTCAGGGCAGAGCCATCT | 17625 | SpyCas9- | 79 | 0 |
| | | | | SpRY | | |
| 710 | ATTGCTTA | taaaAGTCAGGGCAGAGCCATCT | 17626 | BlatCas9 | 79 | 0 |
| 711 | CAACC | aaccTGTCTTGTAACCTTGATAC | 17627 | BlatCas9 | 79 | 0 |
| 712 | ATTGC | taaaAGTCAGGGCAGAGCCATCT | 17628 | BlatCas9 | 79 | 0 |
| 713 | CAAC | CTGTCTTGTAACCTTGATAC | 17629 | SpyCas9- | 79 | 0 |
| | | | | 3var-NRRH | | |
| 714 | CAAC | ccTGTCTTGTAACCTTGATAC | 17630 | iSpyMacCas9 | 79 | 0 |
| 715 | CCAACC | taAACCTGTCTTGTAACCTTGATA | 17631 | Nme2Cas9 | 80 | 0 |
| 716 | TAT | AAAGTCAGGGCAGAGCCATC | 17632 | SpyCas9- | 80 | 0 |
| | | | | SpRY | | |
| 717 | CCA | CCTGTCTTGTAACCTTGATA | 17633 | SpyCas9- | 80 | 0 |
| | | | | SpRY | | |
| 718 | CCAACCTG | aaacCTGTCTTGTAACCTTGATA | 17634 | BlatCas9 | 80 | 0 |
| 719 | CCAAC | aaacCTGTCTTGTAACCTTGATA | 17635 | BlatCas9 | 80 | 0 |
| 720 | CCAACCT | AACCTGTCTTGTAACCTTGATA | 17636 | CdiCas9 | 80 | 0 |
| 721 | TATTGCTT | cataAAAGTCAGGGCAGAGCCATC | 17637 | NmeCas9 | 80 | 0 |
| 722 | TATT | AAAGTCAGGGCAGAGCCATC | 17638 | SpyCas9- | 80 | 0 |
| | | | | 3var-NRTH | | |
| 723 | ACCAA | AACCTGTCTTGTAACCTTGAT | 17639 | SauCas9KKH | 81 | 0 |
| 724 | ACC | ACCTGTCTTGTAACCTTGAT | 17640 | SpyCas9- | 81 | 0 |
| | | | | SpRY | | |
| 725 | CTA | AAAAGTCAGGGCAGAGCCAT | 17641 | SpyCas9- | 81 | 0 |
| | | | | SpRY | | |
| 726 | ACCAAC | AACCTGTCTTGTAACCTTGAT | 17642 | cCas9-v17 | 81 | 0 |
| 727 | ACCAAC | AACCTGTCTTGTAACCTTGAT | 17643 | cCas9-v42 | 81 | 0 |
| 728 | TAC | AACCTGTCTTGTAACCTTGA | 17644 | SpyCas9- | 82 | 0 |
| | | | | SpRY | | |
| 729 | TCT | TAAAAGTCAGGGCAGAGCCA | 17645 | SpyCas9- | 82 | 0 |
| | | | | SpRY | | |
| 730 | TACC | AACCTGTCTTGTAACCTTGA | 17646 | SpyCas9- | 82 | 0 |
| | | | | 3var-NRCH | | |
| 731 | ATCTATT | gggCATAAAAGTCAGGGCAGAGCC | 17647 | PpnCas9 | 83 | 0 |
| 732 | ATA | AAACCTGTCTTGTAACCTTG | 17648 | SpyCas9- | 83 | 0 |
| | | | | SpRY | | |
| 733 | ATC | ATAAAAGTCAGGGCAGAGCC | 17649 | SpyCas9- | 83 | 0 |
| | | | | SpRY | | |
| 734 | ATACC | cttaAACCTGTCTTGTAACCTTG | 17650 | BlatCas9 | 83 | 0 |
| 735 | GATACC | tcCTTAAACCTGTCTTGTAACCTT | 17651 | Nme2Cas9 | 84 | 0 |
| 736 | GAT | TAAACCTGTCTTGTAACCTT | 17652 | SpyCas9- | 84 | 0 |
| | | | | SpRY | | |
| 737 | GAT | TAAACCTGTCTTGTAACCTT | 17653 | SpyCas9- | 84 | 0 |
| | | | | xCas | | |
| 738 | CAT | CATAAAAGTCAGGGCAGAGC | 17654 | SpyCas9- | 84 | 0 |
| | | | | SpRY | | |
| 739 | GATACCAA | ccttAAACCTGTCTTGTAACCTT | 17655 | BlatCas9 | 84 | 0 |
| 740 | GATACCAA | ccttAAACCTGTCTTGTAACCTT | 17656 | BlatCas9 | 84 | 0 |
| 741 | GATAC | ccttAAACCTGTCTTGTAACCTT | 17657 | BlatCas9 | 84 | 0 |
| 742 | GATA | TAAACCTGTCTTGTAACCTT | 17658 | SpyCas9- | 84 | 0 |
| | | | | 3var-NRTH | | |
| 743 | CATC | CATAAAAGTCAGGGCAGAGC | 17659 | SpyCas9- | 84 | 0 |
| | | | | 3var-NRTH | | |
| 744 | TG | TTAAACCTGTCTTGTAACCT | 17660 | SpyCas9-NG | 85 | 0 |
| 745 | TG | TTAAACCTGTCTTGTAACCT | 17661 | SpyCas9- | 85 | 0 |
| | | | | xCas | | |
| 746 | TG | TTAAACCTGTCTTGTAACCT | 17662 | SpyCas9- | 85 | 0 |
| | | | | xCas-NG | | |
| 747 | TGA | TTAAACCTGTCTTGTAACCT | 17663 | SpyCas9- | 85 | 0 |
| | | | | SpG | | |
| 748 | TGA | TTAAACCTGTCTTGTAACCT | 17664 | SpyCas9- | 85 | 0 |
| | | | | SpRY | | |
| 749 | CCA | GCATAAAAGTCAGGGCAGAG | 17665 | SpyCas9- | 85 | 0 |
| | | | | SpRY | | |
| 750 | CCATCTAT | tgggCATAAAAGTCAGGGCAGAG | 17666 | BlatCas9 | 85 | 0 |
| 751 | CCATC | tgggCATAAAAGTCAGGGCAGAG | 17667 | BlatCas9 | 85 | 0 |
| 752 | TGATACC | CCTTAAACCTGTCTTGTAACCT | 17668 | CdiCas9 | 85 | 0 |
| 753 | TGAT | TTAAACCTGTCTTGTAACCT | 17669 | SpyCas9- | 85 | 0 |
| | | | | 3var-NRRH | | |
| 754 | TGAT | TTAAACCTGTCTTGTAACCT | 17670 | SpyCas9- | 85 | 0 |
| | | | | VQR | | |
| 755 | TTG | CTTAAACCTGTCTTGTAACC | 17671 | ScaCas9 | 86 | 0 |
| 756 | TTG | CTTAAACCTGTCTTGTAACC | 17672 | ScaCas9- | 86 | 0 |
| | | | | HiFi-Sc++ | | |
| 757 | TTG | CTTAAACCTGTCTTGTAACC | 17673 | ScaCas9- | 86 | 0 |
| | | | | Sc++ | | |
| 758 | TTG | CTTAAACCTGTCTTGTAACC | 17674 | SpyCas9- | 86 | 0 |
| | | | | SpRY | | |
| 759 | GCC | GGCATAAAAGTCAGGGCAGA | 17675 | SpyCas9- | 86 | 0 |
| | | | | SpRY | | |
| 760 | TTGATAC | TCCTTAAACCTGTCTTGTAACC | 17676 | CdiCas9 | 86 | 0 |
| 761 | CTTGA | TCCTTAAACCTGTCTTGTAAC | 17677 | SauCas9KKH | 87 | 0 |
| 762 | CTTGAT | TCCTTAAACCTGTCTTGTAAC | 17678 | SauCas9KKH | 87 | 0 |
| 763 | AG | GGGCATAAAAGTCAGGGCAG | 17679 | SpyCas9-NG | 87 | 0 |
| 764 | AG | GGGCATAAAAGTCAGGGCAG | 17680 | SpyCas9- | 87 | 0 |
| | | | | xCas | | |
| 765 | AG | GGGCATAAAAGTCAGGGCAG | 17681 | SpyCas9- | 87 | 0 |
| | | | | xCas-NG | | |
| 766 | AGC | GGGCATAAAAGTCAGGGCAG | 17682 | SpyCas9- | 87 | 0 |
| | | | | SpG | | |
| 767 | AGC | GGGCATAAAAGTCAGGGCAG | 17683 | SpyCas9- | 87 | 0 |
| | | | | SpRY | | |
| 768 | CTT | CCTTAAACCTGTCTTGTAAC | 17684 | SpyCas9- | 87 | 0 |
| | | | | SpRY | | |
| 769 | CTTGATAC | tcTCCTTAAACCTGTCTTGTAAC | 17685 | CjeCas9 | 87 | 0 |
| 770 | AGCC | GGGCATAAAAGTCAGGGCAG | 17686 | SpyCas9- | 87 | 0 |
| | | | | 3var-NRCH | | |
| 771 | GAG | TGGGCATAAAAGTCAGGGCA | 17687 | ScaCas9 | 88 | 0 |
| 772 | GAG | TGGGCATAAAAGTCAGGGCA | 17688 | ScaCas9- | 88 | 0 |
| | | | | HiFi-Sc++ | | |
| 773 | GAG | TGGGCATAAAAGTCAGGGCA | 17689 | ScaCas9- | 88 | 0 |
| | | | | Sc++ | | |
| 774 | GAG | TGGGCATAAAAGTCAGGGCA | 17690 | SpyCas9- | 88 | 0 |
| | | | | SpRY | | |
| 775 | CCT | TCCTTAAACCTGTCTTGTAA | 17691 | SpyCas9- | 88 | 0 |
| | | | | SpRY | | |
| 776 | GAGCC | ggctGGGCATAAAAGTCAGGGCA | 17692 | BlatCas9 | 88 | 0 |
| 777 | GAGCCAT | GCTGGGCATAAAAGTCAGGGCA | 17693 | CdiCas9 | 88 | 0 |
| 778 | CCTTGATA | ggtcTCCTTAAACCTGTCTTGTAA | 17694 | NmeCas9 | 88 | 0 |
| 779 | GAGC | TGGGCATAAAAGTCAGGGCA | 17695 | SpyCas9- | 88 | 0 |
| | | | | 3var-NRRH | | |
| 780 | AGAGCC | agGGCTGGGCATAAAAGTCAGGGC | 17696 | Nme2Cas9 | 89 | 0 |
| 781 | AGAG | GCTGGGCATAAAAGTCAGGGC | 17697 | SauriCas9- | 89 | 0 |
| | | | | KKH | | |
| 782 | AGAG | CTGGGCATAAAAGTCAGGGC | 17698 | SpyCas9- | 89 | 0 |
| | | | | VQR | | |
| 783 | AG | CTGGGCATAAAAGTCAGGGC | 17699 | SpyCas9-NG | 89 | 0 |
| 784 | AG | CTGGGCATAAAAGTCAGGGC | 17700 | SpyCas9- | 89 | 0 |
| | | | | xCas | | |
| 785 | AG | CTGGGCATAAAAGTCAGGGC | 17701 | SpyCas9- | 89 | 0 |
| | | | | xCas-NG | | |
| 786 | AGA | CTGGGCATAAAAGTCAGGGC | 17702 | SpyCas9- | 89 | 0 |
| | | | | SpG | | |
| 787 | AGA | CTGGGCATAAAAGTCAGGGC | 17703 | SpyCas9- | 89 | 0 |
| | | | | SpRY | | |
| 788 | ACC | CTCCTTAAACCTGTCTTGTA | 17704 | SpyCas9- | 89 | 0 |
| | | | | SpRY | | |
| 789 | AGAGCCAT | gggcTGGGCATAAAAGTCAGGGC | 17705 | BlatCas9 | 89 | 0 |
| 790 | AGAGC | gggcTGGGCATAAAAGTCAGGGC | 17706 | BlatCas9 | 89 | 0 |
| 791 | CAGAG | agGGCTGGGCATAAAAGTCAGGG | 17707 | SauCas9 | 90 | 0 |
| 792 | CAGAG | GGCTGGGCATAAAAGTCAGGG | 17708 | SauCas9KKH | 90 | 0 |
| 793 | CAG | GCTGGGCATAAAAGTCAGGG | 17709 | ScaCas9 | 90 | 0 |
| 794 | CAG | GCTGGGCATAAAAGTCAGGG | 17710 | ScaCas9- | 90 | 0 |
| | | | | HiFi-Sc++ | | |
| 795 | CAG | GCTGGGCATAAAAGTCAGGG | 17711 | ScaCas9- | 90 | 0 |
| | | | | Sc++ | | |
| 796 | CAG | GCTGGGCATAAAAGTCAGGG | 17712 | SpyCas9- | 90 | 0 |
| | | | | SpRY | | |
| 797 | AAC | TCTCCTTAAACCTGTCTTGT | 17713 | SpyCas9- | 90 | 0 |
| | | | | SpRY | | |
| 798 | CAGAGC | GGCTGGGCATAAAAGTCAGGG | 17714 | cCas9-v17 | 90 | 0 |
| 799 | CAGAGC | GGCTGGGCATAAAAGTCAGGG | 17715 | cCas9-v42 | 90 | 0 |
| 800 | CAGA | GCTGGGCATAAAAGTCAGGG | 17716 | SpyCas9- | 90 | 0 |
| | | | | 3var-NRRH | | |
| 801 | AACC | TCTCCTTAAACCTGTCTTGT | 17717 | SpyCas9- | 90 | 0 |
| | | | | 3var-NRCH | | |
| 802 | GCAGA | GGGCTGGGCATAAAAGTCAGG | 17718 | SauCas9KKH | 91 | 0 |
| 803 | GCAG | GGGCTGGGCATAAAAGTCAGG | 17719 | SauriCas9- | 91 | 0 |
| | | | | KKH | | |
| 804 | TAA | GTCTCCTTAAACCTGTCTTG | 17720 | SpyCas9- | 91 | 0 |
| | | | | SpRY | | |
| 805 | GCA | GGCTGGGCATAAAAGTCAGG | 17721 | SpyCas9- | 91 | 0 |
| | | | | SpRY | | |
| 806 | TAACCTTG | ttggTCTCCTTAAACCTGTCTTG | 17722 | BlatCas9 | 91 | 0 |
| 807 | TAACC | ttggTCTCCTTAAACCTGTCTTG | 17723 | BlatCas9 | 91 | 0 |
| 808 | GCAGAG | GGGCTGGGCATAAAAGTCAGG | 17724 | cCas9-v17 | 91 | 0 |
| 809 | GCAGAG | GGGCTGGGCATAAAAGTCAGG | 17725 | cCas9-v42 | 91 | 0 |
| 810 | TAACCTT | TGGTCTCCTTAAACCTGTCTTG | 17726 | CdiCas9 | 91 | 0 |
| 811 | TAAC | GTCTCCTTAAACCTGTCTTG | 17727 | SpyCas9- | 91 | 0 |
| | | | | 3var-NRRH | | |
| 812 | TAAC | ggTCTCCTTAAACCTGTCTTG | 17728 | iSpyMacCas9 | 91 | 0 |
| 813 | GTAACC | taTTGGTCTCCTTAAACCTGTCTT | 17729 | Nme2Cas9 | 92 | 0 |
| 814 | GGCAG | AGGGCTGGGCATAAAAGTCAG | 17730 | SauCas9KKH | 92 | 0 |
| 815 | GG | GGGCTGGGCATAAAAGTCAG | 17731 | SpyCas9-NG | 92 | 0 |
| 816 | GG | GGGCTGGGCATAAAAGTCAG | 17732 | SpyCas9- | 92 | 0 |
| | | | | xCas | | |
| 817 | GG | GGGCTGGGCATAAAAGTCAG | 17733 | SpyCas9- | 92 | 0 |
| | | | | xCas-NG | | |
| 818 | GGC | GGGCTGGGCATAAAAGTCAG | 17734 | SpyCas9- | 92 | 0 |
| | | | | SpG | | |
| 819 | GGC | GGGCTGGGCATAAAAGTCAG | 17735 | SpyCas9- | 92 | 0 |
| | | | | SpRY | | |
| 820 | GTA | GGTCTCCTTAAACCTGTCTT | 17736 | SpyCas9- | 92 | 0 |
| | | | | SpRY | | |
| 821 | GTAACCTT | attgGTCTCCTTAAACCTGTCTT | 17737 | BlatCas9 | 92 | 0 |
| 822 | GTAAC | attgGTCTCCTTAAACCTGTCTT | 17738 | BlatCas9 | 92 | 0 |
| 823 | GGCAGA | AGGGCTGGGCATAAAAGTCAG | 17739 | cCas9-v17 | 92 | 0 |
| 824 | GGCAGA | AGGGCTGGGCATAAAAGTCAG | 17740 | cCas9-v42 | 92 | 0 |
| 825 | GTAACCT | TTGGTCTCCTTAAACCTGTCTT | 17741 | CdiCas9 | 92 | 0 |
| 826 | GGCA | GGGCTGGGCATAAAAGTCAG | 17742 | SpyCas9- | 92 | 0 |
| | | | | 3var-NRCH | | |
| 827 | TGTAA | TTGGTCTCCTTAAACCTGTCT | 17743 | SauCas9KKH | 93 | 0 |
| 828 | GGG | AGGGCTGGGCATAAAAGTCA | 17744 | ScaCas9 | 93 | 0 |
| 829 | GGG | AGGGCTGGGCATAAAAGTCA | 17745 | ScaCas9- | 93 | 0 |
| | | | | HiFi-Sc++ | | |
| 830 | GGG | AGGGCTGGGCATAAAAGTCA | 17746 | ScaCas9- | 93 | 0 |
| | | | | Sc++ | | |
| 831 | GGG | AGGGCTGGGCATAAAAGTCA | 17747 | SpyCas9 | 93 | 0 |
| 832 | GGG | AGGGCTGGGCATAAAAGTCA | 17748 | SpyCas9- | 93 | 0 |
| | | | | HF1 | | |
| 833 | GGG | AGGGCTGGGCATAAAAGTCA | 17749 | SpyCas9- | 93 | 0 |
| | | | | SpG | | |
| 834 | GGG | AGGGCTGGGCATAAAAGTCA | 17750 | SpyCas9- | 93 | 0 |
| | | | | SpRY | | |
| 835 | TG | TGGTCTCCTTAAACCTGTCT | 17751 | SpyCas9-NG | 93 | 0 |
| 836 | TG | TGGTCTCCTTAAACCTGTCT | 17752 | SpyCas9- | 93 | 0 |
| | | | | xCas | | |
| 837 | TG | TGGTCTCCTTAAACCTGTCT | 17753 | SpyCas9- | 93 | 0 |
| | | | | xCas-NG | | |
| 838 | GG | AGGGCTGGGCATAAAAGTCA | 17754 | SpyCas9-NG | 93 | 0 |
| 839 | GG | AGGGCTGGGCATAAAAGTCA | 17755 | SpyCas9- | 93 | 0 |
| | | | | xCas | | |
| 840 | GG | AGGGCTGGGCATAAAAGTCA | 17756 | SpyCas9- | 93 | 0 |
| | | | | xCas-NG | | |
| 841 | TGT | TGGTCTCCTTAAACCTGTCT | 17757 | SpyCas9- | 93 | 0 |
| | | | | SpG | | |
| 842 | TGT | TGGTCTCCTTAAACCTGTCT | 17758 | SpyCas9- | 93 | 0 |
| | | | | SpRY | | |
| 843 | GGGC | AGGGCTGGGCATAAAAGTCA | 17759 | SpyCas9- | 93 | 0 |
| | | | | 3var-NRRH | | |
| 844 | TGTA | TGGTCTCCTTAAACCTGTCT | 17760 | SpyCas9- | 93 | 0 |
| | | | | 3var-NRTH | | |
| 845 | AGGG | CCAGGGCTGGGCATAAAAGTC | 17761 | SauriCas9 | 94 | 0 |
| 846 | AGGG | CCAGGGCTGGGCATAAAAGTC | 17762 | SauriCas9- | 94 | 0 |
| | | | | KKH | | |
| 847 | TTG | TTGGTCTCCTTAAACCTGTC | 17763 | ScaCas9 | 94 | 0 |
| 848 | TTG | TTGGTCTCCTTAAACCTGTC | 17764 | ScaCas9- | 94 | 0 |
| | | | | HiFi-Sc++ | | |
| 849 | TTG | TTGGTCTCCTTAAACCTGTC | 17765 | ScaCas9- | 94 | 0 |
| | | | | Sc++ | | |
| 850 | TTG | TTGGTCTCCTTAAACCTGTC | 17766 | SpyCas9- | 94 | 0 |
| | | | | SpRY | | |
| 851 | AGG | CAGGGCTGGGCATAAAAGTC | 17767 | ScaCas9 | 94 | 0 |
| 852 | AGG | CAGGGCTGGGCATAAAAGTC | 17768 | ScaCas9- | 94 | 0 |
| | | | | HiFi-Sc++ | | |
| 853 | AGG | CAGGGCTGGGCATAAAAGTC | 17769 | ScaCas9- | 94 | 0 |
| | | | | Sc++ | | |
| 854 | AGG | CAGGGCTGGGCATAAAAGTC | 17770 | SpyCas9 | 94 | 0 |
| 855 | AGG | CAGGGCTGGGCATAAAAGTC | 17771 | SpyCas9- | 94 | 0 |
| | | | | HF1 | | |
| 856 | AGG | CAGGGCTGGGCATAAAAGTC | 17772 | SpyCas9- | 94 | 0 |
| | | | | SpG | | |
| 857 | AGG | CAGGGCTGGGCATAAAAGTC | 17773 | SpyCas9- | 94 | 0 |
| | | | | SpRY | | |
| 858 | AG | CAGGGCTGGGCATAAAAGTC | 17774 | SpyCas9-NG | 94 | 0 |
| 859 | AG | CAGGGCTGGGCATAAAAGTC | 17775 | SpyCas9- | 94 | 0 |
| | | | | xCas | | |
| 860 | AG | CAGGGCTGGGCATAAAAGTC | 17776 | SpyCas9- | 94 | 0 |
| | | | | xCas-NG | | |
| 861 | AGGGCAGA | agccAGGGCTGGGCATAAAAGTC | 17777 | BlatCas9 | 94 | 0 |
| 862 | AGGGC | agccAGGGCTGGGCATAAAAGTC | 17778 | BlatCas9 | 94 | 0 |
| 863 | TTGTAAC | TATTGGTCTCCTTAAACCTGTC | 17779 | CdiCas9 | 94 | 0 |
| 864 | CAGGG | gaGCCAGGGCTGGGCATAAAAGT | 17780 | SauCas9 | 95 | 0 |
| 865 | CAGGG | GCCAGGGCTGGGCATAAAAGT | 17781 | SauCas9KKH | 95 | 0 |
| 866 | CAGG | GCCAGGGCTGGGCATAAAAGT | 17782 | SauriCas9 | 95 | 0 |
| 867 | CAGG | GCCAGGGCTGGGCATAAAAGT | 17783 | SauriCas9- | 95 | 0 |
| | | | | KKH | | |
| 868 | CAG | CCAGGGCTGGGCATAAAAGT | 17784 | ScaCas9 | 95 | 0 |
| 869 | CAG | CCAGGGCTGGGCATAAAAGT | 17785 | ScaCas9- | 95 | 0 |
| | | | | HiFi-Sc++ | | |
| 870 | CAG | CCAGGGCTGGGCATAAAAGT | 17786 | ScaCas9- | 95 | 0 |
| | | | | Sc++ | | |
| 871 | CAG | CCAGGGCTGGGCATAAAAGT | 17787 | SpyCas9- | 95 | 0 |
| | | | | SpRY | | |
| 872 | CTT | ATTGGTCTCCTTAAACCTGT | 17788 | SpyCas9- | 95 | 0 |
| | | | | SpRY | | |
| 873 | CAGGGC | GCCAGGGCTGGGCATAAAAGT | 17789 | cCas9-v17 | 95 | 0 |
| 874 | CAGGGC | GCCAGGGCTGGGCATAAAAGT | 17790 | cCas9-v42 | 95 | 0 |
| 875 | TCAGG | AGCCAGGGCTGGGCATAAAAG | 17791 | SauCas9KKH | 96 | 0 |
| 876 | TCAG | AGCCAGGGCTGGGCATAAAAG | 17792 | SauriCas9- | 96 | 0 |
| | | | | KKH | | |
| 877 | TCT | TATTGGTCTCCTTAAACCTG | 17793 | SpyCas9- | 96 | 0 |
| | | | | SpRY | | |
| 878 | TCA | GCCAGGGCTGGGCATAAAAG | 17794 | SpyCas9- | 96 | 0 |
| | | | | SpRY | | |
| 879 | TCAGGG | AGCCAGGGCTGGGCATAAAAG | 17795 | cCas9-v17 | 96 | 0 |
| 880 | TCAGGG | AGCCAGGGCTGGGCATAAAAG | 17796 | cCas9-v42 | 96 | 0 |
| 881 | GTCAG | GAGCCAGGGCTGGGCATAAAA | 17797 | SauCas9KKH | 97 | 0 |
| 882 | GTC | CTATTGGTCTCCTTAAACCT | 17798 | SpyCas9- | 97 | 0 |
| | | | | SpRY | | |
| 883 | GTC | AGCCAGGGCTGGGCATAAAA | 17799 | SpyCas9- | 97 | 0 |
| | | | | SpRY | | |
| 884 | GTCAGG | GAGCCAGGGCTGGGCATAAAA | 17800 | cCas9-v17 | 97 | 0 |
| 885 | GTCAGG | GAGCCAGGGCTGGGCATAAAA | 17801 | cCas9-v42 | 97 | 0 |
| 886 | TG | TCTATTGGTCTCCTTAAACC | 17802 | SpyCas9-NG | 98 | 0 |
| 887 | TG | TCTATTGGTCTCCTTAAACC | 17803 | SpyCas9- | 98 | 0 |
| | | | | xCas | | |
| 888 | TG | TCTATTGGTCTCCTTAAACC | 17804 | SpyCas9- | 98 | 0 |
| | | | | xCas-NG | | |
| 889 | AG | GAGCCAGGGCTGGGCATAAA | 17805 | SpyCas9-NG | 98 | 0 |
| 890 | AG | GAGCCAGGGCTGGGCATAAA | 17806 | SpyCas9- | 98 | 0 |
| | | | | xCas | | |
| 891 | AG | GAGCCAGGGCTGGGCATAAA | 17807 | SpyCas9- | 98 | 0 |
| | | | | xCas-NG | | |
| 892 | TGT | TCTATTGGTCTCCTTAAACC | 17808 | SpyCas9- | 98 | 0 |
| | | | | SpG | | |
| 893 | TGT | TCTATTGGTCTCCTTAAACC | 17809 | SpyCas9- | 98 | 0 |
| | | | | SpRY | | |
| 894 | AGT | GAGCCAGGGCTGGGCATAAA | 17810 | SpyCas9- | 98 | 0 |
| | | | | SpG | | |
| 895 | AGT | GAGCCAGGGCTGGGCATAAA | 17811 | SpyCas9- | 98 | 0 |
| | | | | SpRY | | |
| 896 | TGTC | TCTATTGGTCTCCTTAAACC | 17812 | SpyCas9- | 98 | 0 |
| | | | | 3var-NRTH | | |
| 897 | AGTC | GAGCCAGGGCTGGGCATAAA | 17813 | SpyCas9- | 98 | 0 |
| | | | | 3var-NRTH | | |
| 898 | CTG | TTCTATTGGTCTCCTTAAAC | 17814 | ScaCas9 | 99 | 0 |
| 899 | CTG | TTCTATTGGTCTCCTTAAAC | 17815 | ScaCas9- | 99 | 0 |
| | | | | HiFi-Sc++ | | |
| 900 | CTG | TTCTATTGGTCTCCTTAAAC | 17816 | ScaCas9- | 99 | 0 |
| | | | | Sc++ | | |
| 901 | CTG | TTCTATTGGTCTCCTTAAAC | 17817 | SpyCas9- | 99 | 0 |
| | | | | SpRY | | |
| 902 | AAG | GGAGCCAGGGCTGGGCATAA | 17818 | ScaCas9 | 99 | 0 |
| 903 | AAG | GGAGCCAGGGCTGGGCATAA | 17819 | ScaCas9- | 99 | 0 |
| | | | | HiFi-Sc++ | | |
| 904 | AAG | GGAGCCAGGGCTGGGCATAA | 17820 | ScaCas9- | 99 | 0 |
| | | | | Sc++ | | |
| 905 | AAG | GGAGCCAGGGCTGGGCATAA | 17821 | SpyCas9- | 99 | 0 |
| | | | | SpRY | | |
| 906 | CTGTCTTG | agttTCTATTGGTCTCCTTAAAC | 17822 | BlatCas9 | 99 | 0 |
| 907 | AAGTCAGG | gcagGAGCCAGGGCTGGGCATAA | 17823 | BlatCas9 | 99 | 0 |
| 908 | CTGTC | agttTCTATTGGTCTCCTTAAAC | 17824 | BlatCas9 | 99 | 0 |
| 909 | AAGTC | gcagGAGCCAGGGCTGGGCATAA | 17825 | BlatCas9 | 99 | 0 |
| 910 | CTGTCTT | GTTTCTATTGGTCTCCTTAAAC | 17826 | CdiCas9 | 99 | 0 |
| 911 | AAGT | GGAGCCAGGGCTGGGCATAA | 17827 | SpyCas9- | 99 | 0 |
| | | | | 3var-NRRH | | |
| 912 | AAAG | CAGGAGCCAGGGCTGGGCATA | 17828 | SauriCas9- | 100 | 0 |
| | | | | KKH | | |
| 913 | AAAG | AGGAGCCAGGGCTGGGCATA | 17829 | SpyCas9- | 100 | 0 |
| | | | | QQR1 | | |
| 914 | AAAG | caGGAGCCAGGGCTGGGCATA | 17830 | iSpyMacCas9 | 100 | 0 |
| 915 | AAA | AGGAGCCAGGGCTGGGCATA | 17831 | SpyCas9- | 100 | 0 |
| | | | | SpRY | | |
| 916 | CCT | TTTCTATTGGTCTCCTTAAA | 17832 | SpyCas9- | 100 | 0 |
| | | | | SpRY | | |

In the exemplary template sequences provided herein, capital letters indicate “core nucleotides” while lower case letters indicate “flanking nucleotides.” Herein, when an RNA sequence (e.g., a template RNA sequence) is said to comprise a particular sequence (e.g., a sequence of Table 1 or a portion thereof) that comprises thymine (T), it is of course understood that the RNA sequence may (and frequently does) comprise uracil (U) in place of T. For instance, the RNA sequence may comprise U at every position shown as T in the sequence in Table 1. More specifically, the present disclosure provides an RNA sequence according to every gRNA spacer sequence shown in Table 1, wherein the RNA sequence has a U in place of each T in the sequence in Table 1.

[0595] In some embodiments of the systems and methods herein, the heterologous object sequence comprises the core nucleotides of an RT template sequence from Table 3. In some embodiments, the heterologous object sequence additionally comprises one or more (e.g., 2, 3, 4, 5, 10, 20, 30, 40, or all) consecutive nucleotides starting with the 3′ end of the flanking nucleotides of the RT template sequence. In some embodiments, the heterologous object sequence comprises the core nucleotides of the RT template sequence of Table 3 that corresponds to the gRNA spacer sequence. In the context of the sequence tables, a first component “corresponds to” a second component when both components have the same ID number in the referenced table. For example, for a gRNA spacer of ID #1, the corresponding RT template would be the RT template also having ID #1. In some embodiments, the heterologous object sequence additionally comprises one or more consecutive nucleotides starting with the 3′ end of the flanking nucleotides of the RT template sequence.

[0596] In some embodiments, the primer binding site (PBS) sequence has a sequence comprising the core nucleotides of a PBS sequence from the same row of Table 3 as the RT template sequence. In some embodiments, the PBS sequence additionally comprises one or more (e.g., 1, 2, 3, 4, 5, 6, 7, or all) consecutive nucleotides starting with the 5′ end of the flanking nucleotides of the primer region.

### Table 3: Exemplary RT Sequence (Heterologous Object Sequence) and PBS Sequence Pairs

[0597] Table 3 provides exemplified PBS sequences and heterologous object sequences (reverse transcription template regions) of a template RNA for correcting the pathogenic EV6 mutation in HBB. The gRNA spacers from Table 1 were filtered, e.g., filtered by occurrence within 15 nt of the desired editing location and use of a Tier 1 Cas enzyme. PBS sequences and heterologous object sequences (reverse transcription template regions) were designed relative to the nick site directed by the cognate gRNA from Table 1, as described in this application. For exemplification, these regions were designed to be 8-17 nt (priming) and 1-50 nt extended beyond the location of the edit (RT). Without wishing to be limited by example, given variability of length, sequences are provided that use the maximum length parameters and comprise all templates of shorter length within the given parameters. Sequences are shown with uppercase letters indicating core sequence and lowercase letters indicating flanking sequence that may be truncated within the described length parameters.

| | | SEQ | | SEQ |
|---|---|---|---|---|
| | | ID | | ID |
| ID | RT Template Sequence | NO | PBS Sequence | NO |
| 1 | cttcatccacgttcaccttgcccca | 17833 | CAGGAGTCagatgcacc | 18010 |
| | cagggcagtaacggcagacttctcC | | | |
| | T | | | |
| 2 | cttcatccacgttcaccttgcccca | 17834 | CAGGAGTCagatgcacc | 18011 |
| | cagggcagtaacggcagacttctcC | | | |
| | T | | | |
| 5 | cttcatccacgttcaccttgcccca | 17835 | CAGGAGTCagatgcacc | 18012 |
| | cagggcagtaacggcagacttctcC | | | |
| | T | | | |
| 9 | cttcatccacgttcaccttgcccca | 17836 | CAGGAGTCagatgcacc | 18013 |
| | cagggcagtaacggcagacttctcC | | | |
| | T | | | |
| 13 | cttcatccacgttcaccttgcccca | 17837 | AGGAGTCAgatgcacca | 18014 |
| | cagggcagtaacggcagacttctcC | | | |
| | TC | | | |
| 14 | cttcatccacgttcaccttgcccca | 17838 | AGGAGTCAgatgcacca | 18015 |
| | cagggcagtaacggcagacttctcC | | | |
| | TC | | | |
| 15 | ctgtgttcactagcaacctcaaaca | 17839 | GAGAAGTCtgccgttac | 18016 |
| | gacaccatggtgcatctgactcctG | | | |
| | AG | | | |
| 16 | ctgtgttcactagcaacctcaaaca | 17840 | GAGAAGTCtgccgttac | 18017 |
| | gacaccatggtgcatctgactcctG | | | |
| | AG | | | |
| 17 | ctgtgttcactagcaacctcaaaca | 17841 | GAGAAGTCtgccgttac | 18018 |
| | gacaccatggtgcatctgactcctG | | | |
| | AG | | | |
| 18 | ctgtgttcactagcaacctcaaaca | 17842 | GAGAAGTCtgccgttac | 18019 |
| | gacaccatggtgcatctgactcctG | | | |
| | AG | | | |
| 23 | cttcatccacgttcaccttgcccca | 17843 | AGGAGTCAgatgcacca | 18020 |
| | cagggcagtaacggcagacttctcC | | | |
| | TC | | | |
| 24 | cttcatccacgttcaccttgcccca | 17844 | AGGAGTCAgatgcacca | 18021 |
| | cagggcagtaacggcagacttctcC | | | |
| | TC | | | |
| 27 | ctgtgttcactagcaacctcaaaca | 17845 | GAGAAGTCtgccgttac | 18022 |
| | gacaccatggtgcatctgactcctG | | | |
| | AG | | | |
| 28 | ctgtgttcactagcaacctcaaaca | 17846 | GAGAAGTCtgccgttac | 18023 |
| | gacaccatggtgcatctgactcctG | | | |
| | AG | | | |
| 31 | ctgtgttcactagcaacctcaaaca | 17847 | GAGAAGTCtgccgttac | 18024 |
| | gacaccatggtgcatctgactcctG | | | |
| | AG | | | |
| 32 | ctgtgttcactagcaacctcaaaca | 17848 | GAGAAGTCtgccgttac | 18025 |
| | gacaccatggtgcatctgactcctG | | | |
| | AG | | | |
| 39 | ctgtgttcactagcaacctcaaaca | 17849 | AGAAGTCTgccgttact | 18026 |
| | gacaccatggtgcatctgactcctG | | | |
| | AGG | | | |
| 40 | ctgtgttcactagcaacctcaaaca | 17850 | AGAAGTCTgccgttact | 18027 |
| | gacaccatggtgcatctgactectG | | | |
| | AGG | | | |
| 41 | cttcatccacgttcaccttgcccca | 17851 | GGAGTCAGatgcaccat | 18028 |
| | cagggcagtaacggcagacttctcC | | | |
| | TCA | | | |
| 42 | ctgtgttcactagcaacctcaaaca | 17852 | AGAAGTCTgccgttact | 18029 |
| | gacaccatggtgcatctgactectG | | | |
| | AGG | | | |
| 43 | ctgtgttcactagcaacctcaaaca | 17853 | AGAAGTCTgccgttact | 18030 |
| | gacaccatggtgcatctgactcctG | | | |
| | AGG | | | |
| 44 | cttcatccacgttcaccttgcccca | 17854 | GGAGTCAGatgcaccat | 18031 |
| | cagggcagtaacggcagacttctcC | | | |
| | TCA | | | |
| 48 | ctgtgttcactagcaacctcaaaca | 17855 | AGAAGTCTgccgttact | 18032 |
| | gacaccatggtgcatctgactcctG | | | |
| | AGG | | | |
| 49 | ctgtgttcactagcaacctcaaaca | 17856 | AGAAGTCTgccgttact | 18033 |
| | gacaccatggtgcatctgactcctG | | | |
| | AGG | | | |
| 50 | cttcatccacgttcaccttgcccca | 17857 | GGAGTCAGatgcaccat | 18034 |
| | cagggcagtaacggcagacttctcC | | | |
| | TCA | | | |
| 54 | cttcatccacgttcaccttgcccca | 17858 | GGAGTCAGatgcaccat | 18035 |
| | cagggcagtaacggcagacttctcC | | | |
| | TCA | | | |
| 59 | cttcatccacgttcaccttgcccca | 17859 | GAGTCAGAtgcaccatg | 18036 |
| | cagggcagtaacggcagacttctcC | | | |
| | TCAG | | | |
| 60 | cttcatccacgttcaccttgcccca | 17860 | GAGTCAGAtgcaccatg | 18037 |
| | cagggcagtaacggcagacttctcC | | | |
| | TCAG | | | |
| 61 | ctgtgttcactagcaacctcaaaca | 17861 | GAAGTCTGccgttactg | 18038 |
| | gacaccatggtgcatctgactcctG | | | |
| | AGGA | | | |
| 62 | ctgtgttcactagcaacctcaaaca | 17862 | GAAGTCTGccgttactg | 18039 |
| | gacaccatggtgcatctgactcctG | | | |
| | AGGA | | | |
| 65 | cttcatccacgttcaccttgcccca | 17863 | GAGTCAGAtgcaccatg | 18040 |
| | cagggcagtaacggcagacttctcC | | | |
| | TCAG | | | |
| 66 | cttcatccacgttcaccttgcccca | 17864 | GAGTCAGAtgcaccatg | 18041 |
| | cagggcagtaacggcagacttctcC | | | |
| | TCAG | | | |
| 69 | cttcatccacgttcaccttgcccca | 17865 | GAGTCAGAtgcaccatg | 18042 |
| | cagggcagtaacggcagacttctcC | | | |
| | TCAG | | | |
| 70 | cttcatccacgttcaccttgcccca | 17866 | GAGTCAGAtgcaccatg | 18043 |
| | cagggcagtaacggcagacttctcC | | | |
| | TCAG | | | |
| 73 | ctgtgttcactagcaacctcaaaca | 17867 | GAAGTCTGccgttactg | 18044 |
| | gacaccatggtgcatctgactcctG | | | |
| | AGGA | | | |
| 79 | cttcatccacgttcaccttgcccca | 17868 | AGTCAGATgcaccatgg | 18045 |
| | cagggcagtaacggcagacttctcC | | | |
| | TCAGG | | | |
| 80 | cttcatccacgttcaccttgcccca | 17869 | AGTCAGATgcaccatgg | 18046 |
| | cagggcagtaacggcagacttctcC | | | |
| | TCAGG | | | |
| 81 | ctgtgttcactagcaacctcaaaca | 17870 | AAGTCTGCcgttactgc | 18047 |
| | gacaccatggtgcatctgactcctG | | | |
| | AGGAG | | | |
| 82 | cttcatccacgttcaccttgcccca | 17871 | AGTCAGATgcaccatgg | 18048 |
| | cagggcagtaacggcagacttctcC | | | |
| | TCAGG | | | |
| 83 | cttcatccacgttcaccttgcccca | 17872 | AGTCAGATgcaccatgg | 18049 |
| | cagggcagtaacggcagacttctcC | | | |
| | TCAGG | | | |
| 86 | cttcatccacgttcaccttgcccca | 17873 | AGTCAGATgcaccatgg | 18050 |
| | cagggcagtaacggcagacttctcC | | | |
| | TCAGG | | | |
| 87 | cttcatccacgttcaccttgcccca | 17874 | AGTCAGATgcaccatgg | 18051 |
| | cagggcagtaacggcagacttctcC | | | |
| | TCAGG | | | |
| 88 | ctgtgttcactagcaacctcaaaca | 17875 | AAGTCTGCcgttactgc | 18052 |
| | gacaccatggtgcatctgactcctG | | | |
| | AGGAG | | | |
| 94 | cttcatccacgttcaccttgcccca | 17876 | GTCAGATGcaccatggt | 18053 |
| | cagggcagtaacggcagacttctcC | | | |
| | TCAGGA | | | |
| 95 | cttcatccacgttcaccttgcccca | 17877 | GTCAGATGcaccatggt | 18054 |
| | cagggcagtaacggcagacttctcC | | | |
| | TCAGGA | | | |
| 99 | cttcatccacgttcaccttgcccca | 17878 | GTCAGATGcaccatggt | 18055 |
| | cagggcagtaacggcagacttctcC | | | |
| | TCAGGA | | | |
| 100 | ctgtgttcactagcaacctcaaaca | 17879 | AGTCTGCCgttactgcc | 18056 |
| | gacaccatggtgcatctgactcctG | | | |
| | AGGAGA | | | |
| 103 | cttcatccacgttcaccttgcccca | 17880 | TCAGATGCaccatggtg | 18057 |
| | cagggcagtaacggcagacttctcC | | | |
| | TCAGGAG | | | |
| 104 | cttcatccacgttcaccttgcccca | 17881 | TCAGATGCaccatggtg | 18058 |
| | cagggcagtaacggcagacttctcC | | | |
| | TCAGGAG | | | |
| 105 | ctgtgttcactagcaacctcaaaca | 17882 | GTCTGCCGttactgccc | 18059 |
| | gacaccatggtgcatctgactcctG | | | |
| | AGGAGAA | | | |
| 106 | ctgtgttcactagcaacctcaaaca | 17883 | GTCTGCCGttactgCCC | 18060 |
| | gacaccatggtgcatctgactcctG | | | |
| | AGGAGAA | | | |
| 107 | ctgtgttcactagcaacctcaaaca | 17884 | GTCTGCCGttactgccc | 18061 |
| | gacaccatggtgcatctgactcctG | | | |
| | AGGAGAA | | | |
| 108 | ctgtgttcactagcaacctcaaaca | 17885 | TCTGCCGTtactgccct | 18062 |
| | gacaccatggtgcatctgactcctG | | | |
| | AGGAGAAG | | | |
| 109 | cttcatccacgttcaccttgcccca | 17886 | CAGATGCAccatggtgt | 18063 |
| | cagggcagtaacggcagacttctcC | | | |
| | TCAGGAGT | | | |
| 110 | ctgtgttcactagcaacctcaaaca | 17887 | CTGCCGTTactgccctg | 18064 |
| | gacaccatggtgcatctgactcctG | | | |
| | AGGAGAAGT | | | |
| 111 | cttcatccacgttcaccttgcccca | 17888 | AGATGCACcatggtgtc | 18065 |
| | cagggcagtaacggcagacttctcC | | | |
| | TCAGGAGTC | | | |
| 112 | ctgtgttcactagcaacctcaaaca | 17889 | CTGCCGTTactgccctg | 18066 |
| | gacaccatggtgcatctgactcctG | | | |
| | AGGAGAAGT | | | |
| 113 | ctgtgttcactagcaacctcaaaca | 17890 | TGCCGTTActgccctgt | 18067 |
| | gacaccatggtgcatctgactcctG | | | |
| | AGGAGAAGTC | | | |
| 114 | ctgtgttcactagcaacctcaaaca | 17891 | TGCCGTTActgccctgt | 18068 |
| | gacaccatggtgcatctgactcctG | | | |
| | AGGAGAAGTC | | | |
| 115 | cttcatccacgttcaccttgcccca | 17892 | GATGCACCatggtgtct | 18069 |
| | cagggcagtaacggcagacttctcC | | | |
| | TCAGGAGTCA | | | |
| 116 | ctgtgttcactagcaacctcaaaca | 17893 | TGCCGTTActgccctgt | 18070 |
| | gacaccatggtgcatctgactcctG | | | |
| | AGGAGAAGTC | | | |
| 117 | ctgtgttcactagcaacctcaaaca | 17894 | GCCGTTACtgccctgtg | 18071 |
| | gacaccatggtgcatctgactcctG | | | |
| | AGGAGAAGTCT | | | |
| 118 | cttcatccacgttcaccttgcccca | 17895 | ATGCACCAtggtgtctg | 18072 |
| | cagggcagtaacggcagacttctcC | | | |
| | TCAGGAGTCAG | | | |
| 119 | cttcatccacgttcaccttgcccca | 17896 | ATGCACCAtggtgtctg | 18073 |
| | cagggcagtaacggcagacttctcC | | | |
| | TCAGGAGTCAG | | | |
| 120 | cttcatccacgttcaccttgcccca | 17897 | ATGCACCAtggtgtctg | 18074 |
| | cagggcagtaacggcagacttctcC | | | |
| | TCAGGAGTCAG | | | |
| 121 | cttcatccacgttcaccttgcccca | 17898 | TGCACCATggtgtctgt | 18075 |
| | cagggcagtaacggcagacttctcC | | | |
| | TCAGGAGTCAGA | | | |
| 122 | cttcatccacgttcaccttgcccca | 17899 | TGCACCATggtgtctgt | 18076 |
| | cagggcagtaacggcagacttctcC | | | |
| | TCAGGAGTCAGA | | | |
| 123 | ctgtgttcactagcaacctcaaaca | 17900 | CCGTTACTgccctgtgg | 18077 |
| | gacaccatggtgcatctgactcctG | | | |
| | AGGAGAAGTCTG | | | |
| 124 | cttcatccacgttcaccttgcccca | 17901 | TGCACCATggtgtctgt | 18078 |
| | cagggcagtaacggcagacttctcC | | | |
| | TCAGGAGTCAGA | | | |
| 125 | ctgtgttcactagcaacctcaaaca | 17902 | CCGTTACTgccctgtgg | 18079 |
| | gacaccatggtgcatctgactcctG | | | |
| | AGGAGAAGTCTG | | | |
| 126 | cttcatccacgttcaccttgcccca | 17903 | TGCACCATggtgtctgt | 18080 |
| | cagggcagtaacggcagacttctcC | | | |
| | TCAGGAGTCAGA | | | |
| 128 | cttcatccacgttcaccttgcccca | 17904 | GCACCATGgtgtctgtt | 18081 |
| | cagggcagtaacggcagacttctcC | | | |
| | TCAGGAGTCAGAT | | | |
| 131 | ctgtgttcactagcaacctcaaaca | 17905 | CGTTACTGccctgtggg | 18082 |
| | gacaccatggtgcatctgactcctG | | | |
| | AGGAGAAGTCTGC | | | |
| 133 | cttcatccacgttcaccttgcccca | 17906 | GCACCATGgtgtctgtt | 18083 |
| | cagggcagtaacggcagacttctcC | | | |
| | TCAGGAGTCAGAT | | | |
| 140 | cttcatccacgttcaccttgcccca | 17907 | CACCATGGtgtctgttt | 18084 |
| | cagggcagtaacggcagacttctcC | | | |
| | TCAGGAGTCAGATG | | | |
| 141 | cttcatccacgttcaccttgcccca | 17908 | CACCATGGtgtctgttt | 18085 |
| | cagggcagtaacggcagacttctcC | | | |
| | TCAGGAGTCAGATG | | | |
| 142 | ctgtgttcactagcaacctcaaaca | 17909 | GTTACTGCcctgtgggg | 18086 |
| | gacaccatggtgcatctgactcctG | | | |
| | AGGAGAAGTCTGCC | | | |
| 146 | ctgtgttcactagcaacctcaaaca | 17910 | GTTACTGCcctgtgggg | 18087 |
| | gacaccatggtgcatctgactcctG | | | |
| | AGGAGAAGTCTGCC | | | |
| 147 | cttcatccacgttcaccttgcccca | 17911 | CACCATGGtgtctgttt | 18088 |
| | cagggcagtaacggcagacttctcC | | | |
| | TCAGGAGTCAGATG | | | |
| 154 | cttcatccacgttcaccttgcccca | 17912 | ACCATGGTgtctgtttg | 18089 |
| | cagggcagtaacggcagacttctcC | | | |
| | TCAGGAGTCAGATGC | | | |
| 157 | ctgtgttcactagcaacctcaaaca | 17913 | TTACTGCCctgtggggc | 18090 |
| | gacaccatggtgcatctgactcctG | | | |
| | AGGAGAAGTCTGCCG | | | |
| 158 | ctgtgttcactagcaacctcaaaca | 17914 | TTACTGCCctgtggggc | 18091 |
| | gacaccatggtgcatctgactcctG | | | |
| | AGGAGAAGTCTGCCG | | | |
| 159 | cttcatccacgttcaccttgcccca | 17915 | ACCATGGTgtctgtttg | 18092 |
| | cagggcagtaacggcagacttctcC | | | |
| | TCAGGAGTCAGATGC | | | |
| 160 | ctgtgttcactagcaacctcaaaca | 17916 | TTACTGCCctgtggggc | 18093 |
| | gacaccatggtgcatctgactcctG | | | |
| | AGGAGAAGTCTGCCG | | | |
| 165 | ctgtgttcactagcaacctcaaaca | 17917 | TACTGCCCtgtggggca | 18094 |
| | gacaccatggtgcatctgactcctG | | | |
| | AGGAGAAGTCTGCCGT | | | |
| 166 | ctgtgttcactagcaacctcaaaca | 17918 | TACTGCCCtgtggggca | 18095 |
| | gacaccatggtgcatctgactcctG | | | |
| | AGGAGAAGTCTGCCGT | | | |
| 167 | ctgtgttcactagcaacctcaaaca | 17919 | TACTGCCCtgtggggca | 18096 |
| | gacaccatggtgcatctgactcctG | | | |
| | AGGAGAAGTCTGCCGT | | | |
| 168 | cttcatccacgttcaccttgcccca | 17920 | CCATGGTGtctgtttga | 18097 |
| | cagggcagtaacggcagacttctcC | | | |
| | TCAGGAGTCAGATGCA | | | |
| 172 | ctgtgttcactagcaacctcaaaca | 17921 | ACTGCCCTgtggggcaa | 18098 |
| | gacaccatggtgcatctgactcctG | | | |
| | AGGAGAAGTCTGCCGTT | | | |
| 173 | ctgtgttcactagcaacctcaaaca | 17922 | ACTGCCCTgtggggcaa | 18099 |
| | gacaccatggtgcatctgactcctG | | | |
| | AGGAGAAGTCTGCCGTT | | | |
| 177 | ctgtgttcactagcaacctcaaaca | 17923 | ACTGCCCTgtggggcaa | 18100 |
| | gacaccatggtgcatctgactcctG | | | |
| | AGGAGAAGTCTGCCGTT | | | |
| 178 | cttcatccacgttcaccttgcccca | 17924 | CATGGTGTctgtttgag | 18101 |
| | cagggcagtaacggcagacttctcC | | | |
| | TCAGGAGTCAGATGCAC | | | |
| 186 | ctgtgttcactagcaacctcaaaca | 17925 | CTGCCCTGtggggcaag | 18102 |
| | gacaccatggtgcatctgactcctG | | | |
| | AGGAGAAGTCTGCCGTTA | | | |
| 187 | ctgtgttcactagcaacctcaaaca | 17926 | CTGCCCTGtggggcaag | 18103 |
| | gacaccatggtgcatctgactcctG | | | |
| | AGGAGAAGTCTGCCGTTA | | | |
| 190 | ctgtgttcactagcaacctcaaaca | 17927 | CTGCCCTGtggggcaag | 18104 |
| | gacaccatggtgcatctgactcctG | | | |
| | AGGAGAAGTCTGCCGTTA | | | |
| 191 | ctgtgttcactagcaacctcaaaca | 17928 | CTGCCCTGtggggcaag | 18105 |
| | gacaccatggtgcatctgactcctG | | | |
| | AGGAGAAGTCTGCCGTTA | | | |
| 194 | cttcatccacgttcaccttgcccca | 17929 | ATGGTGTCtgtttgagg | 18106 |
| | cagggcagtaacggcagacttctcC | | | |
| | TCAGGAGTCAGATGCACC | | | |
| 195 | cttcatccacgttcaccttgcccca | 17930 | ATGGTGTCtgtttgagg | 18107 |
| | cagggcagtaacggcagacttctcC | | | |
| | TCAGGAGTCAGATGCACC | | | |
| 196 | cttcatccacgttcaccttgcccca | 17931 | ATGGTGTCtgtttgagg | 18108 |
| | cagggcagtaacggcagacttctcC | | | |
| | TCAGGAGTCAGATGCACC | | | |
| 198 | ctgtgttcactagcaacctcaaaca | 17932 | TGCCCTGTggggcaagg | 18109 |
| | gacaccatggtgcatctgactcctG | | | |
| | AGGAGAAGTCTGCCGTTAC | | | |
| 199 | ctgtgttcactagcaacctcaaaca | 17933 | TGCCCTGTggggcaagg | 18110 |
| | gacaccatggtgcatctgactcctG | | | |
| | AGGAGAAGTCTGCCGTTAC | | | |
| 202 | ctgtgttcactagcaacctcaaaca | 17934 | TGCCCTGTggggcaagg | 18111 |
| | gacaccatggtgcatctgactcctG | | | |
| | AGGAGAAGTCTGCCGTTAC | | | |
| 203 | ctgtgttcactagcaacctcaaaca | 17935 | TGCCCTGTggggcaagg | 18112 |
| | gacaccatggtgcatctgactcctG | | | |
| | AGGAGAAGTCTGCCGTTAC | | | |
| 204 | cttcatccacgttcaccttgcccca | 17936 | TGGTGTCTgtttgaggt | 18113 |
| | cagggcagtaacggcagacttctcC | | | |
| | TCAGGAGTCAGATGCACCA | | | |
| 208 | cttcatccacgttcaccttgcccca | 17937 | TGGTGTCTgtttgaggt | 18114 |
| | cagggcagtaacggcagacttctcC | | | |
| | TCAGGAGTCAGATGCACCA | | | |
| 209 | ctgtgttcactagcaacctcaaaca | 17938 | TGCCCTGTggggcaagg | 18115 |
| | gacaccatggtgcatctgactcctG | | | |
| | AGGAGAAGTCTGCCGTTAC | | | |
| 210 | ctgtgttcactagcaacctcaaaca | 17939 | TGCCCTGTggggcaagg | 18116 |
| | gacaccatggtgcatctgactcctG | | | |
| | AGGAGAAGTCTGCCGTTAC | | | |
| 212 | ctgtgttcactagcaacctcaaaca | 17940 | GCCCTGTGgggcaaggt | 18117 |
| | gacaccatggtgcatctgactcctG | | | |
| | AGGAGAAGTCTGCCGTTACT | | | |
| 215 | cttcatccacgttcaccttgcccca | 17941 | GGTGTCTGtttgaggtt | 18118 |
| | cagggcagtaacggcagacttctcC | | | |
| | TCAGGAGTCAGATGCACCAT | | | |
| 216 | cttcatccacgttcaccttgcccca | 17942 | GGTGTCTGtttgaggtt | 18119 |
| | cagggcagtaacggcagacttctcC | | | |
| | TCAGGAGTCAGATGCACCAT | | | |
| 217 | ctgtgttcactagcaacctcaaaca | 17943 | GCCCTGTGgggcaaggt | 18120 |
| | gacaccatggtgcatctgactcctG | | | |
| | AGGAGAAGTCTGCCGTTACT | | | |
| 221 | cttcatccacgttcaccttgcccca | 17944 | GTGTCTGTttgaggttg | 18121 |
| | cagggcagtaacggcagacttctcC | | | |
| | TCAGGAGTCAGATGCACCATG | | | |
| 224 | ctgtgttcactagcaacctcaaaca | 17945 | CCCTGTGGggcaaggtg | 18122 |
| | gacaccatggtgcatctgactcctG | | | |
| | AGGAGAAGTCTGCCGTTACTG | | | |
| 226 | cttcatccacgttcaccttgcccca | 17946 | GTGTCTGTttgaggttg | 18123 |
| | cagggcagtaacggcagacttctcC | | | |
| | TCAGGAGTCAGATGCACCATG | | | |
| 227 | cttcatccacgttcaccttgcccca | 17947 | GTGTCTGTttgaggttg | 18124 |
| | cagggcagtaacggcagacttctcC | | | |
| | TCAGGAGTCAGATGCACCATG | | | |
| 232 | cttcatccacgttcaccttgcccca | 17948 | TGTCTGTTtgaggttgc | 18125 |
| | cagggcagtaacggcagacttctcC | | | |
| | TCAGGAGTCAGATGCACCATGG | | | |
| 233 | cttcatccacgttcaccttgcccca | 17949 | TGTCTGTTtgaggttgc | 18126 |
| | cagggcagtaacggcagacttctcC | | | |
| | TCAGGAGTCAGATGCACCATGG | | | |
| 236 | cttcatccacgttcaccttgcccca | 17950 | TGTCTGTTtgaggttgc | 18127 |
| | cagggcagtaacggcagacttctcC | | | |
| | TCAGGAGTCAGATGCACCATGG | | | |
| 237 | cttcatccacgttcaccttgcccca | 17951 | TGTCTGTTtgaggttgc | 18128 |
| | cagggcagtaacggcagacttctcC | | | |
| | TCAGGAGTCAGATGCACCATGG | | | |
| 240 | ctgtgttcactagcaacctcaaaca | 17952 | CCTGTGGGgcaaggtga | 18129 |
| | gacaccatggtgcatctgactectG | | | |
| | AGGAGAAGTCTGCCGTTACTGC | | | |
| 241 | ctgtgttcactagcaacctcaaaca | 17953 | CCTGTGGGgcaaggtga | 18130 |
| | gacaccatggtgcatctgactcctG | | | |
| | AGGAGAAGTCTGCCGTTACTGC | | | |
| 243 | ctgtgttcactagcaacctcaaaca | 17954 | CTGTGGGGcaaggtgaa | 18131 |
| | gacaccatggtgcatctgactcctG | | | |
| | AGGAGAAGTCTGCCGTTACTGCC | | | |
| 244 | cttcatccacgttcaccttgcccca | 17955 | GTCTGTTTgaggttgct | 18132 |
| | cagggcagtaacggcagacttctcC | | | |
| | TCAGGAGTCAGATGCACCATGGT | | | |
| 245 | cttcatccacgttcaccttgcccca | 17956 | GTCTGTTTgaggttgct | 18133 |
| | cagggcagtaacggcagacttctcC | | | |
| | TCAGGAGTCAGATGCACCATGGT | | | |
| 248 | cttcatccacgttcaccttgcccca | 17957 | GTCTGTTTgaggttgct | 18134 |
| | cagggcagtaacggcagacttctcC | | | |
| | TCAGGAGTCAGATGCACCATGGT | | | |
| 249 | cttcatccacgttcaccttgcccca | 17958 | GTCTGTTTgaggttgct | 18135 |
| | cagggcagtaacggcagacttctcC | | | |
| | TCAGGAGTCAGATGCACCATGGT | | | |
| 250 | ctgtgttcactagcaacctcaaaca | 17959 | CTGTGGGGcaaggtgaa | 18136 |
| | gacaccatggtgcatctgactcctG | | | |
| | AGGAGAAGTCTGCCGTTACTGCC | | | |
| 254 | ctgtgttcactagcaacctcaaaca | 17960 | CTGTGGGGcaaggtgaa | 18137 |
| | gacaccatggtgcatctgactcctG | | | |
| | AGGAGAAGTCTGCCGTTACTGCC | | | |
| 258 | cttcatccacgttcaccttgcccca | 17961 | TCTGTTTGaggttgcta | 18138 |
| | cagggcagtaacggcagacttctcC | | | |
| | TCAGGAGTCAGATGCACCATGGTG | | | |
| 259 | cttcatccacgttcaccttgcccca | 17962 | TCTGTTTGaggttgcta | 18139 |
| | cagggcagtaacggcagacttctcC | | | |
| | TCAGGAGTCAGATGCACCATGGTG | | | |
| 262 | ctgtgttcactagcaacctcaaaca | 17963 | TGTGGGGCaaggtgaac | 18140 |
| | gacaccatggtgcatctgactcctG | | | |
| | AGGAGAAGTCTGCCGTTACTGCCC | | | |
| 263 | ctgtgttcactagcaacctcaaaca | 17964 | TGTGGGGCaaggtgaac | 18141 |
| | gacaccatggtgcatctgactcctG | | | |
| | AGGAGAAGTCTGCCGTTACTGCCC | | | |
| 264 | cttcatccacgttcaccttgcccca | 17965 | TCTGTTTGaggttgcta | 18142 |
| | cagggcagtaacggcagacttctcC | | | |
| | TCAGGAGTCAGATGCACCATGGTG | | | |
| 267 | ctgtgttcactagcaacctcaaaca | 17966 | GTGGGGCAaggtgaacg | 18143 |
| | gacaccatggtgcatctgactcctG | | | |
| | AGGAGAAGTCTGCCGTTACTGCCCT | | | |
| 268 | ctgtgttcactagcaacctcaaaca | 17967 | GTGGGGCAaggtgaacg | 18144 |
| | gacaccatggtgcatctgactcctG | | | |
| | AGGAGAAGTCTGCCGTTACTGCCCT | | | |
| 269 | cttcatccacgttcaccttgcccca | 17968 | CTGTTTGAggttgctag | 18145 |
| | cagggcagtaacggcagacttctcC | | | |
| | TCAGGAGTCAGATGCACCATGGTGT | | | |
| 270 | ctgtgttcactagcaacctcaaaca | 17969 | TGGGGCAAggtgaacgt | 18146 |
| | gacaccatggtgcatctgactcctG | | | |
| | AGGAGAAGTCTGCCGTTACTGCCCT | | | |
| | G | | | |
| 271 | ctgtgttcactagcaacctcaaaca | 17970 | TGGGGCAAggtgaacgt | 18147 |
| | gacaccatggtgcatctgactcctG | | | |
| | AGGAGAAGTCTGCCGTTACTGCCCT | | | |
| | G | | | |
| 274 | ctgtgttcactagcaacctcaaaca | 17971 | TGGGGCAAggtgaacgt | 18148 |
| | gacaccatggtgcatctgactcctG | | | |
| | AGGAGAAGTCTGCCGTTACTGCCCT | | | |
| | G | | | |
| 278 | ctgtgttcactagcaacctcaaaca | 17972 | TGGGGCAAggtgaacgt | 18149 |
| | gacaccatggtgcatctgactcctG | | | |
| | AGGAGAAGTCTGCCGTTACTGCCCT | | | |
| | G | | | |
| 279 | cttcatccacgttcaccttgcccca | 17973 | TGTTTGAGgttgctagt | 18150 |
| | cagggcagtaacggcagacttctcC | | | |
| | TCAGGAGTCAGATGCACCATGGTGT | | | |
| | C | | | |
| 283 | ctgtgttcactagcaacctcaaaca | 17974 | GGGGCAAGgtgaacgtg | 18151 |
| | gacaccatggtgcatctgactcctG | | | |
| | AGGAGAAGTCTGCCGTTACTGCCCT | | | |
| | GT | | | |
| 284 | ctgtgttcactagcaacctcaaaca | 17975 | GGGGCAAGgtgaacgtg | 18152 |
| | gacaccatggtgcatctgactcctG | | | |
| | AGGAGAAGTCTGCCGTTACTGCCCT | | | |
| | GT | | | |
| 287 | ctgtgttcactagcaacctcaaaca | 17976 | GGGGCAAGgtgaacgtg | 18153 |
| | gacaccatggtgcatctgactcctG | | | |
| | AGGAGAAGTCTGCCGTTACTGCCCT | | | |
| | GT | | | |
| 288 | ctgtgttcactagcaacctcaaaca | 17977 | GGGGCAAGgtgaacgtg | 18154 |
| | gacaccatggtgcatctgactcctG | | | |
| | AGGAGAAGTCTGCCGTTACTGCCCT | | | |
| | GT | | | |
| 291 | cttcatccacgttcaccttgcccca | 17978 | GTTTGAGGttgctagtg | 18155 |
| | cagggcagtaacggcagacttctcC | | | |
| | TCAGGAGTCAGATGCACCATGGTGT | | | |
| | CT | | | |
| 294 | ctgtgttcactagcaacctcaaaca | 17979 | GGGCAAGGtgaacgtgg | 18156 |
| | gacaccatggtgcatctgactcctG | | | |
| | AGGAGAAGTCTGCCGTTACTGCCCT | | | |
| | GTG | | | |
| 295 | ctgtgttcactagcaacctcaaaca | 17980 | GGGCAAGGtgaacgtgg | 18157 |
| | gacaccatggtgcatctgactcctG | | | |
| | AGGAGAAGTCTGCCGTTACTGCCCT | | | |
| | GTG | | | |
| 298 | ctgtgttcactagcaacctcaaaca | 17981 | GGGCAAGGtgaacgtgg | 18158 |
| | gacaccatggtgcatctgactcctG | | | |
| | AGGAGAAGTCTGCCGTTACTGCCCT | | | |
| | GTG | | | |
| 299 | ctgtgttcactagcaacctcaaaca | 17982 | GGGCAAGGtgaacgtgg | 18159 |
| | gacaccatggtgcatctgactcctG | | | |
| | AGGAGAAGTCTGCCGTTACTGCCCT | | | |
| | GTG | | | |
| 302 | ctgtgttcactagcaacctcaaaca | 17983 | GGGCAAGGtgaacgtgg | 18160 |
| | gacaccatggtgcatctgactcctG | | | |
| | AGGAGAAGTCTGCCGTTACTGCCCT | | | |
| | GTG | | | |
| 303 | ctgtgttcactagcaacctcaaaca | 17984 | GGGCAAGGtgaacgtgg | 18161 |
| | gacaccatggtgcatctgactcctG | | | |
| | AGGAGAAGTCTGCCGTTACTGCCCT | | | |
| | GTG | | | |
| 306 | cttcatccacgttcaccttgcccca | 17985 | TTTGAGGTtgctagtga | 18162 |
| | cagggcagtaacggcagacttctcC | | | |
| | TCAGGAGTCAGATGCACCATGGTGT | | | |
| | CTG | | | |
| 307 | ctgtgttcactagcaacctcaaaca | 17986 | GGGCAAGGtgaacgtgg | 18163 |
| | gacaccatggtgcatctgactcctG | | | |
| | AGGAGAAGTCTGCCGTTACTGCCCT | | | |
| | GTG | | | |
| 308 | cttcatccacgttcaccttgcccca | 17987 | TTTGAGGTtgctagtga | 18164 |
| | cagggcagtaacggcagacttctcC | | | |
| | TCAGGAGTCAGATGCACCATGGTGT | | | |
| | CTG | | | |
| 309 | ctgtgttcactagcaacctcaaaca | 17988 | GGGCAAGGtgaacgtgg | 18165 |
| | gacaccatggtgcatctgactcctG | | | |
| | AGGAGAAGTCTGCCGTTACTGCCCT | | | |
| | GTG | | | |
| 310 | cttcatccacgttcaccttgcccca | 17989 | TTTGAGGTtgctagtga | 18166 |
| | cagggcagtaacggcagacttctcC | | | |
| | TCAGGAGTCAGATGCACCATGGTGT | | | |
| | CTG | | | |
| 312 | cttcatccacgttcaccttgcccca | 17990 | TTGAGGTTgctagtgaa | 18167 |
| | cagggcagtaacggcagacttctcC | | | |
| | TCAGGAGTCAGATGCACCATGGTGT | | | |
| | CTGT | | | |
| 313 | ctgtgttcactagcaacctcaaaca | 17991 | GGCAAGGTgaacgtgga | 18168 |
| | gacaccatggtgcatctgactcctG | | | |
| | AGGAGAAGTCTGCCGTTACTGCCCT | | | |
| | GTGG | | | |
| 314 | ctgtgttcactagcaacctcaaaca | 17992 | GGCAAGGTgaacgtgga | 18169 |
| | gacaccatggtgcatctgactcctG | | | |
| | AGGAGAAGTCTGCCGTTACTGCCCT | | | |
| | GTGG | | | |
| 315 | ctgtgttcactagcaacctcaaaca | 17993 | GGCAAGGTgaacgtgga | 18170 |
| | gacaccatggtgcatctgactcctG | | | |
| | AGGAGAAGTCTGCCGTTACTGCCCT | | | |
| | GTGG | | | |
| 316 | ctgtgttcactagcaacctcaaaca | 17994 | GGCAAGGTgaacgtgga | 18171 |
| | gacaccatggtgcatctgactcctG | | | |
| | AGGAGAAGTCTGCCGTTACTGCCCT | | | |
| | GTGG | | | |
| 319 | ctgtgttcactagcaacctcaaaca | 17995 | GGCAAGGTgaacgtgga | 18172 |
| | gacaccatggtgcatctgactcctG | | | |
| | AGGAGAAGTCTGCCGTTACTGCCCT | | | |
| | GTGG | | | |
| 320 | ctgtgttcactagcaacctcaaaca | 17996 | GGCAAGGTgaacgtgga | 18173 |
| | gacaccatggtgcatctgactcctG | | | |
| | AGGAGAAGTCTGCCGTTACTGCCCT | | | |
| | GTGG | | | |
| 321 | cttcatccacgttcaccttgcccca | 17997 | TTGAGGTTgctagtgaa | 18174 |
| | cagggcagtaacggcagacttctcC | | | |
| | TCAGGAGTCAGATGCACCATGGTGT | | | |
| | CTGT | | | |
| 322 | cttcatccacgttcaccttgcccca | 17998 | TTGAGGTTgctagtgaa | 18175 |
| | cagggcagtaacggcagacttctcC | | | |
| | TCAGGAGTCAGATGCACCATGGTGT | | | |
| | CTGT | | | |
| 323 | cttcatccacgttcaccttgcccca | 17999 | TTGAGGTTgctagtgaa | 18176 |
| | cagggcagtaacggcagacttctcC | | | |
| | TCAGGAGTCAGATGCACCATGGTGT | | | |
| | CTGT | | | |
| 327 | ctgtgttcactagcaacctcaaaca | 18000 | GCAAGGTGaacgtggat | 18177 |
| | gacaccatggtgcatctgactcctG | | | |
| | AGGAGAAGTCTGCCGTTACTGCCCT | | | |
| | GTGGG | | | |
| 328 | ctgtgttcactagcaacctcaaaca | 18001 | GCAAGGTGaacgtggat | 18178 |
| | gacaccatggtgcatctgactcctG | | | |
| | AGGAGAAGTCTGCCGTTACTGCCCT | | | |
| | GTGGG | | | |
| 329 | cttcatccacgttcaccttgcccca | 18002 | TGAGGTTGctagtgaac | 18179 |
| | cagggcagtaacggcagacttctcC | | | |
| | TCAGGAGTCAGATGCACCATGGTGT | | | |
| | CTGTT | | | |
| 333 | cttcatccacgttcaccttgcccca | 18003 | TGAGGTTGctagtgaac | 18180 |
| | cagggcagtaacggcagacttctcC | | | |
| | TCAGGAGTCAGATGCACCATGGTGT | | | |
| | CTGTT | | | |
| 334 | ctgtgttcactagcaacctcaaaca | 18004 | GCAAGGTGaacgtggat | 18181 |
| | gacaccatggtgcatctgactcctG | | | |
| | AGGAGAAGTCTGCCGTTACTGCCCT | | | |
| | GTGGG | | | |
| 340 | ctgtgttcactagcaacctcaaaca | 18005 | CAAGGTGAacgtggatg | 18182 |
| | gacaccatggtgcatctgactcctG | | | |
| | AGGAGAAGTCTGCCGTTACTGCCCT | | | |
| | GTGGGG | | | |
| 343 | cttcatccacgttcaccttgcccca | 18006 | GAGGTTGCtagtgaaca | 18183 |
| | cagggcagtaacggcagacttctcC | | | |
| | TCAGGAGTCAGATGCACCATGGTGT | | | |
| | CTGTTT | | | |
| 344 | cttcatccacgttcaccttgcccca | 18007 | GAGGTTGCtagtgaaca | 18184 |
| | cagggcagtaacggcagacttctcC | | | |
| | TCAGGAGTCAGATGCACCATGGTGT | | | |
| | CTGTTT | | | |
| 345 | ctgtgttcactagcaacctcaaaca | 18008 | CAAGGTGAacgtggatg | 18185 |
| | gacaccatggtgcatctgactcctG | | | |
| | AGGAGAAGTCTGCCGTTACTGCCCT | | | |
| | GTGGGG | | | |
| 346 | cttcatccacgttcaccttgcccca | 18009 | GAGGTTGCtagtgaaca | 18186 |
| | cagggcagtaacggcagacttctcC | | | |
| | TCAGGAGTCAGATGCACCATGGTGT | | | |
| | CTGTTT | | | |

[0598] Capital letters indicate “core nucleotides” while lower case letters indicate “flanking nucleotides.” Herein, when an RNA sequence (e.g., a template RNA sequence) is said to comprise a particular sequence (e.g., a sequence of Table 3 or a portion thereof) that comprises thymine (T), it is of course understood that the RNA sequence may (and frequently does) comprise uracil (U) in place of T. For instance, the RNA sequence may comprise U at every position shown as T in the sequence in Table 3. More specifically, the present disclosure provides an RNA sequence according to every heterologous object sequence and PBS sequence shown in Table 3, wherein the RNA sequence has a U in place of each T in the sequence of Table 3.

[0599] In some embodiments of the systems and methods herein, the template RNA comprises a gRNA scaffold (e.g., that binds a gene modifying polypeptide, e.g., a Cas polypeptide) that comprises a sequence of a gRNA scaffold of Table 12. In some embodiments, the gRNA scaffold comprises a sequence having at least 70%, 75%, 80%, 85%, 90%, 95%, 96%, 97%, 98%, or 99% identity to a gRNA scaffold of Table 12. In some embodiments, the gRNA scaffold comprises a sequence of a scaffold region of Table 12 that corresponds to the RT template sequence, the spacer sequence, or both, or a sequence having at least 70%, 75%, 80%, 85%, 90%, 95%, 96%, 97%, 98%, or 99% identity thereto.

[0600] In some embodiments of the systems and methods herein, the system further comprises a second strand-targeting gRNA that directs a nick to the second strand of the human HBB gene. In some embodiments, the second strand-targeting gRNA comprises a left gRNA spacer sequence or a right gRNA spacer sequence from Table 2. In some embodiments, the gRNA spacer additionally comprises one or more (e.g., 2, 3, or all) consecutive nucleotides starting with the 3′ end of the flanking nucleotides of the left gRNA spacer sequence or right gRNA spacer sequence. In some embodiments, the second strand-targeting gRNA comprises a sequence comprising the core nucleotides of a second nick gRNA sequence from Table 4, or a sequence having at least 70%, 75%, 80%, 85%, 90%, 95%, 96%, 97%, 98%, or 99% identity thereto. In some embodiments, the second nick gRNA sequence additionally comprises one or more consecutive nucleotides starting with the 3′ end of the flanking nucleotides of the second nick gRNA sequence. In some embodiments, the second nick gRNA comprises a gRNA scaffold sequence that is orthogonal to the Cas domain of the gene modifying polypeptide. In some embodiments, the second nick gRNA comprises a gRNA scaffold sequence of Table 12.

TABLE 2
Exemplary left gRNA spacer and right
gRNA spacer pairs
Table 2 provides exemplified second-nick gRNA
species for optional use for correcting the
pathogenic E6V mutation in HBB. The gRNA spacers
from Table 1 were filtered, e.g., filtered by
occurrence within 15 nt of the desired editing
location and use of a Tier 1 Cas enzyme. Second-
nick gRNAs were generated by searching the
opposite strand of DNA in the regions −40 to
−140 (“left”) and +40 to +140 (“right”),
relative to the first nick site defined by
the first gRNA, for the PAM utilized by the
corresponding Cas variant. One exemplary
spacer is shown for each side of the
target nick site.

| | Left | SEQ | | Right | SEQ | |
|---|---|---|---|---|---|---|
| | gRNAs | ID | Left | gRNA | ID | Right |
| ID | pacer | NO | PAM | spacer | NO | PAM |
| 1 | GCCCAGTTTC | 18187 | TTAAA | GGCTCTGCCC | 18541 | CCCAG |
| | TATTGGTCTC | | | TGACTTTTAT | | |
| | C | | | G | | |
| 2 | GCCCAGTTTC | 18188 | TTAAA | GGCTCTGCCC | 18542 | CCCAG |
| | TATTGGTCTC | | | TGACTTTTAT | | |
| | C | | | G | | |
| 5 | TCTATTGGTC | 18189 | TG | CTGCCCTGAC | 18543 | AG |
| | TCCTTAAACC | | | TTTTATGCCC | | |
| 9 | TTCTATTGGT | 18190 | CTG | TCTGCCCTGA | 18544 | CAG |
| | CTCCTTAAAC | | | CTTTTATGCC | | |
| 13 | tgTAACCTTG | 18191 | CAGGG | ccTGGCTCCT | 18545 | CTGGG |
| | ATACCAACCT | | | GCCCTCCCTG | | |
| | GCC | | | CTC | | |
| 14 | TTGGTCTCCT | 18192 | TGTAA | GGCTCTGCCC | 18546 | CCCAG |
| | TAAACCTGTC | | | TGACTTTTAT | | |
| | T | | | G | | |
| 15 | atCAAGGTTA | 18193 | AGGAG | gaGCCAGGGC | 18547 | CAGGG |
| | CAAGACAGGT | | | TGGGCATAAA | | |
| | TTA | | | AGT | | |
| 16 | TTACAAGACA | 18194 | ACCAA | GAGCCAGGGC | 18548 | GTCAG |
| | GGTTTAAGGA | | | TGGGCATAAA | | |
| | G | | | A | | |
| 17 | atCAAGGTTA | 18195 | AGGAG | gaGCCAGGGC | 18549 | CAGGG |
| | CAAGACAGGT | | | TGGGCATAAA | | |
| | TTA | | | AGT | | |
| 18 | TTACAAGACA | 18196 | ACCAA | GAGCCAGGGC | 18550 | GTCAG |
| | GGTTTAAGGA | | | TGGGCATAAA | | |
| | G | | | A | | |
| 23 | TTCTATTGGT | 18197 | CTG | TCTGCCCTGA | 18551 | CAG |
| | CTCCTTAAAC | | | CTTTTATGCC | | |
| 24 | TCTATTGGTC | 18198 | TGT | CTGCCCTGAC | 18552 | AGC |
| | TCCTTAAACC | | | TTTTATGCCC | | |
| 27 | GGTTACAAGA | 18199 | GAG | GGAGCCAGGG | 18553 | AAG |
| | CAGGTTTAAG | | | CTGGGCATAA | | |
| 28 | AAGGTTACAA | 18200 | AGG | CAGGGCTGGG | 18554 | AGG |
| | GACAGGTTTA | | | CATAAAAGTC | | |
| 31 | GTTACAAGAC | 18201 | AGA | GAGCCAGGGC | 18555 | AGT |
| | AGGTTTAAGG | | | TGGGCATAAA | | |
| 32 | GTTACAAGAC | 18202 | AG | GAGCCAGGGC | 18556 | AG |
| | AGGTTTAAGG | | | TGGGCATAAA | | |
| 39 | atCAAGGTTA | 18203 | AGGAG | gaGCCAGGGC | 18557 | CAGGG |
| | CAAGACAGGT | | | TGGGCATAAA | | |
| | TTA | | | AGT | | |
| 40 | TTACAAGACA | 18204 | ACCAA | GAGCCAGGGC | 18558 | GTCAG |
| | GGTTTAAGGA | | | TGGGCATAAA | | |
| | G | | | A | | |
| 41 | TTGGTCTCCT | 18205 | TGTAA | GCCCTGACTT | 18559 | CCTGG |
| | TAAACCTGTC | | | TTATGCCCAG | | |
| | T | | | C | | |
| 42 | TCAAGGTTAC | 18206 | AAGG | GCCAGGGCTG | 18560 | CAGG |
| | AAGACAGGTT | | | GGCATAAAAG | | |
| | T | | | T | | |
| 43 | AAGGTTACAA | 18207 | GGAG | AGCCAGGGCT | 18561 | TCAG |
| | GACAGGTTTA | | | GGGCATAAAA | | |
| | A | | | G | | |
| 44 | TCTCCACATG | 18208 | TTGG | CCCTGACTTT | 18562 | CTGG |
| | CCCAGTTTCT | | | TATGCCCAGC | | |
| | A | | | C | | |
| 48 | GGTTACAAGA | 18209 | GAG | CCAGGGCTGG | 18563 | CAG |
| | CAGGTTTAAG | | | GCATAAAAGT | | |
| 49 | TTACAAGACA | 18210 | GAC | AGCCAGGGCT | 18564 | GTC |
| | GGTTTAAGGA | | | GGGCATAAAA | | |
| 50 | TCTATTGGTC | 18211 | TG | CTGCCCTGAC | 18565 | AG |
| | TCCTTAAACC | | | TTTTATGCCC | | |
| 54 | CTATTGGTCT | 18212 | GTC | TGCCCTGACT | 18566 | GCC |
| | CCTTAAACCT | | | TTTATGCCCA | | |
| 59 | tgTAACCTTG | 18213 | CAGGG | ccTGGCTCCT | 18567 | CTGGG |
| | ATACCAACCT | | | GCCCTCCCTG | | |
| | GCC | | | CTC | | |
| 60 | TTGGTCTCCT | 18214 | TGTAA | GCCCTGACTT | 18568 | CCTGG |
| | TAAACCTGTC | | | TTATGCCCAG | | |
| | T | | | C | | |
| 61 | TTACAAGACA | 18215 | ACCAA | AGCCAGGGCT | 18569 | TCAGG |
| | GGTTTAAGGA | | | GGGCATAAAA | | |
| | G | | | G | | |
| 62 | AAGACAGGTT | 18216 | ATAG | AGCCAGGGCT | 18570 | TCAG |
| | TAAGGAGACC | | | GGGCATAAAA | | |
| | A | | | G | | |
| 65 | TTGGTCTCCT | 18217 | TTG | CCTGACTTTT | 18571 | CTG |
| | TAAACCTGTC | | | ATGCCCAGCC | | |
| 66 | TCCACATGCC | 18218 | TGG | CTGACTTTTA | 18572 | TGG |
| | CAGTTTCTAT | | | TGCCCAGCCC | | |
| 69 | TATTGGTCTC | 18219 | TCT | GCCCTGACTT | 18573 | CCC |
| | CTTAAACCTG | | | TTATGCCCAG | | |
| 70 | TCTATTGGTC | 18220 | TG | CTGCCCTGAC | 18574 | AG |
| | TCCTTAAACC | | | TTTTATGCCC | | |
| 73 | TACAAGACAG | 18221 | ACC | GCCAGGGCTG | 18575 | TCA |
| | GTTTAAGGAG | | | GGCATAAAAG | | |
| 79 | tgTAACCTTG | 18222 | CAGGG | ccTGGCTCCT | 18576 | CTGGG |
| | ATACCAACCT | | | GCCCTCCCTG | | |
| | GCC | | | CTC | | |
| 80 | TTGGTCTCCT | 18223 | TGTAA | GCCCTGACTT | 18577 | CCTGG |
| | TAAACCTGTC | | | TTATGCCCAG | | |
| | T | | | C | | |
| 81 | TTACAAGACA | 18224 | ACCAA | GCCAGGGCTG | 18578 | CAGGG |
| | GGTTTAAGGA | | | GGCATAAAAG | | |
| | G | | | T | | |
| 82 | TCTCCACATG | 18225 | TTGG | CCCTGACTTT | 18579 | CTGG |
| | CCCAGTTTCT | | | TATGCCCAGC | | |
| | A | | | C | | |
| 83 | TCTCCACATG | 18226 | TTGG | CCCTGACTTT | 18580 | CTGG |
| | CCCAGTTTCT | | | TATGCCCAGC | | |
| | A | | | C | | |
| 86 | TTGGTCTCCT | 18227 | TTG | CCTGACTTTT | 18581 | CTG |
| | TAAACCTGTC | | | ATGCCCAGCC | | |
| 87 | ATTGGTCTCC | 18228 | CTT | CCCTGACTTT | 18582 | CCT |
| | TTAAACCTGT | | | TATGCCCAGC | | |
| 88 | ACAAGACAGG | 18229 | CCA | CCAGGGCTGG | 18583 | CAG |
| | TTTAAGGAGA | | | GCATAAAAGT | | |
| 94 | TTGGTCTCCT | 18230 | TGTAA | GCCCTGACTT | 18584 | CCTGG |
| | TAAACCTGTC | | | TTATGCCCAG | | |
| | T | | | C | | |
| 95 | TGGTCTCCTT | 18231 | TG | CTGACTTTTA | 18585 | TG |
| | AAACCTGTCT | | | TGCCCAGCCC | | |
| 99 | TTGGTCTCCT | 18232 | TTG | CCTGACTTTT | 18586 | CTG |
| | TAAACCTGTC | | | ATGCCCAGCC | | |
| 100 | CAAGACAGGT | 18233 | CAA | CAGGGCTGGG | 18587 | AGG |
| | TTAAGGAGAC | | | CATAAAAGTC | | |
| 103 | TTGGTCTCCT | 18234 | TTG | CTGACTTTTA | 18588 | TGG |
| | TAAACCTGTC | | | TGCCCAGCCC | | |
| 104 | TGGTCTCCTT | 18235 | TGT | CTGACTTTTA | 18589 | TGG |
| | AAACCTGTCT | | | TGCCCAGCCC | | |
| 105 | AAGACAGGTT | 18236 | AAT | AGGGCTGGGC | 18590 | GGG |
| | TAAGGAGACC | | | ATAAAAGTCA | | |
| 106 | agacAGGTTT | 18237 | GAA | agccAGGGCT | 18591 | AGG |
| | AAGGAGACCA | | ACT | GGGCATAAAA | | GCA |
| | ATA | | GG | GTC | | GA |
| 107 | agacAGGTTT | 18238 | GAA | agccAGGGCT | 18592 | AGG |
| | AAGGAGACCA | | ACT | GGGCATAAAA | | GCA |
| | ATA | | GG | GTC | | GA |
| 108 | AGACAGGTTT | 18239 | ATA | GGGCTGGGCA | 18593 | GGC |
| | AAGGAGACCA | | | TAAAAGTCAG | | |
| 109 | GGTCTCCTTA | 18240 | GTA | TGACTTTTAT | 18594 | GGC |
| | AACCTGTCTT | | | GCCCAGCCCT | | |
| 110 | GACAGGTTTA | 18241 | TAG | GGCTGGGCAT | 18595 | GCA |
| | AGGAGACCAA | | | AAAAGTCAGG | | |
| 111 | GTCTCCTTAA | 18242 | TAA | GACTTTTATG | 18596 | GCT |
| | ACCTGTCTTG | | | CCCAGCCCTG | | |
| 112 | agacAGGTTT | 18243 | GAA | gggcTGGGCA | 18597 | AGA |
| | AAGGAGACCA | | ACT | TAAAAGTCAG | | GC |
| | ATA | | GG | GGC | | |
| 113 | tcAAGGTTAC | 18244 | GAG | agGGCTGGGC | 18598 | AGA |
| | AAGACAGGTT | | ACC | ATAAAAGTCA | | GCC |
| | TAAG | | | GGGC | | |
| 114 | ACAGGTTTAA | 18245 | AGA | GCTGGGCATA | 18599 | CAG |
| | GGAGACCAAT | | | AAAGTCAGGG | | |
| 115 | TCTCCTTAAA | 18246 | AAC | ACTTTTATGC | 18600 | CTC |
| | CCTGTCTTGT | | | CCAGCCCTGG | | |
| 116 | agacAGGTTT | 18247 | GAA | gggcTGGGCA | 18601 | AGA |
| | AAGGAGACCA | | ACT | TAAAAGTCAG | | GC |
| | ATA | | GG | GGC | | |
| 117 | CAGGTTTAAG | 18248 | GAA | CTGGGCATAA | 18602 | AGA |
| | GAGACCAATA | | | AAGTCAGGGC | | |
| 118 | CTCCTTAAAC | 18249 | ACC | CTTTTATGCC | 18603 | TCC |
| | CTGTCTTGTA | | | CAGCCCTGGC | | |
| 119 | ttggTCTCCT | 18250 | TAA | gactTTTATG | 18604 | CCT |
| | TAAACCTGTC | | CCT | CCCAGCCCTG | | GC |
| | TTG | | TG | GCT | | |
| 120 | ttggTCTCCT | 18251 | TAA | gactTTTATG | 18605 | CCT |
| | TAAACCTGTC | | CCT | CCCAGCCCTG | | GC |
| | TTG | | TG | GCT | | |
| 121 | taTTGGTCTC | 18252 | GTA | tgACTTTTAT | 18606 | CCT |
| | CTTAAACCTG | | ACC | GCCCAGCCCT | | GCC |
| | TCTT | | | GGCT | | |
| 122 | TCCTTAAACC | 18253 | CCT | TTTTATGCCC | 18607 | CCT |
| | TGTCTTGTAA | | | AGCCCTGGCT | | |
| 123 | AGGTTTAAGG | 18254 | AAA | TGGGCATAAA | 18608 | GAG |
| | AGACCAATAG | | | AGTCAGGGCA | | |
| 124 | ttggTCTCCT | 18255 | TAA | gactTTTATG | 18609 | CCT |
| | TAAACCTGTC | | CCT | CCCAGCCCTG | | GC |
| | TTG | | TG | GCT | | |
| 125 | agacAGGTTT | 18256 | GAA | ggctGGGCAT | 18610 | GAG |
| | AAGGAGACCA | | ACT | AAAAGTCAGG | | CC |
| | ATA | | GG | GCA | | |
| 126 | ttggTCTCCT | 18257 | TAA | gactTTTATG | 18611 | CCT |
| | TAAACCTGTC | | CCT | CCCAGCCCTG | | GC |
| | TTG | | TG | GCT | | |
| 128 | TTAAACCTGT | 18258 | TG | TTATGCCCAG | 18612 | TG |
| | CTTGTAACCT | | | CCCTGGCTCC | | |
| 131 | GGTTTAAGGA | 18259 | AAC | GGGCATAAAA | 18613 | AGC |
| | GACCAATAGA | | | GTCAGGGCAG | | |
| 133 | CCTTAAACCT | 18260 | CTT | TTTATGCCCA | 18614 | CTG |
| | GTCTTGTAAC | | | GCCCTGGCTC | | |
| 140 | CTTAAACCTG | 18261 | TTG | TTTATGCCCA | 18615 | CTG |
| | TCTTGTAACC | | | GCCCTGGCTC | | |
| 141 | CTTAAACCTG | 18262 | TTG | TTATGCCCAG | 18616 | TGC |
| | TCTTGTAACC | | | CCCTGGCTCC | | |
| 142 | TTAAGGAGAC | 18263 | TG | GGGCATAAAA | 18617 | AG |
| | CAATAGAAAC | | | GTCAGGGCAG | | |
| 146 | GTTTAAGGAG | 18264 | ACT | GGCATAAAAG | 18618 | GCC |
| | ACCAATAGAA | | | TCAGGGCAGA | | |
| 147 | ccttAAACCT | 18265 | GAT | ctttTATGCC | 18619 | TGCCC |
| | GTCTTGTAAC | | ACC | CAGCCCTGGC | | |
| | CTT | | AA | TCC | | |
| 154 | TCCTTAAACC | 18266 | CTT | GCCCTGACTT | 18620 | CCTGG |
| | TGTCTTGTAA | | GAT | TTATGCCCAG | | |
| | C | | | C | | |
| 157 | TTTAAGGAGA | 18267 | CTG | TGGGCATAAA | 18621 | GAG |
| | CCAATAGAAA | | | AGTCAGGGCA | | |
| 158 | TTTAAGGAGA | 18268 | CTG | GCATAAAAGT | 18622 | CCA |
| | CCAATAGAAA | | | CAGGGCAGAG | | |
| 159 | TTAAACCTGT | 18269 | TGA | TATGCCCAGC | 18623 | GCC |
| | CTTGTAACCT | | | CCTGGCTCCT | | |
| 160 | ggttTAAGGA | 18270 | TGG | tgggCATAAA | 18624 | CCA |
| | GACCAATAGA | | GC | AGTCAGGGCA | | TC |
| | AAC | | | GAG | | |
| 165 | GTTTAAGGAG | 18271 | CTG | GGCTGGGCAT | 18625 | CAG |
| | ACCAATAGAA | | GG | AAAAGTCAGG | | AG |
| | A | | | G | | |
| 166 | TTTAAGGAGA | 18272 | TGGG | GCTGGGCATA | 18626 | AGAG |
| | CCAATAGAAA | | | AAAGTCAGGG | | |
| | C | | | C | | |
| 167 | TTAAGGAGAC | 18273 | TGG | CATAAAAGTC | 18627 | CAT |
| | CAATAGAAAC | | | AGGGCAGAGC | | |
| 168 | TAAACCTGTC | 18274 | GAT | ATGCCCAGCC | 18628 | CCC |
| | TTGTAACCTT | | | CTGGCTCCTG | | |
| 172 | GTTTAAGGAG | 18275 | CTG | GGCTGGGCAT | 18629 | CAG |
| | ACCAATAGAA | | GG | AAAAGTCAGG | | AG |
| | A | | | G | | |
| 173 | TAAGGAGACC | 18276 | GG | GGGCATAAAA | 18630 | AG |
| | AATAGAAACT | | | GTCAGGGCAG | | |
| 177 | TAAGGAGACC | 18277 | GGG | ATAAAAGTCA | 18631 | ATC |
| | AATAGAAACT | | | GGGCAGAGCC | | |
| 178 | AAACCTGTCT | 18278 | ATA | TGCCCAGCCC | 18632 | CCT |
| | TGTAACCTTG | | | TGGCTCCTGC | | |
| 186 | TAAGGAGACC | 18279 | GGG | AGTCAGGGCA | 18633 | TTG |
| | AATAGAAACT | | | GAGCCATCTA | | |
| 187 | TAAGGAGACC | 18280 | GGG | AGGGCTGGGC | 18634 | GGG |
| | AATAGAAACT | | | ATAAAAGTCA | | |
| 190 | AAGGAGACCA | 18281 | GGC | TAAAAGTCAG | 18635 | TCT |
| | ATAGAAACTG | | | GGCAGAGCCA | | |
| 191 | AAGGAGACCA | 18282 | GG | GTCAGGGCAG | 18636 | TG |
| | ATAGAAACTG | | | AGCCATCTAT | | |
| 194 | AACCTGTCTT | 18283 | TAC | GCCCAGCCCT | 18637 | CTC |
| | GTAACCTTGA | | | GGCTCCTGCC | | |
| 195 | cttaAACCTG | 18284 | ATA | tatgCCCAGC | 18638 | CTC |
| | TCTTGTAACC | | CC | CCTGGCTCCT | | CC |
| | TTG | | | GCC | | |
| 196 | cttaAACCTG | 18285 | ATA | tatgCCCAGC | 18639 | CTC |
| | TCTTGTAACC | | CC | CCTGGCTCCT | | CC |
| | TTG | | | GCC | | |
| 198 | TTTAAGGAGA | 18286 | TGGG | CCAGGGCTGG | 18640 | AGGG |
| | CCAATAGAAA | | | GCATAAAAGT | | |
| | C | | | C | | |
| 199 | TTTAAGGAGA | 18287 | TGGG | GCTGGGCATA | 18641 | AGAG |
| | CCAATAGAAA | | | AAAGTCAGGG | | |
| | C | | | C | | |
| 202 | TAAGGAGACC | 18288 | GGG | AGTCAGGGCA | 18642 | TTG |
| | AATAGAAACT | | | GAGCCATCTA | | |
| 203 | AGGAGACCAA | 18289 | GCA | AAAAGTCAGG | 18643 | CTA |
| | TAGAAACTGG | | | GCAGAGCCAT | | |
| 204 | TTAAACCTGT | 18290 | TG | GCCCTGGCTC | 18644 | TG |
| | CTTGTAACCT | | | CTGCCCTCCC | | |
| 208 | ACCTGTCTTG | 18291 | ACC | CCCAGCCCTG | 18645 | TCC |
| | TAACCTTGAT | | | GCTCCTGCCC | | |
| 209 | ggttTAAGGA | 18292 | TGG | taaaAGTCAG | 18646 | ATT |
| | GACCAATAGA | | GC | GGCAGAGCCA | | GC |
| | AAC | | | TCT | | |
| 210 | ggttTAAGGA | 18293 | TGG | taaaAGTCAG | 18647 | ATT |
| | GACCAATAGA | | GC | GGCAGAGCCA | | GC |
| | AAC | | | TCT | | |
| 212 | GAGACCAATA | 18294 | TGT | GGCTGGGCAT | 18648 | CAG |
| | GAAACTGGGC | | GG | AAAAGTCAGG | | AG |
| | A | | | G | | |
| 215 | CTTGTAACCT | 18295 | CTG | AGCCCTGGCT | 18649 | CTG |
| | TGATACCAAC | | | CCTGCCCTCC | | |
| 216 | CCTGTCTTGT | 18296 | CCA | CCAGCCCTGG | 18650 | CCC |
| | AACCTTGATA | | | CTCCTGCCCT | | |
| 217 | GGAGACCAAT | 18297 | CAT | AAAGTCAGGG | 18651 | TAT |
| | AGAAACTGGG | | | CAGAGCCATC | | |
| 221 | TTGTAACCTT | 18298 | TG | GCCCTGGCTC | 18652 | TG |
| | GATACCAACC | | | CTGCCCTCCC | | |
| 224 | GAGACCAATA | 18299 | ATG | AAGTCAGGGC | 18653 | ATT |
| | GAAACTGGGC | | | AGAGCCATCT | | |
| 226 | CTGTCTTGTA | 18300 | CAA | CAGCCCTGGC | 18654 | CCT |
| | ACCTTGATAC | | | TCCTGCCCTC | | |
| 227 | aaccTGTCTT | 18301 | CAA | gcccAGCCCT | 18655 | CCTGC |
| | GTAACCTTGA | | CC | GGCTCCTGCC | | |
| | TAC | | | CTC | | |
| 232 | CTTGTAACCT | 18302 | CTG | AGCCCTGGCT | 18656 | CTG |
| | TGATACCAAC | | | CCTGCCCTCC | | |
| 233 | ACCTTGATAC | 18303 | AGG | GCTCCTGCCC | 18657 | TGG |
| | CAACCTGCCC | | | TCCCTGCTCC | | |
| 236 | TGTCTTGTAA | 18304 | AAC | AGCCCTGGCT | 18658 | CTG |
| | CCTTGATACC | | | CCTGCCCTCC | | |
| 237 | TTGTAACCTT | 18305 | TG | GCCCTGGCTC | 18659 | TG |
| | GATACCAACC | | | CTGCCCTCCC | | |
| 240 | AGACCAATAG | 18306 | TGT | AGTCAGGGCA | 18660 | TTG |
| | AAACTGGGCA | | | GAGCCATCTA | | |
| 241 | gaccAATAGA | 18307 | GAG | taaaAGTCAG | 18661 | ATTGC |
| | AACTGGGCAT | | ACA | GGCAGAGCCA | | |
| | GTG | | GA | TCT | | |
| 243 | AGACCAATAG | 18308 | GTGGA | GGCTGGGCAT | 18662 | CAGAG |
| | AAACTGGGCA | | | AAAAGTCAGG | | |
| | T | | | G | | |
| 244 | TAACCTTGAT | 18309 | CAGG | TGGCTCCTGC | 18663 | CTGG |
| | ACCAACCTGC | | | CCTCCCTGCT | | |
| | C | | | C | | |
| 245 | GTAACCTTGA | 18310 | CCAG | TGGCTCCTGC | 18664 | CTGG |
| | TACCAACCTG | | | CCTCCCTGCT | | |
| | C | | | C | | |
| 248 | CTTGTAACCT | 18311 | CTG | AGCCCTGGCT | 18665 | CTG |
| | TGATACCAAC | | | CCTGCCCTCC | | |
| 249 | GTCTTGTAAC | 18312 | ACC | GCCCTGGCTC | 18666 | TGC |
| | CTTGATACCA | | | CTGCCCTCCC | | |
| 250 | AGACCAATAG | 18313 | TG | GTCAGGGCAG | 18667 | TG |
| | AAACTGGGCA | | | AGCCATCTAT | | |
| 254 | GACCAATAGA | 18314 | GTG | GTCAGGGCAG | 18668 | TGC |
| | AACTGGGCAT | | | AGCCATCTAT | | |
| 258 | TGTAACCTTG | 18315 | CCCAG | CTGGCTCCTG | 18669 | CCT |
| | ATACCAACCT | | | CCCTCCCTGC | | GG |
| | G | | | T | | |
| 259 | TGTAACCTTG | 18316 | CCCAG | CTGGCTCCTG | 18670 | CCT |
| | ATACCAACCT | | | CCCTCCCTGC | | GG |
| | G | | | T | | |
| 262 | ACCAATAGAA | 18317 | TGG | AGTCAGGGCA | 18671 | TTG |
| | ACTGGGCATG | | | GAGCCATCTA | | |
| 263 | ACCAATAGAA | 18318 | TGG | TCAGGGCAGA | 18672 | GCT |
| | ACTGGGCATG | | | GCCATCTATT | | |
| 264 | TCTTGTAACC | 18319 | CCT | CCCTGGCTCC | 18673 | GCT |
| | TTGATACCAA | | | TGCCCTCCCT | | |
| 267 | ACCAATAGAA | 18320 | GGAG | GCTGGGCATA | 18674 | AGAG |
| | ACTGGGCATG | | | AAAGTCAGGG | | |
| | T | | | C | | |
| 268 | CCAATAGAAA | 18321 | GGA | CAGGGCAGAG | 18675 | CTT |
| | CTGGGCATGT | | | CCATCTATTG | | |
| 269 | CTTGTAACCT | 18322 | CTG | CCTGGCTCCT | 18676 | CTC |
| | TGATACCAAC | | | GCCCTCCCTG | | |
| 270 | ACCAATAGAA | 18323 | GGA | CATCTATTGC | 18677 | TCT |
| | ACTGGGCATG | | GA | TTACATTTGC | | GA |
| | T | | | T | | |
| 271 | ACCAATAGAA | 18324 | GGA | CATCTATTGC | 18678 | TCT |
| | ACTGGGCATG | | GA | TTACATTTGC | | GA |
| | T | | | T | | |
| 274 | CCAATAGAAA | 18325 | GG | GTCAGGGCAG | 18679 | TG |
| | CTGGGCATGT | | | AGCCATCTAT | | |
| 278 | CAATAGAAAC | 18326 | GAG | AGGGCAGAGC | 18680 | TTA |
| | TGGGCATGTG | | | CATCTATTGC | | |
| 279 | TTGTAACCTT | 18327 | TGC | CTGGCTCCTG | 18681 | TCC |
| | GATACCAACC | | | CCCTCCCTGC | | |
| 283 | CAATAGAAAC | 18328 | GAG | GAGCCATCTA | 18682 | TTG |
| | TGGGCATGTG | | | TTGCTTACAT | | |
| 284 | ACCAATAGAA | 18329 | TGG | AGGGCTGGGC | 18683 | GGG |
| | ACTGGGCATG | | | ATAAAAGTCA | | |
| 287 | AATAGAAACT | 18330 | AGA | GGGCAGAGCC | 18684 | TAC |
| | GGGCATGTGG | | | ATCTATTGCT | | |
| 288 | AATAGAAACT | 18331 | AG | GTCAGGGCAG | 18685 | TG |
| | GGGCATGTGG | | | AGCCATCTAT | | |
| 291 | TGTAACCTTG | 18332 | GCC | TGGCTCCTGC | 18686 | CCT |
| | ATACCAACCT | | | CCTCCCTGCT | | |
| 294 | AGACCAATAG | 18333 | GTGG | CCAGGGCTGG | 18687 | AGGG |
| | AAACTGGGCA | | | GCATAAAAGT | | |
| | T | | | C | | |
| 295 | ATAGAAACTG | 18334 | ACAG | GCTGGGCATA | 18688 | AGAG |
| | GGCATGTGGA | | | AAAGTCAGGG | | |
| | G | | | C | | |
| 298 | CAATAGAAAC | 18335 | GAG | GAGCCATCTA | 18689 | TTG |
| | TGGGCATGTG | | | TTGCTTACAT | | |
| 299 | ACCAATAGAA | 18336 | TGG | AGGGCTGGGC | 18690 | GGG |
| | ACTGGGCATG | | | ATAAAAGTCA | | |
| 302 | ATAGAAACTG | 18337 | GAC | GGCAGAGCCA | 18691 | ACA |
| | GGCATGTGGA | | | TCTATTGCTT | | |
| 303 | AATAGAAACT | 18338 | AG | GTCAGGGCAG | 18692 | TG |
| | GGGCATGTGG | | | AGCCATCTAT | | |
| 306 | GTAACCTTGA | 18339 | CCC | GGCTCCTGCC | 18693 | CTG |
| | TACCAACCTG | | | CTCCCTGCTC | | |
| 307 | gaccAATAGA | 18340 | GAG | agtcAGGGCA | 18694 | CTT |
| | AACTGGGCAT | | ACA | GAGCCATCTA | | ACA |
| | GTG | | GA | TTG | | TT |
| 308 | gtctTGTAAC | 18341 | TGC | cagcCCTGGC | 18695 | GCT |
| | CTTGATACCA | | CCA | TCCTGCCCTC | | CCT |
| | ACC | | GG | CCT | | GG |
| 309 | gaccAATAGA | 18342 | GAG | agtcAGGGCA | 18696 | CTT |
| | AACTGGGCAT | | ACA | GAGCCATCTA | | ACA |
| | GTG | | GA | TTG | | TT |
| 310 | gtctTGTAAC | 18343 | TGC | cagcCCTGGC | 18697 | GCT |
| | CTTGATACCA | | CCA | TCCTGCCCTC | | CCT |
| | ACC | | GG | CCT | | GG |
| 312 | tgTAACCTTG | 18344 | AGG | ccCAGCCCTG | 18698 | TGC |
| | ATACCAACCT | | GCC | GCTCCTGCCC | | TCC |
| | GCCC | | | TCCC | | |
| 313 | aaTAGAAACT | 18345 | CAG | agGGCTGGGC | 18699 | CAG |
| | GGGCATGTGG | | AG | ATAAAAGTCA | | AG |
| | AGA | | | GGG | | |
| 314 | ATAGAAACTG | 18346 | ACA | CATCTATTGC | 18700 | TCT |
| | GGCATGTGGA | | GA | TTACATTTGC | | GA |
| | G | | | T | | |
| 315 | AGACCAATAG | 18347 | GTGG | CCAGGGCTGG | 18701 | AGGG |
| | AAACTGGGCA | | | GCATAAAAGT | | |
| | T | | | C | | |
| 316 | ATAGAAACTG | 18348 | ACAG | GCTGGGCATA | 18702 | AGAG |
| | GGCATGTGGA | | | AAAGTCAGGG | | |
| | G | | | C | | |
| 319 | AGAAACTGGG | 18349 | CAG | GAGCCATCTA | 18703 | TTG |
| | CATGTGGAGA | | | TTGCTTACAT | | |
| 320 | TAGAAACTGG | 18350 | ACA | GCAGAGCCAT | 18704 | CAT |
| | GCATGTGGAG | | | CTATTGCTTA | | |
| 321 | TAACCTTGAT | 18351 | CCA | GCTCCTGCCC | 18705 | TGG |
| | ACCAACCTGC | | | TCCCTGCTCC | | |
| 322 | gtaaCCTTGA | 18352 | AGG | cagcCCTGGC | 18706 | GCTC |
| | TACCAACCTG | | GC | TCCTGCCCTC | | CTGG |
| | CCC | | | CCT | | |
| 323 | gtaaCCTTGA | 18353 | AGG | cagcCCTGGC | 18707 | GCT |
| | TACCAACCTG | | GC | TCCTGCCCTC | | CCT |
| | CCC | | | CCT | | GG |
| 327 | TAGAAACTGG | 18354 | CAG | CATCTATTGC | 18708 | TCT |
| | GCATGTGGAG | | AG | TTACATTTGC | | GA |
| | A | | | T | | |
| 328 | ATAGAAACTG | 18355 | ACAG | GCTGGGCATA | 18709 | AGAG |
| | GGCATGTGGA | | | AAAGTCAGGG | | |
| | G | | | C | | |
| 329 | ACCTTGATAC | 18356 | AG | CTCCTGCCCT | 18710 | GG |
| | CAACCTGCCC | | | CCCTGCTCCT | | |
| 333 | AACCTTGATA | 18357 | CAG | CTCCTGCCCT | 18711 | GGG |
| | CCAACCTGCC | | | CCCTGCTCCT | | |
| 334 | AGAAACTGGG | 18358 | CAG | CAGAGCCATC | 18712 | ATT |
| | CATGTGGAGA | | | TATTGCTTAC | | |
| 340 | AGAAACTGGG | 18359 | AGA | CATCTATTGC | 18713 | TCTGA |
| | CATGTGGAGA | | GA | TTACATTTGC | | |
| | C | | | T | | |
| 343 | ACCTTGATAC | 18360 | AGG | CCTGCCCTCC | 18714 | GAG |
| | CAACCTGCCC | | | CTGCTCCTGG | | |
| 344 | ACCTTGATAC | 18361 | AGG | TCCTGCCCTC | 18715 | GGA |
| | CAACCTGCCC | | | CCTGCTCCTG | | |
| 345 | GAAACTGGGC | 18362 | AGA | AGAGCCATCT | 18716 | TTT |
| | ATGTGGAGAC | | | ATTGCTTACA | | |
| 346 | gtaaCCTTGA | 18363 | AGG | cagcCCTGGC | 18717 | GCT |
| | TACCAACCTG | | GC | TCCTGCCCTC | | CCT |
| | CCC | | | CCT | | GG |

[0601] Capital letters indicate “core nucleotides” while lower case letters indicate “flanking nucleotides.” Herein, when an RNA sequence (e.g., a gRNA to produce a second nick) is said to comprise a particular sequence (e.g., a sequence of Table 2 or a portion thereof) that comprises thymine (T), it is of course understood that the RNA sequence may (and frequently does) comprise uracil (U) in place of T. For instance, the RNA sequence may comprise U at every position shown as T in the sequence in Table 2. More specifically, the present disclosure provides an RNA sequence according to every gRNA spacer sequence shown in Table 2, wherein the RNA sequence has a U in place of each T in the sequence in Table 2.

[0602] In some embodiments, the systems and methods provided herein may comprise a template sequence listed in Table 4. Table 4 provides exemplary template RNA sequences (column 4) and optional second-nick gRNA sequences (column 5) designed to be paired with a gene modifying polypeptide to correct a mutation in the HBB gene. The templates in Table 4 are meant to exemplify the total sequence of: (1) gRNA spacer (e.g., for targeting for first strand nick), (2) gRNA scaffold, (3) heterologous object sequence, and (4) PBS sequence (e.g., for initiating TPRT at first strand nick).

TABLE 4
Exemplary template RNA sequences and second nick gRNA sequences
Table 4 provides design of RNA components of gene modifying systems for correcting the
pathogenic E6V mutation in HBB. The gRNA spacers from Table 1 were filtered, e.g.,
filtered by occurrence within 15 nt of the desired editing location and use of a Tier 1
Cas enzyme. For each gRNA ID, this table details the sequence of a complete template RNA,
optional second-nick gRNA, and Cas variant for use in a Cas-RT fusion gene modifying
polypeptide. For exemplification, PBS sequences and post-edit homology regions (after
the location of the edit) are set to 12 nt and 30 nt, respectively. Additionally, a
second-nick gRNA is selected with preference for a distance near 100 nt from the first
nick and a first preference for a design resulting in a PAM-in system, as described
elsewhere in this application.

| | | | | SEQ | | SEQ |
|---|---|---|---|---|---|---|
| | Cas | | | ID | | ID |
| ID | species | strand | Template RNA | NO | second-nick gRNA | NO |
| 1 | SauCas9KKH | − | TGGTGCATCTGACTCCTGTGGGTTT | 18895 | GCCCAGTTTCTATTGGTCTCCGTTT | 19072 |
| | | | TAGTACTCTGGAAACAGAATCTACT | | TAGTACTCTGGAAACAGAATCTACT | |
| | | | AAAACAAGGCAAAATGCCGTGTTTA | | AAAACAAGGCAAAATGCCGTGTTTA | |
| | | | TCTCGTCAACTTGTTGGCGAGAccc | | TCTCGTCAACTTGTTGGCGAGA | |
| | | | acagggcagtaacggcagacttctc | | | |
| | | | CTCAGGAGTCagat | | | |
| 2 | SauCas9KKH | − | TGGTGCATCTGACTCCTGTGGGTTT | 18896 | GCCCAGTTTCTATTGGTCTCCGTTT | 19073 |
| | | | TAGTACTCTGGAAACAGAATCTACT | | TAGTACTCTGGAAACAGAATCTACT | |
| | | | AAAACAAGGCAAAATGCCGTGTTTA | | AAAACAAGGCAAAATGCCGTGTTTA | |
| | | | TCTCGTCAACTTGTTGGCGAGAccc | | TCTCGTCAACTTGTTGGCGAGA | |
| | | | acagggcagtaacggcagacttctc | | | |
| | | | CTCAGGAGTCagat | | | |
| 5 | SpyCaS9- | − | GGTGCATCTGACTCCTGTGGGTTTT | 18897 | TCTATTGGTCTCCTTAAACCGTTTT | 19074 |
| | NG | | AGAGCTAGAAATAGCAAGTTAAAAT | | AGAGCTAGAAATAGCAAGTTAAAAT | |
| | | | AAGGCTAGTCCGTTATCAACTTGAA | | AAGGCTAGTCCGTTATCAACTTGAA | |
| | | | AAAGTGGCACCGAGTCGGTGCccca | | AAAGTGGCACCGAGTCGGTGC | |
| | | | cagggcagtaacggcagacttctcC | | | |
| | | | TCAGGAGTCagat | | | |
| 9 | SpyCas9- | − | GGTGCATCTGACTCCTGTGGGTTTT | 18898 | TTCTATTGGTCTCCTTAAACGTTTT | 19075 |
| | SpRY | | AGAGCTAGAAATAGCAAGTTAAAAT | | AGAGCTAGAAATAGCAAGTTAAAAT | |
| | | | AAGGCTAGTCCGTTATCAACTTGAA | | AAGGCTAGTCCGTTATCAACTTGAA | |
| | | | AAAGTGGCACCGAGTCGGTGCccca | | AAAGTGGCACCGAGTCGGTGC | |
| | | | cagggcagtaacggcagacttctcC | | | |
| | | | TCAGGAGTCagat | | | |
| 13 | SauCas9 | − | ccATGGTGCATCTGACTCCTGTGGT | 18899 | tgTAACCTTGATACCAACCTGCCGT | 19076 |
| | | | TTTAGTACTCTGGAAACAGAATCTA | | TTTAGTACTCTGGAAACAGAATCTA | |
| | | | CTAAAACAAGGCAAAATGCCGTGTT | | CTAAAACAAGGCAAAATGCCGTGTT | |
| | | | TATCTCGTCAACTTGTTGGCGAGAc | | TATCTCGTCAACTTGTTGGCGAGA | |
| | | | cacagggcagtaacggcagacttct | | | |
| | | | cCTCAGGAGTCAgatg | | | |
| 14 | SauCas9KKH | − | ATGGTGCATCTGACTCCTGTGGTTT | 18900 | TTGGTCTCCTTAAACCTGTCTGTTT | 19077 |
| | | | TAGTACTCTGGAAACAGAATCTACT | | TAGTACTCTGGAAACAGAATCTACT | |
| | | | AAAACAAGGCAAAATGCCGTGTTTA | | AAAACAAGGCAAAATGCCGTGTTTA | |
| | | | TCTCGTCAACTTGTTGGCGAGAcca | | TCTCGTCAACTTGTTGGCGAGA | |
| | | | cagggcagtaacggcagacttctcC | | | |
| | | | TCAGGAGTCAgatg | | | |
| 15 | SauCas9 | + | gcAGTAACGGCAGACTTCTCCACGT | 18901 | gaGCCAGGGCTGGGCATAAAAGTGT | 19078 |
| | | | TTTAGTACTCTGGAAACAGAATCTA | | TTTAGTACTCTGGAAACAGAATCTA | |
| | | | CTAAAACAAGGCAAAATGCCGTGTT | | CTAAAACAAGGCAAAATGCCGTGTT | |
| | | | TATCTCGTCAACTTGTTGGCGAGAa | | TATCTCGTCAACTTGTTGGCGAGA | |
| | | | cagacaccatggtgcatctgactcc | | | |
| | | | tGAGGAGAAGTCtgcc | | | |
| 16 | SauCas9KKH | + | AGTAACGGCAGACTTCTCCACGTTT | 18902 | GAGCCAGGGCTGGGCATAAAAGTTT | 19079 |
| | | | TAGTACTCTGGAAACAGAATCTACT | | TAGTACTCTGGAAACAGAATCTACT | |
| | | | AAAACAAGGCAAAATGCCGTGTTTA | | AAAACAAGGCAAAATGCCGTGTTTA | |
| | | | TCTCGTCAACTTGTTGGCGAGAaca | | TCTCGTCAACTTGTTGGCGAGA | |
| | | | gacaccatggtgcatctgactcctG | | | |
| | | | AGGAGAAGTCtgcc | | | |
| 17 | SauCas9 | + | gcAGTAACGGCAGACTTCTCCACGT | 18903 | gaGCCAGGGCTGGGCATAAAAGTGT | 19080 |
| | | | TTTAGTACTCTGGAAACAGAATCTA | | TTTAGTACTCTGGAAACAGAATCTA | |
| | | | CTAAAACAAGGCAAAATGCCGTGTT | | CTAAAACAAGGCAAAATGCCGTGTT | |
| | | | TATCTCGTCAACTTGTTGGCGAGAa | | TATCTCGTCAACTTGTTGGCGAGA | |
| | | | cagacaccatggtgcatctgactcc | | | |
| | | | tGAGGAGAAGTCtgcc | | | |
| 18 | SauCas9KKH | + | AGTAACGGCAGACTTCTCCACGTTT | 18904 | GAGCCAGGGCTGGGCATAAAAGTTT | 19081 |
| | | | TAGTACTCTGGAAACAGAATCTACT | | TAGTACTCTGGAAACAGAATCTACT | |
| | | | AAAACAAGGCAAAATGCCGTGTTTA | | AAAACAAGGCAAAATGCCGTGTTTA | |
| | | | TCTCGTCAACTTGTTGGCGAGAaca | | TCTCGTCAACTTGTTGGCGAGA | |
| | | | gacaccatggtgcatctgactcctG | | | |
| | | | AGGAGAAGTCtgcc | | | |
| 23 | ScaCas9- | − | TGGTGCATCTGACTCCTGTGGTTTT | 18905 | TTCTATTGGTCTCCTTAAACGTTTT | 19082 |
| | Sc++ | | AGAGCTAGAAATAGCAAGTTAAAAT | | AGAGCTAGAAATAGCAAGTTAAAAT | |
| | | | AAGGCTAGTCCGTTATCAACTTGAA | | AAGGCTAGTCCGTTATCAACTTGAA | |
| | | | AAAGTGGCACCGAGTCGGTGCccac | | AAAGTGGCACCGAGTCGGTGC | |
| | | | agggcagtaacggcagacttctcCT | | | |
| | | | CAGGAGTCAgatg | | | |
| 24 | SpyCas9- | − | TGGTGCATCTGACTCCTGTGGTTTT | 18906 | TCTATTGGTCTCCTTAAACCGTTTT | 19083 |
| | SpRY | | AGAGCTAGAAATAGCAAGTTAAAAT | | AGAGCTAGAAATAGCAAGTTAAAAT | |
| | | | AAGGCTAGTCCGTTATCAACTTGAA | | AAGGCTAGTCCGTTATCAACTTGAA | |
| | | | AAAGTGGCACCGAGTCGGTGCccac | | AAAGTGGCACCGAGTCGGTGC | |
| | | | agggcagtaacggcagacttctcCT | | | |
| | | | CAGGAGTCAgatg | | | |
| 27 | ScaCas9- | + | GTAACGGCAGACTTCTCCACGTTTT | 18907 | GGAGCCAGGGCTGGGCATAAGTTTT | 19084 |
| | Sc++ | | AGAGCTAGAAATAGCAAGTTAAAAT | | AGAGCTAGAAATAGCAAGTTAAAAT | |
| | | | AAGGCTAGTCCGTTATCAACTTGAA | | AAGGCTAGTCCGTTATCAACTTGAA | |
| | | | AAAGTGGCACCGAGTCGGTGCacag | | AAAGTGGCACCGAGTCGGTGC | |
| | | | acaccatggtgcatctgactectGA | | | |
| | | | GGAGAAGTCtgcc | | | |
| 28 | SpyCas9 | + | GTAACGGCAGACTTCTCCACGTTTT | 18908 | CAGGGCTGGGCATAAAAGTCGTTTT | 19085 |
| | | | AGAGCTAGAAATAGCAAGTTAAAAT | | AGAGCTAGAAATAGCAAGTTAAAAT | |
| | | | AAGGCTAGTCCGTTATCAACTTGAA | | AAGGCTAGTCCGTTATCAACTTGAA | |
| | | | AAAGTGGCACCGAGTCGGTGCacag | | AAAGTGGCACCGAGTCGGTGC | |
| | | | acaccatggtgcatctgactcctGA | | | |
| | | | GGAGAAGTCtgcc | | | |
| 31 | SpyCas9- | + | GTAACGGCAGACTTCTCCACGTTTT | 18909 | GAGCCAGGGCTGGGCATAAAGTTTT | 19086 |
| | SpRY | | AGAGCTAGAAATAGCAAGTTAAAAT | | AGAGCTAGAAATAGCAAGTTAAAAT | |
| | | | AAGGCTAGTCCGTTATCAACTTGAA | | AAGGCTAGTCCGTTATCAACTTGAA | |
| | | | AAAGTGGCACCGAGTCGGTGCacag | | AAAGTGGCACCGAGTCGGTGC | |
| | | | acaccatggtgcatctgactcctGA | | | |
| | | | GGAGAAGTCtgcc | | | |
| 32 | SpyCas9- | + | GTAACGGCAGACTTCTCCACGTTTT | 18910 | GAGCCAGGGCTGGGCATAAAGTTTT | 19087 |
| | NG | | AGAGCTAGAAATAGCAAGTTAAAAT | | AGAGCTAGAAATAGCAAGTTAAAAT | |
| | | | AAGGCTAGTCCGTTATCAACTTGAA | | AAGGCTAGTCCGTTATCAACTTGAA | |
| | | | AAAGTGGCACCGAGTCGGTGCacag | | AAAGTGGCACCGAGTCGGTGC | |
| | | | acaccatggtgcatctgactectGA | | | |
| | | | GGAGAAGTCtgcc | | | |
| 39 | SauCas9 | + | ggCAGTAACGGCAGACTTCTCCAGT | 18911 | gaGCCAGGGCTGGGCATAAAAGTGT | 19088 |
| | | | TTTAGTACTCTGGAAACAGAATCTA | | TTTAGTACTCTGGAAACAGAATCTA | |
| | | | CTAAAACAAGGCAAAATGCCGTGTT | | CTAAAACAAGGCAAAATGCCGTGTT | |
| | | | TATCTCGTCAACTTGTTGGCGAGAc | | TATCTCGTCAACTTGTTGGCGAGA | |
| | | | agacaccatggtgcatctgactcct | | | |
| | | | GAGGAGAAGTCTgccg | | | |
| 40 | SauCas9KKH | + | CAGTAACGGCAGACTTCTCCAGTTT | 18912 | GAGCCAGGGCTGGGCATAAAAGTTT | 19089 |
| | | | TAGTACTCTGGAAACAGAATCTACT | | TAGTACTCTGGAAACAGAATCTACT | |
| | | | AAAACAAGGCAAAATGCCGTGTTTA | | AAAACAAGGCAAAATGCCGTGTTTA | |
| | | | TCTCGTCAACTTGTTGGCGAGAcag | | TCTCGTCAACTTGTTGGCGAGA | |
| | | | acaccatggtgcatctgactcctGA | | | |
| | | | GGAGAAGTCTgccg | | | |
| 41 | SauCas9KKH | − | CATGGTGCATCTGACTCCTGTGTTT | 18913 | TTGGTCTCCTTAAACCTGTCTGTTT | 19090 |
| | | | TAGTACTCTGGAAACAGAATCTACT | | TAGTACTCTGGAAACAGAATCTACT | |
| | | | AAAACAAGGCAAAATGCCGTGTTTA | | AAAACAAGGCAAAATGCCGTGTTTA | |
| | | | TCTCGTCAACTTGTTGGCGAGAcac | | TCTCGTCAACTTGTTGGCGAGA | |
| | | | agggcagtaacggcagacttctcCT | | | |
| | | | CAGGAGTCAGatgc | | | |
| 42 | SauriCas9 | + | CAGTAACGGCAGACTTCTCCAGTTT | 18914 | GCCAGGGCTGGGCATAAAAGTGTTT | 19091 |
| | | | TAGTACTCTGGAAACAGAATCTACT | | TAGTACTCTGGAAACAGAATCTACT | |
| | | | AAAACAAGGCAAAATGCCGTGTTTA | | AAAACAAGGCAAAATGCCGTGTTTA | |
| | | | TCTCGTCAACTTGTTGGCGAGAcag | | TCTCGTCAACTTGTTGGCGAGA | |
| | | | acaccatggtgcatctgactcctGA | | | |
| | | | GGAGAAGTCTgccg | | | |
| 43 | SauriCas9- | + | CAGTAACGGCAGACTTCTCCAGTTT | 18915 | AGCCAGGGCTGGGCATAAAAGGTTT | 19092 |
| | KKH | | TAGTACTCTGGAAACAGAATCTACT | | TAGTACTCTGGAAACAGAATCTACT | |
| | | | AAAACAAGGCAAAATGCCGTGTTTA | | AAAACAAGGCAAAATGCCGTGTTTA | |
| | | | TCTCGTCAACTTGTTGGCGAGAcag | | TCTCGTCAACTTGTTGGCGAGA | |
| | | | acaccatggtgcatctgactcctGA | | | |
| | | | GGAGAAGTCTgccg | | | |
| 44 | SauriCas9- | − | CATGGTGCATCTGACTCCTGTGTTT | 18916 | TCTCCACATGCCCAGTTTCTAGTTT | 19093 |
| | KKH | | TAGTACTCTGGAAACAGAATCTACT | | TAGTACTCTGGAAACAGAATCTACT | |
| | | | AAAACAAGGCAAAATGCCGTGTTTA | | AAAACAAGGCAAAATGCCGTGTTTA | |
| | | | TCTCGTCAACTTGTTGGCGAGAcac | | TCTCGTCAACTTGTTGGCGAGA | |
| | | | agggcagtaacggcagacttctcCT | | | |
| | | | CAGGAGTCAGatgc | | | |
| 48 | ScaCas9- | + | AGTAACGGCAGACTTCTCCAGTTTT | 18917 | CCAGGGCTGGGCATAAAAGTGTTTT | 19094 |
| | Sc++ | | AGAGCTAGAAATAGCAAGTTAAAAT | | AGAGCTAGAAATAGCAAGTTAAAAT | |
| | | | AAGGCTAGTCCGTTATCAACTTGAA | | AAGGCTAGTCCGTTATCAACTTGAA | |
| | | | AAAGTGGCACCGAGTCGGTGCcaga | | AAAGTGGCACCGAGTCGGTGC | |
| | | | caccatggtgcatctgactectGAG | | | |
| | | | GAGAAGTCTgccg | | | |
| 49 | SpyCas9- | + | AGTAACGGCAGACTTCTCCAGTTTT | 18918 | AGCCAGGGCTGGGCATAAAAGTTTT | 19095 |
| | SpRY | | AGAGCTAGAAATAGCAAGTTAAAAT | | AGAGCTAGAAATAGCAAGTTAAAAT | |
| | | | AAGGCTAGTCCGTTATCAACTTGAA | | AAGGCTAGTCCGTTATCAACTTGAA | |
| | | | AAAGTGGCACCGAGTCGGTGCcaga | | AAAGTGGCACCGAGTCGGTGC | |
| | | | caccatggtgcatctgactcctGAG | | | |
| | | | GAGAAGTCTgccg | | | |
| 50 | SpyCas9- | − | ATGGTGCATCTGACTCCTGTGTTTT | 18919 | TCTATTGGTCTCCTTAAACCGTTTT | 19096 |
| | NG | | AGAGCTAGAAATAGCAAGTTAAAAT | | AGAGCTAGAAATAGCAAGTTAAAAT | |
| | | | AAGGCTAGTCCGTTATCAACTTGAA | | AAGGCTAGTCCGTTATCAACTTGAA | |
| | | | AAAGTGGCACCGAGTCGGTGCcaca | | AAAGTGGCACCGAGTCGGTGC | |
| | | | gggcagtaacggcagacttctcCTC | | | |
| | | | AGGAGTCAGatgc | | | |
| 54 | SpyCas9- | − | ATGGTGCATCTGACTCCTGTGTTTT | 18920 | CTATTGGTCTCCTTAAACCTGTTTT | 19097 |
| | SpRY | | AGAGCTAGAAATAGCAAGTTAAAAT | | AGAGCTAGAAATAGCAAGTTAAAAT | |
| | | | AAGGCTAGTCCGTTATCAACTTGAA | | AAGGCTAGTCCGTTATCAACTTGAA | |
| | | | AAAGTGGCACCGAGTCGGTGCcaca | | AAAGTGGCACCGAGTCGGTGC | |
| | | | gggcagtaacggcagacttctcCTC | | | |
| | | | AGGAGTCAGatgc | | | |
| 59 | SauCas9 | − | caCCATGGTGCATCTGACTCCTGGT | 18921 | tgTAACCTTGATACCAACCTGCCGT | 19098 |
| | | | TTTAGTACTCTGGAAACAGAATCTA | | TTTAGTACTCTGGAAACAGAATCTA | |
| | | | CTAAAACAAGGCAAAATGCCGTGTT | | CTAAAACAAGGCAAAATGCCGTGTT | |
| | | | TATCTCGTCAACTTGTTGGCGAGAa | | TATCTCGTCAACTTGTTGGCGAGA | |
| | | | cagggcagtaacggcagacttctcC | | | |
| | | | TCAGGAGTCAGAtgca | | | |
| 60 | SauCas9KKH | − | CCATGGTGCATCTGACTCCTGGTTT | 18922 | TTGGTCTCCTTAAACCTGTCTGTTT | 19099 |
| | | | TAGTACTCTGGAAACAGAATCTACT | | TAGTACTCTGGAAACAGAATCTACT | |
| | | | AAAACAAGGCAAAATGCCGTGTTTA | | AAAACAAGGCAAAATGCCGTGTTTA | |
| | | | TCTCGTCAACTTGTTGGCGAGAaca | | TCTCGTCAACTTGTTGGCGAGA | |
| | | | gggcagtaacggcagacttctcCTC | | | |
| | | | AGGAGTCAGAtgca | | | |
| 61 | SauCas9KKH | + | GCAGTAACGGCAGACTTCTCCGTTT | 18923 | AGCCAGGGCTGGGCATAAAAGGTTT | 19100 |
| | | | TAGTACTCTGGAAACAGAATCTACT | | TAGTACTCTGGAAACAGAATCTACT | |
| | | | AAAACAAGGCAAAATGCCGTGTTTA | | AAAACAAGGCAAAATGCCGTGTTTA | |
| | | | TCTCGTCAACTTGTTGGCGAGAaga | | TCTCGTCAACTTGTTGGCGAGA | |
| | | | caccatggtgcatctgactcctGAG | | | |
| | | | GAGAAGTCTGccgt | | | |
| 62 | SauriCas9- | + | GCAGTAACGGCAGACTTCTCCGTTT | 18924 | AGCCAGGGCTGGGCATAAAAGGTTT | 19101 |
| | KKH | | TAGTACTCTGGAAACAGAATCTACT | | TAGTACTCTGGAAACAGAATCTACT | |
| | | | AAAACAAGGCAAAATGCCGTGTTTA | | AAAACAAGGCAAAATGCCGTGTTTA | |
| | | | TCTCGTCAACTTGTTGGCGAGAaga | | TCTCGTCAACTTGTTGGCGAGA | |
| | | | caccatggtgcatctgactcctGAG | | | |
| | | | GAGAAGTCTGccgt | | | |
| 65 | ScaCas9- | − | CATGGTGCATCTGACTCCTGGTTTT | 18925 | TTGGTCTCCTTAAACCTGTCGTTTT | 19102 |
| | Sc++ | | AGAGCTAGAAATAGCAAGTTAAAAT | | AGAGCTAGAAATAGCAAGTTAAAAT | |
| | | | AAGGCTAGTCCGTTATCAACTTGAA | | AAGGCTAGTCCGTTATCAACTTGAA | |
| | | | AAAGTGGCACCGAGTCGGTGCacag | | AAAGTGGCACCGAGTCGGTGC | |
| | | | ggcagtaacggcagacttctcCTCA | | | |
| | | | GGAGTCAGAtgca | | | |
| 66 | SpyCas9 | − | CATGGTGCATCTGACTCCTGGTTTT | 18926 | TCCACATGCCCAGTTTCTATGTTTT | 19103 |
| | | | AGAGCTAGAAATAGCAAGTTAAAAT | | AGAGCTAGAAATAGCAAGTTAAAAT | |
| | | | AAGGCTAGTCCGTTATCAACTTGAA | | AAGGCTAGTCCGTTATCAACTTGAA | |
| | | | AAAGTGGCACCGAGTCGGTGCacag | | AAAGTGGCACCGAGTCGGTGC | |
| | | | ggcagtaacggcagacttctcCTCA | | | |
| | | | GGAGTCAGAtgca | | | |
| 69 | SpyCas9- | − | CATGGTGCATCTGACTCCTGGTTTT | 18927 | TATTGGTCTCCTTAAACCTGGTTTT | 19104 |
| | SpRY | | AGAGCTAGAAATAGCAAGTTAAAAT | | AGAGCTAGAAATAGCAAGTTAAAAT | |
| | | | AAGGCTAGTCCGTTATCAACTTGAA | | AAGGCTAGTCCGTTATCAACTTGAA | |
| | | | AAAGTGGCACCGAGTCGGTGCacag | | AAAGTGGCACCGAGTCGGTGC | |
| | | | ggcagtaacggcagacttctcCTCA | | | |
| | | | GGAGTCAGAtgca | | | |
| 70 | SpyCas9- | − | CATGGTGCATCTGACTCCTGGTTTT | 18928 | TCTATTGGTCTCCTTAAACCGTTTT | 19105 |
| | NG | | AGAGCTAGAAATAGCAAGTTAAAAT | | AGAGCTAGAAATAGCAAGTTAAAAT | |
| | | | AAGGCTAGTCCGTTATCAACTTGAA | | AAGGCTAGTCCGTTATCAACTTGAA | |
| | | | AAAGTGGCACCGAGTCGGTGCacag | | AAAGTGGCACCGAGTCGGTGC | |
| | | | ggcagtaacggcagacttctcCTCA | | | |
| | | | GGAGTCAGAtgca | | | |
| 73 | SpyCas9- | + | CAGTAACGGCAGACTTCTCCGTTTT | 18929 | GCCAGGGCTGGGCATAAAAGGTTTT | 19106 |
| | SpRY | | AGAGCTAGAAATAGCAAGTTAAAAT | | AGAGCTAGAAATAGCAAGTTAAAAT | |
| | | | AAGGCTAGTCCGTTATCAACTTGAA | | AAGGCTAGTCCGTTATCAACTTGAA | |
| | | | AAAGTGGCACCGAGTCGGTGCagac | | AAAGTGGCACCGAGTCGGTGC | |
| | | | accatggtgcatctgactcctGAGG | | | |
| | | | AGAAGTCTGccgt | | | |
| 79 | SauCas9 | − | acACCATGGTGCATCTGACTCCTGT | 18930 | tgTAACCTTGATACCAACCTGCCGT | 19107 |
| | | | TTTAGTACTCTGGAAACAGAATCTA | | TTTAGTACTCTGGAAACAGAATCTA | |
| | | | CTAAAACAAGGCAAAATGCCGTGTT | | CTAAAACAAGGCAAAATGCCGTGTT | |
| | | | TATCTCGTCAACTTGTTGGCGAGAc | | TATCTCGTCAACTTGTTGGCGAGA | |
| | | | agggcagtaacggcagacttctcCT | | | |
| | | | CAGGAGTCAGATgcac | | | |
| 80 | SauCas9KKH | − | ACCATGGTGCATCTGACTCCTGTTT | 18931 | TTGGTCTCCTTAAACCTGTCTGTTT | 19108 |
| | | | TAGTACTCTGGAAACAGAATCTACT | | TAGTACTCTGGAAACAGAATCTACT | |
| | | | AAAACAAGGCAAAATGCCGTGTTTA | | AAAACAAGGCAAAATGCCGTGTTTA | |
| | | | TCTCGTCAACTTGTTGGCGAGAcag | | TCTCGTCAACTTGTTGGCGAGA | |
| | | | ggcagtaacggcagacttctcCTCA | | | |
| | | | GGAGTCAGATgcac | | | |
| 81 | SauCas9KKH | + | GGCAGTAACGGCAGACTTCTCGTTT | 18932 | GCCAGGGCTGGGCATAAAAGTGTTT | 19109 |
| | | | TAGTACTCTGGAAACAGAATCTACT | | TAGTACTCTGGAAACAGAATCTACT | |
| | | | AAAACAAGGCAAAATGCCGTGTTTA | | AAAACAAGGCAAAATGCCGTGTTTA | |
| | | | TCTCGTCAACTTGTTGGCGAGAgac | | TCTCGTCAACTTGTTGGCGAGA | |
| | | | accatggtgcatctgactcctGAGG | | | |
| | | | AGAAGTCTGCcgtt | | | |
| 82 | SauriCas9 | − | ACCATGGTGCATCTGACTCCTGTTT | 18933 | TCTCCACATGCCCAGTTTCTAGTTT | 19110 |
| | | | TAGTACTCTGGAAACAGAATCTACT | | TAGTACTCTGGAAACAGAATCTACT | |
| | | | AAAACAAGGCAAAATGCCGTGTTTA | | AAAACAAGGCAAAATGCCGTGTTTA | |
| | | | TCTCGTCAACTTGTTGGCGAGAcag | | TCTCGTCAACTTGTTGGCGAGA | |
| | | | ggcagtaacggcagacttctcCTCA | | | |
| | | | GGAGTCAGATgcac | | | |
| 83 | SauriCas9- | − | ACCATGGTGCATCTGACTCCTGTTT | 18934 | TCTCCACATGCCCAGTTTCTAGTTT | 19111 |
| | KKH | | TAGTACTCTGGAAACAGAATCTACT | | TAGTACTCTGGAAACAGAATCTACT | |
| | | | AAAACAAGGCAAAATGCCGTGTTTA | | AAAACAAGGCAAAATGCCGTGTTTA | |
| | | | TCTCGTCAACTTGTTGGCGAGAcag | | TCTCGTCAACTTGTTGGCGAGA | |
| | | | ggcagtaacggcagacttctcCTCA | | | |
| | | | GGAGTCAGATgcac | | | |
| 86 | ScaCas9- | − | CCATGGTGCATCTGACTCCTGTTTT | 18935 | TTGGTCTCCTTAAACCTGTCGTTTT | 19112 |
| | Sc++ | | AGAGCTAGAAATAGCAAGTTAAAAT | | AGAGCTAGAAATAGCAAGTTAAAAT | |
| | | | AAGGCTAGTCCGTTATCAACTTGAA | | AAGGCTAGTCCGTTATCAACTTGAA | |
| | | | AAAGTGGCACCGAGTCGGTGCcagg | | AAAGTGGCACCGAGTCGGTGC | |
| | | | gcagtaacggcagacttctcCTCAG | | | |
| | | | GAGTCAGATgcac | | | |
| 87 | SpyCas9- | − | CCATGGTGCATCTGACTCCTGTTTT | 18936 | ATTGGTCTCCTTAAACCTGTGTTTT | 19113 |
| | SpRY | | AGAGCTAGAAATAGCAAGTTAAAAT | | AGAGCTAGAAATAGCAAGTTAAAAT | |
| | | | AAGGCTAGTCCGTTATCAACTTGAA | | AAGGCTAGTCCGTTATCAACTTGAA | |
| | | | AAAGTGGCACCGAGTCGGTGCcagg | | AAAGTGGCACCGAGTCGGTGC | |
| | | | gcagtaacggcagacttctcCTCAG | | | |
| | | | GAGTCAGATgcac | | | |
| 88 | SpyCas9- | + | GCAGTAACGGCAGACTTCTCGTTTT | 18937 | CCAGGGCTGGGCATAAAAGTGTTTT | 19114 |
| | SpRY | | AGAGCTAGAAATAGCAAGTTAAAAT | | AGAGCTAGAAATAGCAAGTTAAAAT | |
| | | | AAGGCTAGTCCGTTATCAACTTGAA | | AAGGCTAGTCCGTTATCAACTTGAA | |
| | | | AAAGTGGCACCGAGTCGGTGCgaca | | AAAGTGGCACCGAGTCGGTGC | |
| | | | ccatggtgcatctgactcctGAGGA | | | |
| | | | GAAGTCTGCcgtt | | | |
| 94 | SauCas9 | − | CACCATGGTGCATCTGACTCCGTTT | 18938 | TTGGTCTCCTTAAACCTGTCTGTTT | 19115 |
| | KKH | | TAGTACTCTGGAAACAGAATCTACT | | TAGTACTCTGGAAACAGAATCTACT | |
| | | | AAAACAAGGCAAAATGCCGTGTTTA | | AAAACAAGGCAAAATGCCGTGTTTA | |
| | | | TCTCGTCAACTTGTTGGCGAGAagg | | TCTCGTCAACTTGTTGGCGAGA | |
| | | | gcagtaacggcagacttctcCTCAG | | | |
| | | | GAGTCAGATGcacc | | | |
| 95 | SpyCas9- | − | ACCATGGTGCATCTGACTCCGTTTT | 18939 | TGGTCTCCTTAAACCTGTCTGTTTT | 19116 |
| | NG | | AGAGCTAGAAATAGCAAGTTAAAAT | | AGAGCTAGAAATAGCAAGTTAAAAT | |
| | | | AAGGCTAGTCCGTTATCAACTTGAA | | AAGGCTAGTCCGTTATCAACTTGAA | |
| | | | AAAGTGGCACCGAGTCGGTGCaggg | | AAAGTGGCACCGAGTCGGTGC | |
| | | | cagtaacggcagacttctcCTCAGG | | | |
| | | | AGTCAGATGcacc | | | |
| 99 | SpyCas9- | − | ACCATGGTGCATCTGACTCCGTTTT | 18940 | TTGGTCTCCTTAAACCTGTCGTTTT | 19117 |
| | SpRY | | AGAGCTAGAAATAGCAAGTTAAAAT | | AGAGCTAGAAATAGCAAGTTAAAAT | |
| | | | AAGGCTAGTCCGTTATCAACTTGAA | | AAGGCTAGTCCGTTATCAACTTGAA | |
| | | | AAAGTGGCACCGAGTCGGTGCaggg | | AAAGTGGCACCGAGTCGGTGC | |
| | | | cagtaacggcagacttctcCTCAGG | | | |
| | | | AGTCAGATGcacc | | | |
| 100 | SpyCas9- | + | GGCAGTAACGGCAGACTTCTGTTTT | 18941 | CAGGGCTGGGCATAAAAGTCGTTTT | 19118 |
| | SpRY | | AGAGCTAGAAATAGCAAGTTAAAAT | | AGAGCTAGAAATAGCAAGTTAAAAT | |
| | | | AAGGCTAGTCCGTTATCAACTTGAA | | AAGGCTAGTCCGTTATCAACTTGAA | |
| | | | AAAGTGGCACCGAGTCGGTGCacac | | AAAGTGGCACCGAGTCGGTGC | |
| | | | catggtgcatctgactcctGAGGAG | | | |
| | | | AAGTCTGCCgtta | | | |
| 103 | ScaCas9- | − | CACCATGGTGCATCTGACTCGTTTT | 18942 | TTGGTCTCCTTAAACCTGTCGTTTT | 19119 |
| | Sc++ | | AGAGCTAGAAATAGCAAGTTAAAAT | | AGAGCTAGAAATAGCAAGTTAAAAT | |
| | | | AAGGCTAGTCCGTTATCAACTTGAA | | AAGGCTAGTCCGTTATCAACTTGAA | |
| | | | AAAGTGGCACCGAGTCGGTGCgggc | | AAAGTGGCACCGAGTCGGTGC | |
| | | | agtaacggcagacttctcCTCAGGA | | | |
| | | | GTCAGATGCacca | | | |
| 104 | SpyCas9- | − | CACCATGGTGCATCTGACTCGTTTT | 18943 | TGGTCTCCTTAAACCTGTCTGTTTT | 19120 |
| | SpRY | | AGAGCTAGAAATAGCAAGTTAAAAT | | AGAGCTAGAAATAGCAAGTTAAAAT | |
| | | | AAGGCTAGTCCGTTATCAACTTGAA | | AAGGCTAGTCCGTTATCAACTTGAA | |
| | | | AAAGTGGCACCGAGTCGGTGCgggc | | AAAGTGGCACCGAGTCGGTGC | |
| | | | agtaacggcagacttctcCTCAGGA | | | |
| | | | GTCAGATGCacca | | | |
| 105 | SpyCas9- | + | GGGCAGTAACGGCAGACTTCGTTTT | 18944 | AGGGCTGGGCATAAAAGTCAGTTTT | 19121 |
| | SpRY | | AGAGCTAGAAATAGCAAGTTAAAAT | | AGAGCTAGAAATAGCAAGTTAAAAT | |
| | | | AAGGCTAGTCCGTTATCAACTTGAA | | AAGGCTAGTCCGTTATCAACTTGAA | |
| | | | AAAGTGGCACCGAGTCGGTGCcacc | | AAAGTGGCACCGAGTCGGTGC | |
| | | | atggtgcatctgactcctGAGGAGA | | | |
| | | | AGTCTGCCGttac | | | |
| 106 | BlatCas9 | + | acagGGCAGTAACGGCAGACTTCGC | 18945 | agccAGGGCTGGGCATAAAAGTCGC | 19122 |
| | | | TATAGTTCCTTACTGAAAGGTAAGT | | TATAGTTCCTTACTGAAAGGTAAGT | |
| | | | TGCTATAGTAAGGGCAACAGACCCG | | TGCTATAGTAAGGGCAACAGACCCG | |
| | | | AGGCGTTGGGGATCGCCTAGCCCGT | | AGGCGTTGGGGATCGCCTAGCCCGT | |
| | | | GTTTACGGGCTCTCCCCATATTCAA | | GTTTACGGGCTCTCCCCATATTCAA | |
| | | | AATAATGACAGACGAGCACCTTGGA | | AATAATGACAGACGAGCACCTTGGA | |
| | | | GCATTTATCTCCGAGGTGCTcacca | | GCATTTATCTCCGAGGTGCT | |
| | | | tggtgcatctgactcctGAGGAGAA | | | |
| | | | GTCTGCCGttac | | | |
| 107 | BlatCas9 | + | acagGGCAGTAACGGCAGACTTCGC | 18946 | agccAGGGCTGGGCATAAAAGTCGC | 19123 |
| | | | TATAGTTCCTTACTGAAAGGTAAGT | | TATAGTTCCTTACTGAAAGGTAAGT | |
| | | | TGCTATAGTAAGGGCAACAGACCCG | | TGCTATAGTAAGGGCAACAGACCCG | |
| | | | AGGCGTTGGGGATCGCCTAGCCCGT | | AGGCGTTGGGGATCGCCTAGCCCGT | |
| | | | GTTTACGGGCTCTCCCCATATTCAA | | GTTTACGGGCTCTCCCCATATTCAA | |
| | | | AATAATGACAGACGAGCACCTTGGA | | AATAATGACAGACGAGCACCTTGGA | |
| | | | GCATTTATCTCCGAGGTGCTcacca | | GCATTTATCTCCGAGGTGCT | |
| | | | tggtgcatctgactcctGAGGAGAA | | | |
| | | | GTCTGCCGttac | | | |
| 108 | SpyCas9- | + | AGGGCAGTAACGGCAGACTTGTTTT | 18947 | GGGCTGGGCATAAAAGTCAGGTTTT | 19124 |
| | SpRY | | AGAGCTAGAAATAGCAAGTTAAAAT | | AGAGCTAGAAATAGCAAGTTAAAAT | |
| | | | AAGGCTAGTCCGTTATCAACTTGAA | | AAGGCTAGTCCGTTATCAACTTGAA | |
| | | | AAAGTGGCACCGAGTCGGTGCacca | | AAAGTGGCACCGAGTCGGTGC | |
| | | | tggtgcatctgactcctGAGGAGAA | | | |
| | | | GTCTGCCGTtact | | | |
| 109 | SpyCas9- | − | ACACCATGGTGCATCTGACTGTTTT | 18948 | GGTCTCCTTAAACCTGTCTTGTTTT | 19125 |
| | SpRY | | AGAGCTAGAAATAGCAAGTTAAAAT | | AGAGCTAGAAATAGCAAGTTAAAAT | |
| | | | AAGGCTAGTCCGTTATCAACTTGAA | | AAGGCTAGTCCGTTATCAACTTGAA | |
| | | | AAAGTGGCACCGAGTCGGTGCggca | | AAAGTGGCACCGAGTCGGTGC | |
| | | | gtaacggcagacttctcCTCAGGAG | | | |
| | | | TCAGATGCAccat | | | |
| 110 | SpyCas9- | + | CAGGGCAGTAACGGCAGACTGTTTT | 18949 | GGCTGGGCATAAAAGTCAGGGTTTT | 19126 |
| | SpRY | | AGAGCTAGAAATAGCAAGTTAAAAT | | AGAGCTAGAAATAGCAAGTTAAAAT | |
| | | | AAGGCTAGTCCGTTATCAACTTGAA | | AAGGCTAGTCCGTTATCAACTTGAA | |
| | | | AAAGTGGCACCGAGTCGGTGCccat | | AAAGTGGCACCGAGTCGGTGC | |
| | | | ggtgcatctgactcctGAGGAGAAG | | | |
| | | | TCTGCCGTTactg | | | |
| 111 | SpyCas9- | − | GACACCATGGTGCATCTGACGTTTT | 18950 | GTCTCCTTAAACCTGTCTTGGTTTT | 19127 |
| | SpRY | | AGAGCTAGAAATAGCAAGTTAAAAT | | AGAGCTAGAAATAGCAAGTTAAAAT | |
| | | | AAGGCTAGTCCGTTATCAACTTGAA | | AAGGCTAGTCCGTTATCAACTTGAA | |
| | | | AAAGTGGCACCGAGTCGGTGCgcag | | AAAGTGGCACCGAGTCGGTGC | |
| | | | taacggcagacttctcCTCAGGAGT | | | |
| | | | CAGATGCACcatg | | | |
| 112 | BlatCas9 | + | ccacAGGGCAGTAACGGCAGACTGC | 18951 | gggcTGGGCATAAAAGTCAGGGCGC | 19128 |
| | | | TATAGTTCCTTACTGAAAGGTAAGT | | TATAGTTCCTTACTGAAAGGTAAGT | |
| | | | TGCTATAGTAAGGGCAACAGACCCG | | TGCTATAGTAAGGGCAACAGACCCG | |
| | | | AGGCGTTGGGGATCGCCTAGCCCGT | | AGGCGTTGGGGATCGCCTAGCCCGT | |
| | | | GTTTACGGGCTCTCCCCATATTCAA | | GTTTACGGGCTCTCCCCATATTCAA | |
| | | | AATAATGACAGACGAGCACCTTGGA | | AATAATGACAGACGAGCACCTTGGA | |
| | | | GCATTTATCTCCGAGGTGCTccatg | | GCATTTATCTCCGAGGTGCT | |
| | | | gtgcatctgactcctGAGGAGAAGT | | | |
| | | | CTGCCGTTactg | | | |
| 113 | Nme2Cas9 | + | ccCCACAGGGCAGTAACGGCAGACG | 18952 | agGGCTGGGCATAAAAGTCAGGGCG | 19129 |
| | | | TTGTAGCTCCCTTTCTCATTTCGGA | | TTGTAGCTCCCTTTCTCATTTCGGA | |
| | | | AACGAAATGAGAACCGTTGCTACAA | | AACGAAATGAGAACCGTTGCTACAA | |
| | | | TAAGGCCGTCTGAAAAGATGTGCCG | | TAAGGCCGTCTGAAAAGATGTGCCG | |
| | | | CAACGCTCTGCCCCTTAAAGCTTCT | | CAACGCTCTGCCCCTTAAAGCTTCT | |
| | | | GCTTTAAGGGGCATCGTTTAcatgg | | GCTTTAAGGGGCATCGTTTA | |
| | | | tgcatctgactcctGAGGAGAAGTC | | | |
| | | | TGCCGTTActgc | | | |
| 114 | SpyCas9- | + | ACAGGGCAGTAACGGCAGACGTTTT | 18953 | GCTGGGCATAAAAGTCAGGGGTTTT | 19130 |
| | SpRY | | AGAGCTAGAAATAGCAAGTTAAAAT | | AGAGCTAGAAATAGCAAGTTAAAAT | |
| | | | AAGGCTAGTCCGTTATCAACTTGAA | | AAGGCTAGTCCGTTATCAACTTGAA | |
| | | | AAAGTGGCACCGAGTCGGTGCcatg | | AAAGTGGCACCGAGTCGGTGC | |
| | | | gtgcatctgactcctGAGGAGAAGT | | | |
| | | | CTGCCGTTActgc | | | |
| 115 | SpyCas9- | − | AGACACCATGGTGCATCTGAGTTTT | 18954 | TCTCCTTAAACCTGTCTTGTGTTTT | 19131 |
| | SpRY | | AGAGCTAGAAATAGCAAGTTAAAAT | | AGAGCTAGAAATAGCAAGTTAAAAT | |
| | | | AAGGCTAGTCCGTTATCAACTTGAA | | AAGGCTAGTCCGTTATCAACTTGAA | |
| | | | AAAGTGGCACCGAGTCGGTGCcagt | | AAAGTGGCACCGAGTCGGTGC | |
| | | | aacggcagacttctcCTCAGGAGTC | | | |
| | | | AGATGCACCatgg | | | |
| 116 | BlatCas9 | + | cccaCAGGGCAGTAACGGCAGACGC | 18955 | gggcTGGGCATAAAAGTCAGGGCGC | 19132 |
| | | | TATAGTTCCTTACTGAAAGGTAAGT | | TATAGTTCCTTACTGAAAGGTAAGT | |
| | | | TGCTATAGTAAGGGCAACAGACCCG | | TGCTATAGTAAGGGCAACAGACCCG | |
| | | | AGGCGTTGGGGATCGCCTAGCCCGT | | AGGCGTTGGGGATCGCCTAGCCCGT | |
| | | | GTTTACGGGCTCTCCCCATATTCAA | | GTTTACGGGCTCTCCCCATATTCAA | |
| | | | AATAATGACAGACGAGCACCTTGGA | | AATAATGACAGACGAGCACCTTGGA | |
| | | | GCATTTATCTCCGAGGTGCTcatgg | | GCATTTATCTCCGAGGTGCT | |
| | | | tgcatctgactcctGAGGAGAAGTC | | | |
| | | | TGCCGTTActgc | | | |
| 117 | SpyCas9- | + | CACAGGGCAGTAACGGCAGAGTTTT | 18956 | CTGGGCATAAAAGTCAGGGCGTTTT | 19133 |
| | SpRY | | AGAGCTAGAAATAGCAAGTTAAAAT | | AGAGCTAGAAATAGCAAGTTAAAAT | |
| | | | AAGGCTAGTCCGTTATCAACTTGAA | | AAGGCTAGTCCGTTATCAACTTGAA | |
| | | | AAAGTGGCACCGAGTCGGTGCatgg | | AAAGTGGCACCGAGTCGGTGC | |
| | | | tgcatctgactcctGAGGAGAAGTC | | | |
| | | | TGCCGTTACtgcc | | | |
| 118 | SpyCas9- | − | CAGACACCATGGTGCATCTGGTTTT | 18957 | CTCCTTAAACCTGTCTTGTAGTTTT | 19134 |
| | SpRY | | AGAGCTAGAAATAGCAAGTTAAAAT | | AGAGCTAGAAATAGCAAGTTAAAAT | |
| | | | AAGGCTAGTCCGTTATCAACTTGAA | | AAGGCTAGTCCGTTATCAACTTGAA | |
| | | | AAAGTGGCACCGAGTCGGTGCagta | | AAAGTGGCACCGAGTCGGTGC | |
| | | | acggcagacttctcCTCAGGAGTCA | | | |
| | | | GATGCACCAtggt | | | |
| 119 | BlatCas9 | − | aaacAGACACCATGGTGCATCTGGC | 18958 | ttggTCTCCTTAAACCTGTCTTGGC | 19135 |
| | | | TATAGTTCCTTACTGAAAGGTAAGT | | TATAGTTCCTTACTGAAAGGTAAGT | |
| | | | TGCTATAGTAAGGGCAACAGACCCG | | TGCTATAGTAAGGGCAACAGACCCG | |
| | | | AGGCGTTGGGGATCGCCTAGCCCGT | | AGGCGTTGGGGATCGCCTAGCCCGT | |
| | | | GTTTACGGGCTCTCCCCATATTCAA | | GTTTACGGGCTCTCCCCATATTCAA | |
| | | | AATAATGACAGACGAGCACCTTGGA | | AATAATGACAGACGAGCACCTTGGA | |
| | | | GCATTTATCTCCGAGGTGCTagtaa | | GCATTTATCTCCGAGGTGCT | |
| | | | cggcagacttctcCTCAGGAGTCAG | | | |
| | | | ATGCACCAtggt | | | |
| 120 | BlatCas9 | − | aaacAGACACCATGGTGCATCTGGC | 18959 | ttggTCTCCTTAAACCTGTCTTGGC | 19136 |
| | | | TATAGTTCCTTACTGAAAGGTAAGT | | TATAGTTCCTTACTGAAAGGTAAGT | |
| | | | TGCTATAGTAAGGGCAACAGACCCG | | TGCTATAGTAAGGGCAACAGACCCG | |
| | | | AGGCGTTGGGGATCGCCTAGCCCGT | | AGGCGTTGGGGATCGCCTAGCCCGT | |
| | | | GTTTACGGGCTCTCCCCATATTCAA | | GTTTACGGGCTCTCCCCATATTCAA | |
| | | | AATAATGACAGACGAGCACCTTGGA | | AATAATGACAGACGAGCACCTTGGA | |
| | | | GCATTTATCTCCGAGGTGCTagtaa | | GCATTTATCTCCGAGGTGCT | |
| | | | cggcagacttctcCTCAGGAGTCAG | | | |
| | | | ATGCACCAtggt | | | |
| 121 | Nme2Cas9 | − | tcAAACAGACACCATGGTGCATCTG | 18960 | taTTGGTCTCCTTAAACCTGTCTTG | 19137 |
| | | | TTGTAGCTCCCTTTCTCATTTCGGA | | TTGTAGCTCCCTTTCTCATTTCGGA | |
| | | | AACGAAATGAGAACCGTTGCTACAA | | AACGAAATGAGAACCGTTGCTACAA | |
| | | | TAAGGCCGTCTGAAAAGATGTGCCG | | TAAGGCCGTCTGAAAAGATGTGCCG | |
| | | | CAACGCTCTGCCCCTTAAAGCTTCT | | CAACGCTCTGCCCCTTAAAGCTTCT | |
| | | | GCTTTAAGGGGCATCGTTTAgtaac | | GCTTTAAGGGGCATCGTTTA | |
| | | | ggcagacttctcCTCAGGAGTCAGA | | | |
| | | | TGCACCATggtg | | | |
| 122 | SpyCas9- | − | ACAGACACCATGGTGCATCTGTTTT | 18961 | TCCTTAAACCTGTCTTGTAAGTTTT | 19138 |
| | SpRY | | AGAGCTAGAAATAGCAAGTTAAAAT | | AGAGCTAGAAATAGCAAGTTAAAAT | |
| | | | AAGGCTAGTCCGTTATCAACTTGAA | | AAGGCTAGTCCGTTATCAACTTGAA | |
| | | | AAAGTGGCACCGAGTCGGTGCgtaa | | AAAGTGGCACCGAGTCGGTGC | |
| | | | cggcagacttctcCTCAGGAGTCAG | | | |
| | | | ATGCACCATggtg | | | |
| 123 | SpyCas9- | + | CCACAGGGCAGTAACGGCAGGTTTT | 18962 | TGGGCATAAAAGTCAGGGCAGTTTT | 19139 |
| | SpRY | | AGAGCTAGAAATAGCAAGTTAAAAT | | AGAGCTAGAAATAGCAAGTTAAAAT | |
| | | | AAGGCTAGTCCGTTATCAACTTGAA | | AAGGCTAGTCCGTTATCAACTTGAA | |
| | | | AAAGTGGCACCGAGTCGGTGCtggt | | AAAGTGGCACCGAGTCGGTGC | |
| | | | gcatctgactcctGAGGAGAAGTCT | | | |
| | | | GCCGTTACTgccc | | | |
| 124 | BlatCas9 | − | caaaCAGACACCATGGTGCATCTGC | 18963 | ttggTCTCCTTAAACCTGTCTTGGC | 19140 |
| | | | TATAGTTCCTTACTGAAAGGTAAGT | | TATAGTTCCTTACTGAAAGGTAAGT | |
| | | | TGCTATAGTAAGGGCAACAGACCCG | | TGCTATAGTAAGGGCAACAGACCCG | |
| | | | AGGCGTTGGGGATCGCCTAGCCCGT | | AGGCGTTGGGGATCGCCTAGCCCGT | |
| | | | GTTTACGGGCTCTCCCCATATTCAA | | GTTTACGGGCTCTCCCCATATTCAA | |
| | | | AATAATGACAGACGAGCACCTTGGA | | AATAATGACAGACGAGCACCTTGGA | |
| | | | GCATTTATCTCCGAGGTGCTgtaac | | GCATTTATCTCCGAGGTGCT | |
| | | | ggcagacttctcCTCAGGAGTCAGA | | | |
| | | | TGCACCATggtg | | | |
| 125 | BlatCas9 | + | gcccCACAGGGCAGTAACGGCAGGC | 18964 | ggctGGGCATAAAAGTCAGGGCAGC | 19141 |
| | | | TATAGTTCCTTACTGAAAGGTAAGT | | TATAGTTCCTTACTGAAAGGTAAGT | |
| | | | TGCTATAGTAAGGGCAACAGACCCG | | TGCTATAGTAAGGGCAACAGACCCG | |
| | | | AGGCGTTGGGGATCGCCTAGCCCGT | | AGGCGTTGGGGATCGCCTAGCCCGT | |
| | | | GTTTACGGGCTCTCCCCATATTCAA | | GTTTACGGGCTCTCCCCATATTCAA | |
| | | | AATAATGACAGACGAGCACCTTGGA | | AATAATGACAGACGAGCACCTTGGA | |
| | | | GCATTTATCTCCGAGGTGCTtggtg | | GCATTTATCTCCGAGGTGCT | |
| | | | catctgactcctGAGGAGAAGTCTG | | | |
| | | | CCGTTACTgccc | | | |
| 126 | BlatCas9 | − | caaaCAGACACCATGGTGCATCTGC | 18965 | ttggTCTCCTTAAACCTGTCTTGGC | 19142 |
| | | | TATAGTTCCTTACTGAAAGGTAAGT | | TATAGTTCCTTACTGAAAGGTAAGT | |
| | | | TGCTATAGTAAGGGCAACAGACCCG | | TGCTATAGTAAGGGCAACAGACCCG | |
| | | | AGGCGTTGGGGATCGCCTAGCCCGT | | AGGCGTTGGGGATCGCCTAGCCCGT | |
| | | | GTTTACGGGCTCTCCCCATATTCAA | | GTTTACGGGCTCTCCCCATATTCAA | |
| | | | AATAATGACAGACGAGCACCTTGGA | | AATAATGACAGACGAGCACCTTGGA | |
| | | | GCATTTATCTCCGAGGTGCTgtaac | | GCATTTATCTCCGAGGTGCT | |
| | | | ggcagacttctcCTCAGGAGTCAGA | | | |
| | | | TGCACCATggtg | | | |
| 128 | SpyCas9- | − | AACAGACACCATGGTGCATCGTTTT | 18966 | TTAAACCTGTCTTGTAACCTGTTTT | 19143 |
| | NG | | AGAGCTAGAAATAGCAAGTTAAAAT | | AGAGCTAGAAATAGCAAGTTAAAAT | |
| | | | AAGGCTAGTCCGTTATCAACTTGAA | | AAGGCTAGTCCGTTATCAACTTGAA | |
| | | | AAAGTGGCACCGAGTCGGTGCtaac | | AAAGTGGCACCGAGTCGGTGC | |
| | | | ggcagacttctcCTCAGGAGTCAGA | | | |
| | | | TGCACCATGgtgt | | | |
| 131 | SpyCas9- | + | CCCACAGGGCAGTAACGGCAGTTTT | 18967 | GGGCATAAAAGTCAGGGCAGGTTTT | 19144 |
| | SpRY | | AGAGCTAGAAATAGCAAGTTAAAAT | | AGAGCTAGAAATAGCAAGTTAAAAT | |
| | | | AAGGCTAGTCCGTTATCAACTTGAA | | AAGGCTAGTCCGTTATCAACTTGAA | |
| | | | AAAGTGGCACCGAGTCGGTGCggtg | | AAAGTGGCACCGAGTCGGTGC | |
| | | | catctgactcctGAGGAGAAGTCTG | | | |
| | | | CCGTTACTGccct | | | |
| 133 | SpyCas9- | − | AACAGACACCATGGTGCATCGTTTT | 18968 | CCTTAAACCTGTCTTGTAACGTTTT | 19145 |
| | SpRY | | AGAGCTAGAAATAGCAAGTTAAAAT | | AGAGCTAGAAATAGCAAGTTAAAAT | |
| | | | AAGGCTAGTCCGTTATCAACTTGAA | | AAGGCTAGTCCGTTATCAACTTGAA | |
| | | | AAAGTGGCACCGAGTCGGTGCtaac | | AAAGTGGCACCGAGTCGGTGC | |
| | | | ggcagacttctcCTCAGGAGTCAGA | | | |
| | | | TGCACCATGgtgt | | | |
| 140 | ScaCas9- | − | AAACAGACACCATGGTGCATGTTTT | 18969 | CTTAAACCTGTCTTGTAACCGTTTT | 19146 |
| | Sc++ | | AGAGCTAGAAATAGCAAGTTAAAAT | | AGAGCTAGAAATAGCAAGTTAAAAT | |
| | | | AAGGCTAGTCCGTTATCAACTTGAA | | AAGGCTAGTCCGTTATCAACTTGAA | |
| | | | AAAGTGGCACCGAGTCGGTGCaacg | | AAAGTGGCACCGAGTCGGTGC | |
| | | | gcagacttctcCTCAGGAGTCAGAT | | | |
| | | | GCACCATGGtgtc | | | |
| 141 | SpyCas9- | − | AAACAGACACCATGGTGCATGTTTT | 18970 | CTTAAACCTGTCTTGTAACCGTTTT | 19147 |
| | SpRY | | AGAGCTAGAAATAGCAAGTTAAAAT | | AGAGCTAGAAATAGCAAGTTAAAAT | |
| | | | AAGGCTAGTCCGTTATCAACTTGAA | | AAGGCTAGTCCGTTATCAACTTGAA | |
| | | | AAAGTGGCACCGAGTCGGTGCaacg | | AAAGTGGCACCGAGTCGGTGC | |
| | | | gcagacttctcCTCAGGAGTCAGAT | | | |
| | | | GCACCATGGtgtc | | | |
| 142 | SpyCas9- | + | CCCCACAGGGCAGTAACGGCGTTTT | 18971 | GGGCATAAAAGTCAGGGCAGGTTTT | 19148 |
| | NG | | AGAGCTAGAAATAGCAAGTTAAAAT | | AGAGCTAGAAATAGCAAGTTAAAAT | |
| | | | AAGGCTAGTCCGTTATCAACTTGAA | | AAGGCTAGTCCGTTATCAACTTGAA | |
| | | | AAAGTGGCACCGAGTCGGTGCgtgc | | AAAGTGGCACCGAGTCGGTGC | |
| | | | atctgactcctGAGGAGAAGTCTGC | | | |
| | | | CGTTACTGCcctg | | | |
| 146 | SpyCas9- | + | CCCCACAGGGCAGTAACGGCGTTTT | 18972 | GGCATAAAAGTCAGGGCAGAGTTTT | 19149 |
| | SpRY | | AGAGCTAGAAATAGCAAGTTAAAAT | | AGAGCTAGAAATAGCAAGTTAAAAT | |
| | | | AAGGCTAGTCCGTTATCAACTTGAA | | AAGGCTAGTCCGTTATCAACTTGAA | |
| | | | AAAGTGGCACCGAGTCGGTGCgtgc | | AAAGTGGCACCGAGTCGGTGC | |
| | | | atctgactcctGAGGAGAAGTCTGC | | | |
| | | | CGTTACTGCcctg | | | |
| 147 | BlatCas9 | − | ctcaAACAGACACCATGGTGCATGC | 18973 | ccttAAACCTGTCTTGTAACCTTGC | 19150 |
| | | | TATAGTTCCTTACTGAAAGGTAAGT | | TATAGTTCCTTACTGAAAGGTAAGT | |
| | | | TGCTATAGTAAGGGCAACAGACCCG | | TGCTATAGTAAGGGCAACAGACCCG | |
| | | | AGGCGTTGGGGATCGCCTAGCCCGT | | AGGCGTTGGGGATCGCCTAGCCCGT | |
| | | | GTTTACGGGCTCTCCCCATATTCAA | | GTTTACGGGCTCTCCCCATATTCAA | |
| | | | AATAATGACAGACGAGCACCTTGGA | | AATAATGACAGACGAGCACCTTGGA | |
| | | | GCATTTATCTCCGAGGTGCTaacgg | | GCATTTATCTCCGAGGTGCT | |
| | | | cagacttctcCTCAGGAGTCAGATG | | | |
| | | | CACCATGGtgtc | | | |
| 154 | SauCas9KKH | − | TCAAACAGACACCATGGTGCAGTTT | 18974 | TCCTTAAACCTGTCTTGTAACGTTT | 19151 |
| | | | TAGTACTCTGGAAACAGAATCTACT | | TAGTACTCTGGAAACAGAATCTACT | |
| | | | AAAACAAGGCAAAATGCCGTGTTTA | | AAAACAAGGCAAAATGCCGTGTTTA | |
| | | | TCTCGTCAACTTGTTGGCGAGAacg | | TCTCGTCAACTTGTTGGCGAGA | |
| | | | gcagacttctcCTCAGGAGTCAGAT | | | |
| | | | GCACCATGGTgtct | | | |
| 157 | ScaCas9- | + | GCCCCACAGGGCAGTAACGGGTTTT | 18975 | TGGGCATAAAAGTCAGGGCAGTTTT | 19152 |
| | Sc++ | | AGAGCTAGAAATAGCAAGTTAAAAT | | AGAGCTAGAAATAGCAAGTTAAAAT | |
| | | | AAGGCTAGTCCGTTATCAACTTGAA | | AAGGCTAGTCCGTTATCAACTTGAA | |
| | | | AAAGTGGCACCGAGTCGGTGCtgca | | AAAGTGGCACCGAGTCGGTGC | |
| | | | tctgactcctGAGGAGAAGTCTGCC | | | |
| | | | GTTACTGCCctgt | | | |
| 158 | SpyCas9- | + | GCCCCACAGGGCAGTAACGGGTTTT | 18976 | GCATAAAAGTCAGGGCAGAGGTTTT | 19153 |
| | SpRY | | AGAGCTAGAAATAGCAAGTTAAAAT | | AGAGCTAGAAATAGCAAGTTAAAAT | |
| | | | AAGGCTAGTCCGTTATCAACTTGAA | | AAGGCTAGTCCGTTATCAACTTGAA | |
| | | | AAAGTGGCACCGAGTCGGTGCtgca | | AAAGTGGCACCGAGTCGGTGC | |
| | | | tctgactcctGAGGAGAAGTCTGCC | | | |
| | | | GTTACTGCCctgt | | | |
| 159 | SpyCas9- | − | CAAACAGACACCATGGTGCAGTTTT | 18977 | TTAAACCTGTCTTGTAACCTGTTTT | 19154 |
| | SpRY | | AGAGCTAGAAATAGCAAGTTAAAAT | | AGAGCTAGAAATAGCAAGTTAAAAT | |
| | | | AAGGCTAGTCCGTTATCAACTTGAA | | AAGGCTAGTCCGTTATCAACTTGAA | |
| | | | AAAGTGGCACCGAGTCGGTGCacgg | | AAAGTGGCACCGAGTCGGTGC | |
| | | | cagacttctcCTCAGGAGTCAGATG | | | |
| | | | CACCATGGTgtct | | | |
| 160 | BlatCaS9 | + | cttgCCCCACAGGGCAGTAACGGGC | 18978 | tgggCATAAAAGTCAGGGCAGAGGC | 19155 |
| | | | TATAGTTCCTTACTGAAAGGTAAGT | | TATAGTTCCTTACTGAAAGGTAAGT | |
| | | | TGCTATAGTAAGGGCAACAGACCCG | | TGCTATAGTAAGGGCAACAGACCCG | |
| | | | AGGCGTTGGGGATCGCCTAGCCCGT | | AGGCGTTGGGGATCGCCTAGCCCGT | |
| | | | GTTTACGGGCTCTCCCCATATTCAA | | GTTTACGGGCTCTCCCCATATTCAA | |
| | | | AATAATGACAGACGAGCACCTTGGA | | AATAATGACAGACGAGCACCTTGGA | |
| | | | GCATTTATCTCCGAGGTGCTtgcat | | GCATTTATCTCCGAGGTGCT | |
| | | | ctgactcctGAGGAGAAGTCTGCCG | | | |
| | | | TTACTGCCctgt | | | |
| 165 | SauCas9KKH | + | TTGCCCCACAGGGCAGTAACGGTTT | 18979 | GGCTGGGCATAAAAGTCAGGGGTTT | 19156 |
| | | | TAGTACTCTGGAAACAGAATCTACT | | TAGTACTCTGGAAACAGAATCTACT | |
| | | | AAAACAAGGCAAAATGCCGTGTTTA | | AAAACAAGGCAAAATGCCGTGTTTA | |
| | | | TCTCGTCAACTTGTTGGCGAGAgca | | TCTCGTCAACTTGTTGGCGAGA | |
| | | | tctgactcctGAGGAGAAGTCTGCC | | | |
| | | | GTTACTGCCCtgtg | | | |
| 166 | SauriCas9- | + | TTGCCCCACAGGGCAGTAACGGTTT | 18980 | GCTGGGCATAAAAGTCAGGGCGTTT | 19157 |
| | KKH | | TAGTACTCTGGAAACAGAATCTACT | | TAGTACTCTGGAAACAGAATCTACT | |
| | | | AAAACAAGGCAAAATGCCGTGTTTA | | AAAACAAGGCAAAATGCCGTGTTTA | |
| | | | TCTCGTCAACTTGTTGGCGAGAgca | | TCTCGTCAACTTGTTGGCGAGA | |
| | | | tctgactcctGAGGAGAAGTCTGCC | | | |
| | | | GTTACTGCCCtgtg | | | |
| 167 | SpyCas9- | + | TGCCCCACAGGGCAGTAACGGTTTT | 18981 | CATAAAAGTCAGGGCAGAGCGTTTT | 19158 |
| | SpRY | | AGAGCTAGAAATAGCAAGTTAAAAT | | AGAGCTAGAAATAGCAAGTTAAAAT | |
| | | | AAGGCTAGTCCGTTATCAACTTGAA | | AAGGCTAGTCCGTTATCAACTTGAA | |
| | | | AAAGTGGCACCGAGTCGGTGCgcat | | AAAGTGGCACCGAGTCGGTGC | |
| | | | ctgactcctGAGGAGAAGTCTGCCG | | | |
| | | | TTACTGCCCtgtg | | | |
| 168 | SpyCas9- | − | TCAAACAGACACCATGGTGCGTTTT | 18982 | TAAACCTGTCTTGTAACCTTGTTTT | 19159 |
| | SpRY | | AGAGCTAGAAATAGCAAGTTAAAAT | | AGAGCTAGAAATAGCAAGTTAAAAT | |
| | | | AAGGCTAGTCCGTTATCAACTTGAA | | AAGGCTAGTCCGTTATCAACTTGAA | |
| | | | AAAGTGGCACCGAGTCGGTGCcggc | | AAAGTGGCACCGAGTCGGTGC | |
| | | | agacttctcCTCAGGAGTCAGATGC | | | |
| | | | ACCATGGTGtctg | | | |
| 172 | SauCas9KKH | + | CTTGCCCCACAGGGCAGTAACGTTT | 18983 | GGCTGGGCATAAAAGTCAGGGGTTT | 19160 |
| | | | TAGTACTCTGGAAACAGAATCTACT | | TAGTACTCTGGAAACAGAATCTACT | |
| | | | AAAACAAGGCAAAATGCCGTGTTTA | | AAAACAAGGCAAAATGCCGTGTTTA | |
| | | | TCTCGTCAACTTGTTGGCGAGAcat | | TCTCGTCAACTTGTTGGCGAGA | |
| | | | ctgactcctGAGGAGAAGTCTGCCG | | | |
| | | | TTACTGCCCTgtgg | | | |
| 173 | SpyCas9- | + | TTGCCCCACAGGGCAGTAACGTTTT | 18984 | GGGCATAAAAGTCAGGGCAGGTTTT | 19161 |
| | NG | | AGAGCTAGAAATAGCAAGTTAAAAT | | AGAGCTAGAAATAGCAAGTTAAAAT | |
| | | | AAGGCTAGTCCGTTATCAACTTGAA | | AAGGCTAGTCCGTTATCAACTTGAA | |
| | | | AAAGTGGCACCGAGTCGGTGCcatc | | AAAGTGGCACCGAGTCGGTGC | |
| | | | tgactcctGAGGAGAAGTCTGCCGT | | | |
| | | | TACTGCCCTgtgg | | | |
| 177 | SpyCas9- | + | TTGCCCCACAGGGCAGTAACGTTTT | 18985 | ATAAAAGTCAGGGCAGAGCCGTTTT | 19162 |
| | SpRY | | AGAGCTAGAAATAGCAAGTTAAAAT | | AGAGCTAGAAATAGCAAGTTAAAAT | |
| | | | AAGGCTAGTCCGTTATCAACTTGAA | | AAGGCTAGTCCGTTATCAACTTGAA | |
| | | | AAAGTGGCACCGAGTCGGTGCcatc | | AAAGTGGCACCGAGTCGGTGC | |
| | | | tgactcctGAGGAGAAGTCTGCCGT | | | |
| | | | TACTGCCCTgtgg | | | |
| 178 | SpyCaS9- | − | CTCAAACAGACACCATGGTGGTTTT | 18986 | AAACCTGTCTTGTAACCTTGGTTTT | 19163 |
| | SpRY | | AGAGCTAGAAATAGCAAGTTAAAAT | | AGAGCTAGAAATAGCAAGTTAAAAT | |
| | | | AAGGCTAGTCCGTTATCAACTTGAA | | AAGGCTAGTCCGTTATCAACTTGAA | |
| | | | AAAGTGGCACCGAGTCGGTGCggca | | AAAGTGGCACCGAGTCGGTGC | |
| | | | gacttctcCTCAGGAGTCAGATGCA | | | |
| | | | CCATGGTGTctgt | | | |
| 186 | ScaCas9- | + | CTTGCCCCACAGGGCAGTAAGTTTT | 18987 | AGTCAGGGCAGAGCCATCTAGTTTT | 19164 |
| | Sc++ | | AGAGCTAGAAATAGCAAGTTAAAAT | | AGAGCTAGAAATAGCAAGTTAAAAT | |
| | | | AAGGCTAGTCCGTTATCAACTTGAA | | AAGGCTAGTCCGTTATCAACTTGAA | |
| | | | AAAGTGGCACCGAGTCGGTGCatct | | AAAGTGGCACCGAGTCGGTGC | |
| | | | gactcctGAGGAGAAGTCTGCCGTT | | | |
| | | | ACTGCCCTGtggg | | | |
| 187 | SpyCas9 | + | CTTGCCCCACAGGGCAGTAAGTTTT | 18988 | AGGGCTGGGCATAAAAGTCAGTTTT | 19165 |
| | | | AGAGCTAGAAATAGCAAGTTAAAAT | | AGAGCTAGAAATAGCAAGTTAAAAT | |
| | | | AAGGCTAGTCCGTTATCAACTTGAA | | AAGGCTAGTCCGTTATCAACTTGAA | |
| | | | AAAGTGGCACCGAGTCGGTGCatct | | AAAGTGGCACCGAGTCGGTGC | |
| | | | gactcctGAGGAGAAGTCTGCCGTT | | | |
| | | | ACTGCCCTGtggg | | | |
| 190 | SpyCas9- | + | CTTGCCCCACAGGGCAGTAAGTTTT | 18989 | TAAAAGTCAGGGCAGAGCCAGTTTT | 19166 |
| | SpRY | | AGAGCTAGAAATAGCAAGTTAAAAT | | AGAGCTAGAAATAGCAAGTTAAAAT | |
| | | | AAGGCTAGTCCGTTATCAACTTGAA | | AAGGCTAGTCCGTTATCAACTTGAA | |
| | | | AAAGTGGCACCGAGTCGGTGCatct | | AAAGTGGCACCGAGTCGGTGC | |
| | | | gactcctGAGGAGAAGTCTGCCGTT | | | |
| | | | ACTGCCCTGtggg | | | |
| 191 | SpyCas9- | + | CTTGCCCCACAGGGCAGTAAGTTTT | 18990 | GTCAGGGCAGAGCCATCTATGTTTT | 19167 |
| | NG | | AGAGCTAGAAATAGCAAGTTAAAAT | | AGAGCTAGAAATAGCAAGTTAAAAT | |
| | | | AAGGCTAGTCCGTTATCAACTTGAA | | AAGGCTAGTCCGTTATCAACTTGAA | |
| | | | AAAGTGGCACCGAGTCGGTGCatct | | AAAGTGGCACCGAGTCGGTGC | |
| | | | gactcctGAGGAGAAGTCTGCCGTT | | | |
| | | | ACTGCCCTGtggg | | | |
| 194 | SpyCaS9- | − | CCTCAAACAGACACCATGGTGTTTT | 18991 | AACCTGTCTTGTAACCTTGAGTTTT | 19168 |
| | SpRY | | AGAGCTAGAAATAGCAAGTTAAAAT | | AGAGCTAGAAATAGCAAGTTAAAAT | |
| | | | AAGGCTAGTCCGTTATCAACTTGAA | | AAGGCTAGTCCGTTATCAACTTGAA | |
| | | | AAAGTGGCACCGAGTCGGTGCgcag | | AAAGTGGCACCGAGTCGGTGC | |
| | | | acttctcCTCAGGAGTCAGATGCAC | | | |
| | | | CATGGTGTCtgtt | | | |
| 195 | BlatCas9 | − | caacCTCAAACAGACACCATGGTGC | 18992 | cttaAACCTGTCTTGTAACCTTGGC | 19169 |
| | | | TATAGTTCCTTACTGAAAGGTAAGT | | TATAGTTCCTTACTGAAAGGTAAGT | |
| | | | TGCTATAGTAAGGGCAACAGACCCG | | TGCTATAGTAAGGGCAACAGACCCG | |
| | | | AGGCGTTGGGGATCGCCTAGCCCGT | | AGGCGTTGGGGATCGCCTAGCCCGT | |
| | | | GTTTACGGGCTCTCCCCATATTCAA | | GTTTACGGGCTCTCCCCATATTCAA | |
| | | | AATAATGACAGACGAGCACCTTGGA | | AATAATGACAGACGAGCACCTTGGA | |
| | | | GCATTTATCTCCGAGGTGCTgcaga | | GCATTTATCTCCGAGGTGCT | |
| | | | cttctcCTCAGGAGTCAGATGCACC | | | |
| | | | ATGGTGTCtgtt | | | |
| 196 | BlatCa9 | − | caacCTCAAACAGACACCATGGTGC | 18993 | cttaAACCTGTCTTGTAACCTTGGC | 19170 |
| | | | TATAGTTCCTTACTGAAAGGTAAGT | | TATAGTTCCTTACTGAAAGGTAAGT | |
| | | | TGCTATAGTAAGGGCAACAGACCCG | | TGCTATAGTAAGGGCAACAGACCCG | |
| | | | AGGCGTTGGGGATCGCCTAGCCCGT | | AGGCGTTGGGGATCGCCTAGCCCGT | |
| | | | GTTTACGGGCTCTCCCCATATTCAA | | GTTTACGGGCTCTCCCCATATTCAA | |
| | | | AATAATGACAGACGAGCACCTTGGA | | AATAATGACAGACGAGCACCTTGGA | |
| | | | GCATTTATCTCCGAGGTGCTgcaga | | GCATTTATCTCCGAGGTGCT | |
| | | | cttctcCTCAGGAGTCAGATGCACC | | | |
| | | | ATGGTGTCtgtt | | | |
| 198 | SauriCas9 | + | ACCTTGCCCCACAGGGCAGTAGTTT | 18994 | CCAGGGCTGGGCATAAAAGTCGTTT | 19171 |
| | | | TAGTACTCTGGAAACAGAATCTACT | | TAGTACTCTGGAAACAGAATCTACT | |
| | | | AAAACAAGGCAAAATGCCGTGTTTA | | AAAACAAGGCAAAATGCCGTGTTTA | |
| | | | TCTCGTCAACTTGTTGGCGAGAtct | | TCTCGTCAACTTGTTGGCGAGA | |
| | | | gactcctGAGGAGAAGTCTGCCGTT | | | |
| | | | ACTGCCCTGTgggg | | | |
| 199 | SauriCas9- | + | ACCTTGCCCCACAGGGCAGTAGTTT | 18995 | GCTGGGCATAAAAGTCAGGGCGTTT | 19172 |
| | KKH | | TAGTACTCTGGAAACAGAATCTACT | | TAGTACTCTGGAAACAGAATCTACT | |
| | | | AAAACAAGGCAAAATGCCGTGTTTA | | AAAACAAGGCAAAATGCCGTGTTTA | |
| | | | TCTCGTCAACTTGTTGGCGAGAtct | | TCTCGTCAACTTGTTGGCGAGA | |
| | | | gactcctGAGGAGAAGTCTGCCGTT | | | |
| | | | ACTGCCCTGTgggg | | | |
| 202 | ScaCas9- | + | CCTTGCCCCACAGGGCAGTAGTTTT | 18996 | AGTCAGGGCAGAGCCATCTAGTTTT | 19173 |
| | Sc++ | | AGAGCTAGAAATAGCAAGTTAAAAT | | AGAGCTAGAAATAGCAAGTTAAAAT | |
| | | | AAGGCTAGTCCGTTATCAACTTGAA | | AAGGCTAGTCCGTTATCAACTTGAA | |
| | | | AAAGTGGCACCGAGTCGGTGCtctg | | AAAGTGGCACCGAGTCGGTGC | |
| | | | actcctGAGGAGAAGTCTGCCGTTA | | | |
| | | | CTGCCCTGTgggg | | | |
| 203 | SpyCas9- | + | CCTTGCCCCACAGGGCAGTAGTTTT | 18997 | AAAAGTCAGGGCAGAGCCATGTTTT | 19174 |
| | SpRY | | AGAGCTAGAAATAGCAAGTTAAAAT | | AGAGCTAGAAATAGCAAGTTAAAAT | |
| | | | AAGGCTAGTCCGTTATCAACTTGAA | | AAGGCTAGTCCGTTATCAACTTGAA | |
| | | | AAAGTGGCACCGAGTCGGTGCtctg | | AAAGTGGCACCGAGTCGGTGC | |
| | | | actcctGAGGAGAAGTCTGCCGTTA | | | |
| | | | CTGCCCTGTgggg | | | |
| 204 | SpyCas9- | − | ACCTCAAACAGACACCATGGGTTTT | 18998 | TTAAACCTGTCTTGTAACCTGTTTT | 19175 |
| | NG | | AGAGCTAGAAATAGCAAGTTAAAAT | | AGAGCTAGAAATAGCAAGTTAAAAT | |
| | | | AAGGCTAGTCCGTTATCAACTTGAA | | AAGGCTAGTCCGTTATCAACTTGAA | |
| | | | AAAGTGGCACCGAGTCGGTGCcaga | | AAAGTGGCACCGAGTCGGTGC | |
| | | | cttctcCTCAGGAGTCAGATGCACC | | | |
| | | | ATGGTGTCTgttt | | | |
| 208 | SpyCas9- | − | ACCTCAAACAGACACCATGGGTTTT | 18999 | ACCTGTCTTGTAACCTTGATGTTTT | 19176 |
| | SpRY | | AGAGCTAGAAATAGCAAGTTAAAAT | | AGAGCTAGAAATAGCAAGTTAAAAT | |
| | | | AAGGCTAGTCCGTTATCAACTTGAA | | AAGGCTAGTCCGTTATCAACTTGAA | |
| | | | AAAGTGGCACCGAGTCGGTGCcaga | | AAAGTGGCACCGAGTCGGTGC | |
| | | | cttctcCTCAGGAGTCAGATGCACC | | | |
| | | | ATGGTGTCTgttt | | | |
| 209 | BlatCas9 | + | tcacCTTGCCCCACAGGGCAGTAGC | 19000 | taaaAGTCAGGGCAGAGCCATCTGC | 19177 |
| | | | TATAGTTCCTTACTGAAAGGTAAGT | | TATAGTTCCTTACTGAAAGGTAAGT | |
| | | | TGCTATAGTAAGGGCAACAGACCCG | | TGCTATAGTAAGGGCAACAGACCCG | |
| | | | AGGCGTTGGGGATCGCCTAGCCCGT | | AGGCGTTGGGGATCGCCTAGCCCGT | |
| | | | GTTTACGGGCTCTCCCCATATTCAA | | GTTTACGGGCTCTCCCCATATTCAA | |
| | | | AATAATGACAGACGAGCACCTTGGA | | AATAATGACAGACGAGCACCTTGGA | |
| | | | GCATTTATCTCCGAGGTGCTtctga | | GCATTTATCTCCGAGGTGCT | |
| | | | ctcctGAGGAGAAGTCTGCCGTTAC | | | |
| | | | TGCCCTGTgggg | | | |
| 210 | BlatCas9 | + | tcacCTTGCCCCACAGGGCAGTAGC | 19001 | taaaAGTCAGGGCAGAGCCATCTGC | 19178 |
| | | | TATAGTTCCTTACTGAAAGGTAAGT | | TATAGTTCCTTACTGAAAGGTAAGT | |
| | | | TGCTATAGTAAGGGCAACAGACCCG | | TGCTATAGTAAGGGCAACAGACCCG | |
| | | | AGGCGTTGGGGATCGCCTAGCCCGT | | AGGCGTTGGGGATCGCCTAGCCCGT | |
| | | | GTTTACGGGCTCTCCCCATATTCAA | | GTTTACGGGCTCTCCCCATATTCAA | |
| | | | AATAATGACAGACGAGCACCTTGGA | | AATAATGACAGACGAGCACCTTGGA | |
| | | | GCATTTATCTCCGAGGTGCTtctga | | GCATTTATCTCCGAGGTGCT | |
| | | | ctcctGAGGAGAAGTCTGCCGTTAC | | | |
| | | | TGCCCTGTgggg | | | |
| 212 | SauCas9KKH | + | CACCTTGCCCCACAGGGCAGTGTTT | 19002 | GGCTGGGCATAAAAGTCAGGGGTTT | 19179 |
| | | | TAGTACTCTGGAAACAGAATCTACT | | TAGTACTCTGGAAACAGAATCTACT | |
| | | | AAAACAAGGCAAAATGCCGTGTTTA | | AAAACAAGGCAAAATGCCGTGTTTA | |
| | | | TCTCGTCAACTTGTTGGCGAGActg | | TCTCGTCAACTTGTTGGCGAGA | |
| | | | actcctGAGGAGAAGTCTGCCGTTA | | | |
| | | | CTGCCCTGTGgggc | | | |
| 215 | ScaCas9- | − | AACCTCAAACAGACACCATGGTTTT | 19003 | CTTGTAACCTTGATACCAACGTTTT | 19180 |
| | Sc++ | | AGAGCTAGAAATAGCAAGTTAAAAT | | AGAGCTAGAAATAGCAAGTTAAAAT | |
| | | | AAGGCTAGTCCGTTATCAACTTGAA | | AAGGCTAGTCCGTTATCAACTTGAA | |
| | | | AAAGTGGCACCGAGTCGGTGCagac | | AAAGTGGCACCGAGTCGGTGC | |
| | | | ttctcCTCAGGAGTCAGATGCACCA | | | |
| | | | TGGTGTCTGtttg | | | |
| 216 | SpyCas9- | − | AACCTCAAACAGACACCATGGTTTT | 19004 | CCTGTCTTGTAACCTTGATAGTTTT | 19181 |
| | SpRY | | AGAGCTAGAAATAGCAAGTTAAAAT | | AGAGCTAGAAATAGCAAGTTAAAAT | |
| | | | AAGGCTAGTCCGTTATCAACTTGAA | | AAGGCTAGTCCGTTATCAACTTGAA | |
| | | | AAAGTGGCACCGAGTCGGTGCagac | | AAAGTGGCACCGAGTCGGTGC | |
| | | | ttctcCTCAGGAGTCAGATGCACCA | | | |
| | | | TGGTGTCTGtttg | | | |
| 217 | SpyCas9- | + | ACCTTGCCCCACAGGGCAGTGTTTT | 19005 | AAAGTCAGGGCAGAGCCATCGTTTT | 19182 |
| | SpRY | | AGAGCTAGAAATAGCAAGTTAAAAT | | AGAGCTAGAAATAGCAAGTTAAAAT | |
| | | | AAGGCTAGTCCGTTATCAACTTGAA | | AAGGCTAGTCCGTTATCAACTTGAA | |
| | | | AAAGTGGCACCGAGTCGGTGCctga | | AAAGTGGCACCGAGTCGGTGC | |
| | | | ctcctGAGGAGAAGTCTGCCGTTAC | | | |
| | | | TGCCCTGTGgggc | | | |
| 221 | SpyCas9- | − | CAACCTCAAACAGACACCATGTTTT | 19006 | TTGTAACCTTGATACCAACCGTTTT | 19183 |
| | NG | | AGAGCTAGAAATAGCAAGTTAAAAT | | AGAGCTAGAAATAGCAAGTTAAAAT | |
| | | | AAGGCTAGTCCGTTATCAACTTGAA | | AAGGCTAGTCCGTTATCAACTTGAA | |
| | | | AAAGTGGCACCGAGTCGGTGCgact | | AAAGTGGCACCGAGTCGGTGC | |
| | | | tctcCTCAGGAGTCAGATGCACCAT | | | |
| | | | GGTGTCTGTttga | | | |
| 224 | SpyCas9- | + | CACCTTGCCCCACAGGGCAGGTTTT | 19007 | AAGTCAGGGCAGAGCCATCTGTTTT | 19184 |
| | SpRY | | AGAGCTAGAAATAGCAAGTTAAAAT | | AGAGCTAGAAATAGCAAGTTAAAAT | |
| | | | AAGGCTAGTCCGTTATCAACTTGAA | | AAGGCTAGTCCGTTATCAACTTGAA | |
| | | | AAAGTGGCACCGAGTCGGTGCtgac | | AAAGTGGCACCGAGTCGGTGC | |
| | | | tcctGAGGAGAAGTCTGCCGTTACT | | | |
| | | | GCCCTGTGGggca | | | |
| 226 | SpyCas9- | − | CAACCTCAAACAGACACCATGTTTT | 19008 | CTGTCTTGTAACCTTGATACGTTTT | 19185 |
| | SpRY | | AGAGCTAGAAATAGCAAGTTAAAAT | | AGAGCTAGAAATAGCAAGTTAAAAT | |
| | | | AAGGCTAGTCCGTTATCAACTTGAA | | AAGGCTAGTCCGTTATCAACTTGAA | |
| | | | AAAGTGGCACCGAGTCGGTGCgact | | AAAGTGGCACCGAGTCGGTGC | |
| | | | tctcCTCAGGAGTCAGATGCACCAT | | | |
| | | | GGTGTCTGTttga | | | |
| 227 | BlatCas9 | − | tagcAACCTCAAACAGACACCATGC | 19009 | aaccTGTCTTGTAACCTTGATACGC | 19186 |
| | | | TATAGTTCCTTACTGAAAGGTAAGT | | TATAGTTCCTTACTGAAAGGTAAGT | |
| | | | TGCTATAGTAAGGGCAACAGACCCG | | TGCTATAGTAAGGGCAACAGACCCG | |
| | | | AGGCGTTGGGGATCGCCTAGCCCGT | | AGGCGTTGGGGATCGCCTAGCCCGT | |
| | | | GTTTACGGGCTCTCCCCATATTCAA | | GTTTACGGGCTCTCCCCATATTCAA | |
| | | | AATAATGACAGACGAGCACCTTGGA | | AATAATGACAGACGAGCACCTTGGA | |
| | | | GCATTTATCTCCGAGGTGCTgactt | | GCATTTATCTCCGAGGTGCT | |
| | | | ctcCTCAGGAGTCAGATGCACCATG | | | |
| | | | GTGTCTGTttga | | | |
| 232 | ScaCas9- | − | GCAACCTCAAACAGACACCAGTTTT | 19010 | CTTGTAACCTTGATACCAACGTTTT | 19187 |
| | Sc++ | | AGAGCTAGAAATAGCAAGTTAAAAT | | AGAGCTAGAAATAGCAAGTTAAAAT | |
| | | | AAGGCTAGTCCGTTATCAACTTGAA | | AAGGCTAGTCCGTTATCAACTTGAA | |
| | | | AAAGTGGCACCGAGTCGGTGCactt | | AAAGTGGCACCGAGTCGGTGC | |
| | | | ctcCTCAGGAGTCAGATGCACCATG | | | |
| | | | GTGTCTGTTtgag | | | |
| 233 | SpyCas9 | − | GCAACCTCAAACAGACACCAGTTTT | 19011 | ACCTTGATACCAACCTGCCCGTTTT | 19188 |
| | | | AGAGCTAGAAATAGCAAGTTAAAAT | | AGAGCTAGAAATAGCAAGTTAAAAT | |
| | | | AAGGCTAGTCCGTTATCAACTTGAA | | AAGGCTAGTCCGTTATCAACTTGAA | |
| | | | AAAGTGGCACCGAGTCGGTGCactt | | AAAGTGGCACCGAGTCGGTGC | |
| | | | ctcCTCAGGAGTCAGATGCACCATG | | | |
| | | | GTGTCTGTTtgag | | | |
| 236 | SpyCas9- | − | GCAACCTCAAACAGACACCAGTTTT | 19012 | TGTCTTGTAACCTTGATACCGTTTT | 19189 |
| | SpRY | | AGAGCTAGAAATAGCAAGTTAAAAT | | AGAGCTAGAAATAGCAAGTTAAAAT | |
| | | | AAGGCTAGTCCGTTATCAACTTGAA | | AAGGCTAGTCCGTTATCAACTTGAA | |
| | | | AAAGTGGCACCGAGTCGGTGCactt | | AAAGTGGCACCGAGTCGGTGC | |
| | | | ctcCTCAGGAGTCAGATGCACCATG | | | |
| | | | GTGTCTGTTtgag | | | |
| 237 | SpyCas9- | − | GCAACCTCAAACAGACACCAGTTTT | 19013 | TTGTAACCTTGATACCAACCGTTTT | 19190 |
| | NG | | AGAGCTAGAAATAGCAAGTTAAAAT | | AGAGCTAGAAATAGCAAGTTAAAAT | |
| | | | AAGGCTAGTCCGTTATCAACTTGAA | | AAGGCTAGTCCGTTATCAACTTGAA | |
| | | | AAAGTGGCACCGAGTCGGTGCactt | | AAAGTGGCACCGAGTCGGTGC | |
| | | | ctcCTCAGGAGTCAGATGCACCATG | | | |
| | | | GTGTCTGTTtgag | | | |
| 240 | SpyCas9- | + | TCACCTTGCCCCACAGGGCAGTTTT | 19014 | AGTCAGGGCAGAGCCATCTAGTTTT | 19191 |
| | SpRY | | AGAGCTAGAAATAGCAAGTTAAAAT | | AGAGCTAGAAATAGCAAGTTAAAAT | |
| | | | AAGGCTAGTCCGTTATCAACTTGAA | | AAGGCTAGTCCGTTATCAACTTGAA | |
| | | | AAAGTGGCACCGAGTCGGTGCgact | | AAAGTGGCACCGAGTCGGTGC | |
| | | | cctGAGGAGAAGTCTGCCGTTACTG | | | |
| | | | CCCTGTGGGgcaa | | | |
| 241 | BlatCas9 | + | cgttCACCTTGCCCCACAGGGCAGC | 19015 | taaaAGTCAGGGCAGAGCCATCTGC | 19192 |
| | | | TATAGTTCCTTACTGAAAGGTAAGT | | TATAGTTCCTTACTGAAAGGTAAGT | |
| | | | TGCTATAGTAAGGGCAACAGACCCG | | TGCTATAGTAAGGGCAACAGACCCG | |
| | | | AGGCGTTGGGGATCGCCTAGCCCGT | | AGGCGTTGGGGATCGCCTAGCCCGT | |
| | | | GTTTACGGGCTCTCCCCATATTCAA | | GTTTACGGGCTCTCCCCATATTCAA | |
| | | | AATAATGACAGACGAGCACCTTGGA | | AATAATGACAGACGAGCACCTTGGA | |
| | | | GCATTTATCTCCGAGGTGCTgactc | | GCATTTATCTCCGAGGTGCT | |
| | | | ctGAGGAGAAGTCTGCCGTTACTGC | | | |
| | | | CCTGTGGGgcaa | | | |
| 243 | SauCas9KKH | + | GTTCACCTTGCCCCACAGGGCGTTT | 19016 | GGCTGGGCATAAAAGTCAGGGGTTT | 19193 |
| | | | TAGTACTCTGGAAACAGAATCTACT | | TAGTACTCTGGAAACAGAATCTACT | |
| | | | AAAACAAGGCAAAATGCCGTGTTTA | | AAAACAAGGCAAAATGCCGTGTTTA | |
| | | | TCTCGTCAACTTGTTGGCGAGAact | | TCTCGTCAACTTGTTGGCGAGA | |
| | | | cctGAGGAGAAGTCTGCCGTTACTG | | | |
| | | | CCCTGTGGGGcaag | | | |
| 244 | SauriCas9 | − | TAGCAACCTCAAACAGACACCGTTT | 19017 | TAACCTTGATACCAACCTGCCGTTT | 19194 |
| | | | TAGTACTCTGGAAACAGAATCTACT | | TAGTACTCTGGAAACAGAATCTACT | |
| | | | AAAACAAGGCAAAATGCCGTGTTTA | | AAAACAAGGCAAAATGCCGTGTTTA | |
| | | | TCTCGTCAACTTGTTGGCGAGActt | | TCTCGTCAACTTGTTGGCGAGA | |
| | | | ctcCTCAGGAGTCAGATGCACCATG | | | |
| | | | GTGTCTGTTTgagg | | | |
| 245 | SauriCas9- | − | TAGCAACCTCAAACAGACACCGTTT | 19018 | GTAACCTTGATACCAACCTGCGTTT | 19195 |
| | KKH | | TAGTACTCTGGAAACAGAATCTACT | | TAGTACTCTGGAAACAGAATCTACT | |
| | | | AAAACAAGGCAAAATGCCGTGTTTA | | AAAACAAGGCAAAATGCCGTGTTTA | |
| | | | TCTCGTCAACTTGTTGGCGAGActt | | TCTCGTCAACTTGTTGGCGAGA | |
| | | | ctcCTCAGGAGTCAGATGCACCATG | | | |
| | | | GTGTCTGTTTgagg | | | |
| 248 | ScaCas9- | − | AGCAACCTCAAACAGACACCGTTTT | 19019 | CTTGTAACCTTGATACCAACGTTTT | 19196 |
| | Sc++ | | AGAGCTAGAAATAGCAAGTTAAAAT | | AGAGCTAGAAATAGCAAGTTAAAAT | |
| | | | AAGGCTAGTCCGTTATCAACTTGAA | | AAGGCTAGTCCGTTATCAACTTGAA | |
| | | | AAAGTGGCACCGAGTCGGTGCcttc | | AAAGTGGCACCGAGTCGGTGC | |
| | | | tcCTCAGGAGTCAGATGCACCATGG | | | |
| | | | TGTCTGTTTgagg | | | |
| 249 | SpyCas9- | − | AGCAACCTCAAACAGACACCGTTTT | 19020 | GTCTTGTAACCTTGATACCAGTTTT | 19197 |
| | SpRY | | AGAGCTAGAAATAGCAAGTTAAAAT | | AGAGCTAGAAATAGCAAGTTAAAAT | |
| | | | AAGGCTAGTCCGTTATCAACTTGAA | | AAGGCTAGTCCGTTATCAACTTGAA | |
| | | | AAAGTGGCACCGAGTCGGTGCcttc | | AAAGTGGCACCGAGTCGGTGC | |
| | | | tcCTCAGGAGTCAGATGCACCATGG | | | |
| | | | TGTCTGTTTgagg | | | |
| 250 | SpyCas9- | + | TTCACCTTGCCCCACAGGGCGTTTT | 19021 | GTCAGGGCAGAGCCATCTATGTTTT | 19198 |
| | NG | | AGAGCTAGAAATAGCAAGTTAAAAT | | AGAGCTAGAAATAGCAAGTTAAAAT | |
| | | | AAGGCTAGTCCGTTATCAACTTGAA | | AAGGCTAGTCCGTTATCAACTTGAA | |
| | | | AAAGTGGCACCGAGTCGGTGCactc | | AAAGTGGCACCGAGTCGGTGC | |
| | | | ctGAGGAGAAGTCTGCCGTTACTGC | | | |
| | | | CCTGTGGGGcaag | | | |
| 254 | SpyCas9- | + | TTCACCTTGCCCCACAGGGCGTTTT | 19022 | GTCAGGGCAGAGCCATCTATGTTTT | 19199 |
| | SpRY | | AGAGCTAGAAATAGCAAGTTAAAAT | | AGAGCTAGAAATAGCAAGTTAAAAT | |
| | | | AAGGCTAGTCCGTTATCAACTTGAA | | AAGGCTAGTCCGTTATCAACTTGAA | |
| | | | AAAGTGGCACCGAGTCGGTGCactc | | AAAGTGGCACCGAGTCGGTGC | |
| | | | ctGAGGAGAAGTCTGCCGTTACTGC | | | |
| | | | CCTGTGGGGcaag | | | |
| 258 | SauCas9KKH | − | CTAGCAACCTCAAACAGACACGTTT | 19023 | TGTAACCTTGATACCAACCTGGTTT | 19200 |
| | | | TAGTACTCTGGAAACAGAATCTACT | | TAGTACTCTGGAAACAGAATCTACT | |
| | | | AAAACAAGGCAAAATGCCGTGTTTA | | AAAACAAGGCAAAATGCCGTGTTTA | |
| | | | TCTCGTCAACTTGTTGGCGAGAttc | | TCTCGTCAACTTGTTGGCGAGA | |
| | | | tcCTCAGGAGTCAGATGCACCATGG | | | |
| | | | TGTCTGTTTGaggt | | | |
| 259 | SauCas9KKH | − | CTAGCAACCTCAAACAGACACGTTT | 19024 | TGTAACCTTGATACCAACCTGGTTT | 19201 |
| | | | TAGTACTCTGGAAACAGAATCTACT | | TAGTACTCTGGAAACAGAATCTACT | |
| | | | AAAACAAGGCAAAATGCCGTGTTTA | | AAAACAAGGCAAAATGCCGTGTTTA | |
| | | | TCTCGTCAACTTGTTGGCGAGAttc | | TCTCGTCAACTTGTTGGCGAGA | |
| | | | tcCTCAGGAGTCAGATGCACCATGG | | | |
| | | | TGTCTGTTTGaggt | | | |
| 262 | ScaCas9- | + | GTTCACCTTGCCCCACAGGGGTTTT | 19025 | AGTCAGGGCAGAGCCATCTAGTTTT | 19202 |
| | Sc++ | | AGAGCTAGAAATAGCAAGTTAAAAT | | AGAGCTAGAAATAGCAAGTTAAAAT | |
| | | | AAGGCTAGTCCGTTATCAACTTGAA | | AAGGCTAGTCCGTTATCAACTTGAA | |
| | | | AAAGTGGCACCGAGTCGGTGCctcc | | AAAGTGGCACCGAGTCGGTGC | |
| | | | tGAGGAGAAGTCTGCCGTTACTGCC | | | |
| | | | CTGTGGGGCaagg | | | |
| 263 | SpyCas9- | + | GTTCACCTTGCCCCACAGGGGTTTT | 19026 | TCAGGGCAGAGCCATCTATTGTTTT | 19203 |
| | SpRY | | AGAGCTAGAAATAGCAAGTTAAAAT | | AGAGCTAGAAATAGCAAGTTAAAAT | |
| | | | AAGGCTAGTCCGTTATCAACTTGAA | | AAGGCTAGTCCGTTATCAACTTGAA | |
| | | | AAAGTGGCACCGAGTCGGTGCctec | | AAAGTGGCACCGAGTCGGTGC | |
| | | | tGAGGAGAAGTCTGCCGTTACTGCC | | | |
| | | | CTGTGGGGCaagg | | | |
| 264 | SpyCas9- | − | TAGCAACCTCAAACAGACACGTTTT | 19027 | TCTTGTAACCTTGATACCAAGTTTT | 19204 |
| | SpRY | | AGAGCTAGAAATAGCAAGTTAAAAT | | AGAGCTAGAAATAGCAAGTTAAAAT | |
| | | | AAGGCTAGTCCGTTATCAACTTGAA | | AAGGCTAGTCCGTTATCAACTTGAA | |
| | | | AAAGTGGCACCGAGTCGGTGCttct | | AAAGTGGCACCGAGTCGGTGC | |
| | | | cCTCAGGAGTCAGATGCACCATGGT | | | |
| | | | GTCTGTTTGaggt | | | |
| 267 | SauriCas9- | + | ACGTTCACCTTGCCCCACAGGGTTT | 19028 | GCTGGGCATAAAAGTCAGGGCGTTT | 19205 |
| | KKH | | TAGTACTCTGGAAACAGAATCTACT | | TAGTACTCTGGAAACAGAATCTACT | |
| | | | AAAACAAGGCAAAATGCCGTGTTTA | | AAAACAAGGCAAAATGCCGTGTTTA | |
| | | | TCTCGTCAACTTGTTGGCGAGAtec | | TCTCGTCAACTTGTTGGCGAGA | |
| | | | tGAGGAGAAGTCTGCCGTTACTGCC | | | |
| | | | CTGTGGGGCAaggt | | | |
| 268 | SpyCas9- | + | CGTTCACCTTGCCCCACAGGGTTTT | 19029 | CAGGGCAGAGCCATCTATTGGTTTT | 19206 |
| | SpRY | | AGAGCTAGAAATAGCAAGTTAAAAT | | AGAGCTAGAAATAGCAAGTTAAAAT | |
| | | | AAGGCTAGTCCGTTATCAACTTGAA | | AAGGCTAGTCCGTTATCAACTTGAA | |
| | | | AAAGTGGCACCGAGTCGGTGCtcct | | AAAGTGGCACCGAGTCGGTGC | |
| | | | GAGGAGAAGTCTGCCGTTACTGCCC | | | |
| | | | TGTGGGGCAaggt | | | |
| 269 | SpyCas9- | − | CTAGCAACCTCAAACAGACAGTTTT | 19030 | CTTGTAACCTTGATACCAACGTTTT | 19207 |
| | SpRY | | AGAGCTAGAAATAGCAAGTTAAAAT | | AGAGCTAGAAATAGCAAGTTAAAAT | |
| | | | AAGGCTAGTCCGTTATCAACTTGAA | | AAGGCTAGTCCGTTATCAACTTGAA | |
| | | | AAAGTGGCACCGAGTCGGTGCtctc | | AAAGTGGCACCGAGTCGGTGC | |
| | | | CTCAGGAGTCAGATGCACCATGGTG | | | |
| | | | TCTGTTTGAggtt | | | |
| 270 | SauCas9KKH | + | CACGTTCACCTTGCCCCACAGGTTT | 19031 | CATCTATTGCTTACATTTGCTGTTT | 19208 |
| | | | TAGTACTCTGGAAACAGAATCTACT | | TAGTACTCTGGAAACAGAATCTACT | |
| | | | AAAACAAGGCAAAATGCCGTGTTTA | | AAAACAAGGCAAAATGCCGTGTTTA | |
| | | | TCTCGTCAACTTGTTGGCGAGAcct | | TCTCGTCAACTTGTTGGCGAGA | |
| | | | GAGGAGAAGTCTGCCGTTACTGCCC | | | |
| | | | TGTGGGGCAAggtg | | | |
| 271 | SauCas9KKH | + | CACGTTCACCTTGCCCCACAGGTTT | 19032 | CATCTATTGCTTACATTTGCTGTTT | 19209 |
| | | | TAGTACTCTGGAAACAGAATCTACT | | TAGTACTCTGGAAACAGAATCTACT | |
| | | | AAAACAAGGCAAAATGCCGTGTTTA | | AAAACAAGGCAAAATGCCGTGTTTA | |
| | | | TCTCGTCAACTTGTTGGCGAGAcct | | TCTCGTCAACTTGTTGGCGAGA | |
| | | | GAGGAGAAGTCTGCCGTTACTGCCC | | | |
| | | | TGTGGGGCAAggtg | | | |
| 274 | SpyCas9- | + | ACGTTCACCTTGCCCCACAGGTTTT | 19033 | GTCAGGGCAGAGCCATCTATGTTTT | 19210 |
| | NG | | AGAGCTAGAAATAGCAAGTTAAAAT | | AGAGCTAGAAATAGCAAGTTAAAAT | |
| | | | AAGGCTAGTCCGTTATCAACTTGAA | | AAGGCTAGTCCGTTATCAACTTGAA | |
| | | | AAAGTGGCACCGAGTCGGTGCcctG | | AAAGTGGCACCGAGTCGGTGC | |
| | | | AGGAGAAGTCTGCCGTTACTGCCCT | | | |
| | | | GTGGGGCAAggtg | | | |
| 278 | SpyCas9- | + | ACGTTCACCTTGCCCCACAGGTTTT | 19034 | AGGGCAGAGCCATCTATTGCGTTTT | 19211 |
| | SpRY | | AGAGCTAGAAATAGCAAGTTAAAAT | | AGAGCTAGAAATAGCAAGTTAAAAT | |
| | | | AAGGCTAGTCCGTTATCAACTTGAA | | AAGGCTAGTCCGTTATCAACTTGAA | |
| | | | AAAGTGGCACCGAGTCGGTGCcctG | | AAAGTGGCACCGAGTCGGTGC | |
| | | | AGGAGAAGTCTGCCGTTACTGCCCT | | | |
| | | | GTGGGGCAAggtg | | | |
| 279 | SpyCas9- | − | ACTAGCAACCTCAAACAGACGTTTT | 19035 | TTGTAACCTTGATACCAACCGTTTT | 19212 |
| | SpRY | | AGAGCTAGAAATAGCAAGTTAAAAT | | AGAGCTAGAAATAGCAAGTTAAAAT | |
| | | | AAGGCTAGTCCGTTATCAACTTGAA | | AAGGCTAGTCCGTTATCAACTTGAA | |
| | | | AAAGTGGCACCGAGTCGGTGCctcC | | AAAGTGGCACCGAGTCGGTGC | |
| | | | TCAGGAGTCAGATGCACCATGGTGT | | | |
| | | | CTGTTTGAGgttg | | | |
| 283 | ScaCas9- | + | CACGTTCACCTTGCCCCACAGTTTT | 19036 | GAGCCATCTATTGCTTACATGTTTT | 19213 |
| | Sc++ | | AGAGCTAGAAATAGCAAGTTAAAAT | | AGAGCTAGAAATAGCAAGTTAAAAT | |
| | | | AAGGCTAGTCCGTTATCAACTTGAA | | AAGGCTAGTCCGTTATCAACTTGAA | |
| | | | AAAGTGGCACCGAGTCGGTGCctGA | | AAAGTGGCACCGAGTCGGTGC | |
| | | | GGAGAAGTCTGCCGTTACTGCCCTG | | | |
| | | | TGGGGCAAGgtga | | | |
| 284 | SpyCaS9 | + | CACGTTCACCTTGCCCCACAGTTTT | 19037 | AGGGCTGGGCATAAAAGTCAGTTTT | 19214 |
| | | | AGAGCTAGAAATAGCAAGTTAAAAT | | AGAGCTAGAAATAGCAAGTTAAAAT | |
| | | | AAGGCTAGTCCGTTATCAACTTGAA | | AAGGCTAGTCCGTTATCAACTTGAA | |
| | | | AAAGTGGCACCGAGTCGGTGCctGA | | AAAGTGGCACCGAGTCGGTGC | |
| | | | GGAGAAGTCTGCCGTTACTGCCCTG | | | |
| | | | TGGGGCAAGgtga | | | |
| 287 | SpyCas9- | + | CACGTTCACCTTGCCCCACAGTTTT | 19038 | GGGCAGAGCCATCTATTGCTGTTTT | 19215 |
| | SpRY | | AGAGCTAGAAATAGCAAGTTAAAAT | | AGAGCTAGAAATAGCAAGTTAAAAT | |
| | | | AAGGCTAGTCCGTTATCAACTTGAA | | AAGGCTAGTCCGTTATCAACTTGAA | |
| | | | AAAGTGGCACCGAGTCGGTGCctGA | | AAAGTGGCACCGAGTCGGTGC | |
| | | | GGAGAAGTCTGCCGTTACTGCCCTG | | | |
| | | | TGGGGCAAGgtga | | | |
| 288 | SpyCas9- | + | CACGTTCACCTTGCCCCACAGTTTT | 19039 | GTCAGGGCAGAGCCATCTATGTTTT | 19216 |
| | NG | | AGAGCTAGAAATAGCAAGTTAAAAT | | AGAGCTAGAAATAGCAAGTTAAAAT | |
| | | | AAGGCTAGTCCGTTATCAACTTGAA | | AAGGCTAGTCCGTTATCAACTTGAA | |
| | | | AAAGTGGCACCGAGTCGGTGCctGA | | AAAGTGGCACCGAGTCGGTGC | |
| | | | GGAGAAGTCTGCCGTTACTGCCCTG | | | |
| | | | TGGGGCAAGgtga | | | |
| 291 | SpyCas9- | − | CACTAGCAACCTCAAACAGAGTTTT | 19040 | TGTAACCTTGATACCAACCTGTTTT | 19217 |
| | SpRY | | AGAGCTAGAAATAGCAAGTTAAAAT | | AGAGCTAGAAATAGCAAGTTAAAAT | |
| | | | AAGGCTAGTCCGTTATCAACTTGAA | | AAGGCTAGTCCGTTATCAACTTGAA | |
| | | | AAAGTGGCACCGAGTCGGTGCtcCT | | AAAGTGGCACCGAGTCGGTGC | |
| | | | CAGGAGTCAGATGCACCATGGTGTC | | | |
| | | | TGTTTGAGGttgc | | | |
| 294 | SauriCas9 | + | TCCACGTTCACCTTGCCCCACGTTT | 19041 | CCAGGGCTGGGCATAAAAGTCGTTT | 19218 |
| | | | TAGTACTCTGGAAACAGAATCTACT | | TAGTACTCTGGAAACAGAATCTACT | |
| | | | AAAACAAGGCAAAATGCCGTGTTTA | | AAAACAAGGCAAAATGCCGTGTTTA | |
| | | | TCTCGTCAACTTGTTGGCGAGAtGA | | TCTCGTCAACTTGTTGGCGAGA | |
| | | | GGAGAAGTCTGCCGTTACTGCCCTG | | | |
| | | | TGGGGCAAGGtgaa | | | |
| 295 | SauriCas9- | + | TCCACGTTCACCTTGCCCCACGTTT | 19042 | GCTGGGCATAAAAGTCAGGGCGTTT | 19219 |
| | KKH | | TAGTACTCTGGAAACAGAATCTACT | | TAGTACTCTGGAAACAGAATCTACT | |
| | | | AAAACAAGGCAAAATGCCGTGTTTA | | AAAACAAGGCAAAATGCCGTGTTTA | |
| | | | TCTCGTCAACTTGTTGGCGAGAtGA | | TCTCGTCAACTTGTTGGCGAGA | |
| | | | GGAGAAGTCTGCCGTTACTGCCCTG | | | |
| | | | TGGGGCAAGGtgaa | | | |
| 298 | ScaCas9- | + | CCACGTTCACCTTGCCCCACGTTTT | 19043 | GAGCCATCTATTGCTTACATGTTTT | 19220 |
| | Sc++ | | AGAGCTAGAAATAGCAAGTTAAAAT | | AGAGCTAGAAATAGCAAGTTAAAAT | |
| | | | AAGGCTAGTCCGTTATCAACTTGAA | | AAGGCTAGTCCGTTATCAACTTGAA | |
| | | | AAAGTGGCACCGAGTCGGTGCtGAG | | AAAGTGGCACCGAGTCGGTGC | |
| | | | GAGAAGTCTGCCGTTACTGCCCTGT | | | |
| | | | GGGGCAAGGtgaa | | | |
| 299 | SpyCas9 | + | CCACGTTCACCTTGCCCCACGTTTT | 19044 | AGGGCTGGGCATAAAAGTCAGTTTT | 19221 |
| | | | AGAGCTAGAAATAGCAAGTTAAAAT | | AGAGCTAGAAATAGCAAGTTAAAAT | |
| | | | AAGGCTAGTCCGTTATCAACTTGAA | | AAGGCTAGTCCGTTATCAACTTGAA | |
| | | | AAAGTGGCACCGAGTCGGTGCtGAG | | AAAGTGGCACCGAGTCGGTGC | |
| | | | GAGAAGTCTGCCGTTACTGCCCTGT | | | |
| | | | GGGGCAAGGtgaa | | | |
| 302 | SpyCas9- | + | CCACGTTCACCTTGCCCCACGTTTT | 19045 | GGCAGAGCCATCTATTGCTTGTTTT | 19222 |
| | SpRY | | AGAGCTAGAAATAGCAAGTTAAAAT | | AGAGCTAGAAATAGCAAGTTAAAAT | |
| | | | AAGGCTAGTCCGTTATCAACTTGAA | | AAGGCTAGTCCGTTATCAACTTGAA | |
| | | | AAAGTGGCACCGAGTCGGTGCtGAG | | AAAGTGGCACCGAGTCGGTGC | |
| | | | GAGAAGTCTGCCGTTACTGCCCTGT | | | |
| | | | GGGGCAAGGtgaa | | | |
| 303 | SpyCas9- | + | CCACGTTCACCTTGCCCCACGTTTT | 19046 | GTCAGGGCAGAGCCATCTATGTTTT | 19223 |
| | NG | | AGAGCTAGAAATAGCAAGTTAAAAT | | AGAGCTAGAAATAGCAAGTTAAAAT | |
| | | | AAGGCTAGTCCGTTATCAACTTGAA | | AAGGCTAGTCCGTTATCAACTTGAA | |
| | | | AAAGTGGCACCGAGTCGGTGCtGAG | | AAAGTGGCACCGAGTCGGTGC | |
| | | | GAGAAGTCTGCCGTTACTGCCCTGT | | | |
| | | | GGGGCAAGGtgaa | | | |
| 306 | SpyCas9- | − | TCACTAGCAACCTCAAACAGGTTTT | 19047 | GTAACCTTGATACCAACCTGGTTTT | 19224 |
| | SpRY | | AGAGCTAGAAATAGCAAGTTAAAAT | | AGAGCTAGAAATAGCAAGTTAAAAT | |
| | | | AAGGCTAGTCCGTTATCAACTTGAA | | AAGGCTAGTCCGTTATCAACTTGAA | |
| | | | AAAGTGGCACCGAGTCGGTGCcCTC | | AAAGTGGCACCGAGTCGGTGC | |
| | | | AGGAGTCAGATGCACCATGGTGTCT | | | |
| | | | GTTTGAGGTtgct | | | |
| 307 | BlatCas9 | + | catcCACGTTCACCTTGCCCCACGC | 19048 | agtcAGGGCAGAGCCATCTATTGGC | 19225 |
| | | | TATAGTTCCTTACTGAAAGGTAAGT | | TATAGTTCCTTACTGAAAGGTAAGT | |
| | | | TGCTATAGTAAGGGCAACAGACCCG | | TGCTATAGTAAGGGCAACAGACCCG | |
| | | | AGGCGTTGGGGATCGCCTAGCCCGT | | AGGCGTTGGGGATCGCCTAGCCCGT | |
| | | | GTTTACGGGCTCTCCCCATATTCAA | | GTTTACGGGCTCTCCCCATATTCAA | |
| | | | AATAATGACAGACGAGCACCTTGGA | | AATAATGACAGACGAGCACCTTGGA | |
| | | | GCATTTATCTCCGAGGTGCTtGAGG | | GCATTTATCTCCGAGGTGCT | |
| | | | AGAAGTCTGCCGTTACTGCCCTGTG | | | |
| | | | GGGCAAGGtgaa | | | |
| 308 | BlatCas9 | − | tgttCACTAGCAACCTCAAACAGGC | 19049 | gtctTGTAACCTTGATACCAACCGC | 19226 |
| | | | TATAGTTCCTTACTGAAAGGTAAGT | | TATAGTTCCTTACTGAAAGGTAAGT | |
| | | | TGCTATAGTAAGGGCAACAGACCCG | | TGCTATAGTAAGGGCAACAGACCCG | |
| | | | AGGCGTTGGGGATCGCCTAGCCCGT | | AGGCGTTGGGGATCGCCTAGCCCGT | |
| | | | GTTTACGGGCTCTCCCCATATTCAA | | GTTTACGGGCTCTCCCCATATTCAA | |
| | | | AATAATGACAGACGAGCACCTTGGA | | AATAATGACAGACGAGCACCTTGGA | |
| | | | GCATTTATCTCCGAGGTGCTcCTCA | | GCATTTATCTCCGAGGTGCT | |
| | | | GGAGTCAGATGCACCATGGTGTCTG | | | |
| | | | TTTGAGGTtgct | | | |
| 309 | BlatCas9 | + | catcCACGTTCACCTTGCCCCACGC | 19050 | agtcAGGGCAGAGCCATCTATTGGC | 19227 |
| | | | TATAGTTCCTTACTGAAAGGTAAGT | | TATAGTTCCTTACTGAAAGGTAAGT | |
| | | | TGCTATAGTAAGGGCAACAGACCCG | | TGCTATAGTAAGGGCAACAGACCCG | |
| | | | AGGCGTTGGGGATCGCCTAGCCCGT | | AGGCGTTGGGGATCGCCTAGCCCGT | |
| | | | GTTTACGGGCTCTCCCCATATTCAA | | GTTTACGGGCTCTCCCCATATTCAA | |
| | | | AATAATGACAGACGAGCACCTTGGA | | AATAATGACAGACGAGCACCTTGGA | |
| | | | GCATTTATCTCCGAGGTGCTtGAGG | | GCATTTATCTCCGAGGTGCT | |
| | | | AGAAGTCTGCCGTTACTGCCCTGTG | | | |
| | | | GGGCAAGGtgaa | | | |
| 310 | BlatCas9 | − | tgttCACTAGCAACCTCAAACAGGC | 19051 | gtctTGTAACCTTGATACCAACCGC | 19228 |
| | | | TATAGTTCCTTACTGAAAGGTAAGT | | TATAGTTCCTTACTGAAAGGTAAGT | |
| | | | TGCTATAGTAAGGGCAACAGACCCG | | TGCTATAGTAAGGGCAACAGACCCG | |
| | | | AGGCGTTGGGGATCGCCTAGCCCGT | | AGGCGTTGGGGATCGCCTAGCCCGT | |
| | | | GTTTACGGGCTCTCCCCATATTCAA | | GTTTACGGGCTCTCCCCATATTCAA | |
| | | | AATAATGACAGACGAGCACCTTGGA | | AATAATGACAGACGAGCACCTTGGA | |
| | | | GCATTTATCTCCGAGGTGCTcCTCA | | GCATTTATCTCCGAGGTGCT | |
| | | | GGAGTCAGATGCACCATGGTGTCTG | | | |
| | | | TTTGAGGTtgct | | | |
| 312 | Nme2Cas9 | − | tgTGTTCACTAGCAACCTCAAACAG | 19052 | tgTAACCTTGATACCAACCTGCCCG | 19229 |
| | | | TTGTAGCTCCCTTTCTCATTTCGGA | | TTGTAGCTCCCTTTCTCATTTCGGA | |
| | | | AACGAAATGAGAACCGTTGCTACAA | | AACGAAATGAGAACCGTTGCTACAA | |
| | | | TAAGGCCGTCTGAAAAGATGTGCCG | | TAAGGCCGTCTGAAAAGATGTGCCG | |
| | | | CAACGCTCTGCCCCTTAAAGCTTCT | | CAACGCTCTGCCCCTTAAAGCTTCT | |
| | | | GCTTTAAGGGGCATCGTTTACTCAG | | GCTTTAAGGGGCATCGTTTA | |
| | | | GAGTCAGATGCACCATGGTGTCTGT | | | |
| | | | TTGAGGTTgcta | | | |
| 313 | SauCaS9 | + | tcATCCACGTTCACCTTGCCCCAGT | 19053 | agGGCTGGGCATAAAAGTCAGGGGT | 19230 |
| | | | TTTAGTACTCTGGAAACAGAATCTA | | TTTAGTACTCTGGAAACAGAATCTA | |
| | | | CTAAAACAAGGCAAAATGCCGTGTT | | CTAAAACAAGGCAAAATGCCGTGTT | |
| | | | TATCTCGTCAACTTGTTGGCGAGAG | | TATCTCGTCAACTTGTTGGCGAGA | |
| | | | AGGAGAAGTCTGCCGTTACTGCCCT | | | |
| | | | GTGGGGCAAGGTgaac | | | |
| 314 | SauCas9KKH | + | ATCCACGTTCACCTTGCCCCAGTTT | 19054 | CATCTATTGCTTACATTTGCTGTTT | 19231 |
| | | | TAGTACTCTGGAAACAGAATCTACT | | TAGTACTCTGGAAACAGAATCTACT | |
| | | | AAAACAAGGCAAAATGCCGTGTTTA | | AAAACAAGGCAAAATGCCGTGTTTA | |
| | | | TCTCGTCAACTTGTTGGCGAGAGAG | | TCTCGTCAACTTGTTGGCGAGA | |
| | | | GAGAAGTCTGCCGTTACTGCCCTGT | | | |
| | | | GGGGCAAGGTgaac | | | |
| 315 | SauriCas9 | + | ATCCACGTTCACCTTGCCCCAGTTT | 19055 | CCAGGGCTGGGCATAAAAGTCGTTT | 19232 |
| | | | TAGTACTCTGGAAACAGAATCTACT | | TAGTACTCTGGAAACAGAATCTACT | |
| | | | AAAACAAGGCAAAATGCCGTGTTTA | | AAAACAAGGCAAAATGCCGTGTTTA | |
| | | | TCTCGTCAACTTGTTGGCGAGAGAG | | TCTCGTCAACTTGTTGGCGAGA | |
| | | | GAGAAGTCTGCCGTTACTGCCCTGT | | | |
| | | | GGGGCAAGGTgaac | | | |
| 316 | SauriCas9- | + | ATCCACGTTCACCTTGCCCCAGTTT | 19056 | GCTGGGCATAAAAGTCAGGGCGTTT | 19233 |
| | KKH | | TAGTACTCTGGAAACAGAATCTACT | | TAGTACTCTGGAAACAGAATCTACT | |
| | | | AAAACAAGGCAAAATGCCGTGTTTA | | AAAACAAGGCAAAATGCCGTGTTTA | |
| | | | TCTCGTCAACTTGTTGGCGAGAGAG | | TCTCGTCAACTTGTTGGCGAGA | |
| | | | GAGAAGTCTGCCGTTACTGCCCTGT | | | |
| | | | GGGGCAAGGTgaac | | | |
| 319 | ScaCas9- | + | TCCACGTTCACCTTGCCCCAGTTTT | 19057 | GAGCCATCTATTGCTTACATGTTTT | 19234 |
| | Sc++ | | AGAGCTAGAAATAGCAAGTTAAAAT | | AGAGCTAGAAATAGCAAGTTAAAAT | |
| | | | AAGGCTAGTCCGTTATCAACTTGAA | | AAGGCTAGTCCGTTATCAACTTGAA | |
| | | | AAAGTGGCACCGAGTCGGTGCGAGG | | AAAGTGGCACCGAGTCGGTGC | |
| | | | AGAAGTCTGCCGTTACTGCCCTGTG | | | |
| | | | GGGCAAGGTgaac | | | |
| 320 | SpyCas9- | + | TCCACGTTCACCTTGCCCCAGTTTT | 19058 | GCAGAGCCATCTATTGCTTAGTTTT | 19235 |
| | SpRY | | AGAGCTAGAAATAGCAAGTTAAAAT | | AGAGCTAGAAATAGCAAGTTAAAAT | |
| | | | AAGGCTAGTCCGTTATCAACTTGAA | | AAGGCTAGTCCGTTATCAACTTGAA | |
| | | | AAAGTGGCACCGAGTCGGTGCGAGG | | AAAGTGGCACCGAGTCGGTGC | |
| | | | AGAAGTCTGCCGTTACTGCCCTGTG | | | |
| | | | GGGCAAGGTgaac | | | |
| 321 | SpyCas9- | − | TTCACTAGCAACCTCAAACAGTTTT | 19059 | TAACCTTGATACCAACCTGCGTTTT | 19236 |
| | SpRY | | AGAGCTAGAAATAGCAAGTTAAAAT | | AGAGCTAGAAATAGCAAGTTAAAAT | |
| | | | AAGGCTAGTCCGTTATCAACTTGAA | | AAGGCTAGTCCGTTATCAACTTGAA | |
| | | | AAAGTGGCACCGAGTCGGTGCCTCA | | AAAGTGGCACCGAGTCGGTGC | |
| | | | GGAGTCAGATGCACCATGGTGTCTG | | | |
| | | | TTTGAGGTTgcta | | | |
| 322 | BlatCas9 | − | gtgtTCACTAGCAACCTCAAACAGC | 19060 | gtaaCCTTGATACCAACCTGCCCGC | 19237 |
| | | | TATAGTTCCTTACTGAAAGGTAAGT | | TATAGTTCCTTACTGAAAGGTAAGT | |
| | | | TGCTATAGTAAGGGCAACAGACCCG | | TGCTATAGTAAGGGCAACAGACCCG | |
| | | | AGGCGTTGGGGATCGCCTAGCCCGT | | AGGCGTTGGGGATCGCCTAGCCCGT | |
| | | | GTTTACGGGCTCTCCCCATATTCAA | | GTTTACGGGCTCTCCCCATATTCAA | |
| | | | AATAATGACAGACGAGCACCTTGGA | | AATAATGACAGACGAGCACCTTGGA | |
| | | | GCATTTATCTCCGAGGTGCTCTCAG | | GCATTTATCTCCGAGGTGCT | |
| | | | GAGTCAGATGCACCATGGTGTCTGT | | | |
| | | | TTGAGGTTgcta | | | |
| 323 | BlatCas9 | − | gtgtTCACTAGCAACCTCAAACAGC | 19061 | gtaaCCTTGATACCAACCTGCCCGC | 19238 |
| | | | TATAGTTCCTTACTGAAAGGTAAGT | | TATAGTTCCTTACTGAAAGGTAAGT | |
| | | | TGCTATAGTAAGGGCAACAGACCCG | | TGCTATAGTAAGGGCAACAGACCCG | |
| | | | AGGCGTTGGGGATCGCCTAGCCCGT | | AGGCGTTGGGGATCGCCTAGCCCGT | |
| | | | GTTTACGGGCTCTCCCCATATTCAA | | GTTTACGGGCTCTCCCCATATTCAA | |
| | | | AATAATGACAGACGAGCACCTTGGA | | AATAATGACAGACGAGCACCTTGGA | |
| | | | GCATTTATCTCCGAGGTGCTCTCAG | | GCATTTATCTCCGAGGTGCT | |
| | | | GAGTCAGATGCACCATGGTGTCTGT | | | |
| | | | TTGAGGTTgcta | | | |
| 327 | SauCas9 | + | CATCCACGTTCACCTTGCCCCGTTT | 19062 | CATCTATTGCTTACATTTGCTGTTT | 19239 |
| | KKH | | TAGTACTCTGGAAACAGAATCTACT | | TAGTACTCTGGAAACAGAATCTACT | |
| | | | AAAACAAGGCAAAATGCCGTGTTTA | | AAAACAAGGCAAAATGCCGTGTTTA | |
| | | | TCTCGTCAACTTGTTGGCGAGAAGG | | TCTCGTCAACTTGTTGGCGAGA | |
| | | | AGAAGTCTGCCGTTACTGCCCTGTG | | | |
| | | | GGGCAAGGTGaacg | | | |
| 328 | SauriCas9- | + | CATCCACGTTCACCTTGCCCCGTTT | 19063 | GCTGGGCATAAAAGTCAGGGCGTTT | 19240 |
| | KKH | | TAGTACTCTGGAAACAGAATCTACT | | TAGTACTCTGGAAACAGAATCTACT | |
| | | | AAAACAAGGCAAAATGCCGTGTTTA | | AAAACAAGGCAAAATGCCGTGTTTA | |
| | | | TCTCGTCAACTTGTTGGCGAGAAGG | | TCTCGTCAACTTGTTGGCGAGA | |
| | | | AGAAGTCTGCCGTTACTGCCCTGTG | | | |
| | | | GGGCAAGGTGaacg | | | |
| 329 | SpyCas9- | − | GTTCACTAGCAACCTCAAACGTTTT | 19064 | ACCTTGATACCAACCTGCCCGTTTT | 19241 |
| | NG | | AGAGCTAGAAATAGCAAGTTAAAAT | | AGAGCTAGAAATAGCAAGTTAAAAT | |
| | | | AAGGCTAGTCCGTTATCAACTTGAA | | AAGGCTAGTCCGTTATCAACTTGAA | |
| | | | AAAGTGGCACCGAGTCGGTGCTCAG | | AAAGTGGCACCGAGTCGGTGC | |
| | | | GAGTCAGATGCACCATGGTGTCTGT | | | |
| | | | TTGAGGTTGctag | | | |
| 333 | SpyCas9- | − | GTTCACTAGCAACCTCAAACGTTTT | 19065 | AACCTTGATACCAACCTGCCGTTTT | 19242 |
| | SpRY | | AGAGCTAGAAATAGCAAGTTAAAAT | | AGAGCTAGAAATAGCAAGTTAAAAT | |
| | | | AAGGCTAGTCCGTTATCAACTTGAA | | AAGGCTAGTCCGTTATCAACTTGAA | |
| | | | AAAGTGGCACCGAGTCGGTGCTCAG | | AAAGTGGCACCGAGTCGGTGC | |
| | | | GAGTCAGATGCACCATGGTGTCTGT | | | |
| | | | TTGAGGTTGctag | | | |
| 334 | SpyCas9- | + | ATCCACGTTCACCTTGCCCCGTTTT | 19066 | CAGAGCCATCTATTGCTTACGTTTT | 19243 |
| | SpRY | | AGAGCTAGAAATAGCAAGTTAAAAT | | AGAGCTAGAAATAGCAAGTTAAAAT | |
| | | | AAGGCTAGTCCGTTATCAACTTGAA | | AAGGCTAGTCCGTTATCAACTTGAA | |
| | | | AAAGTGGCACCGAGTCGGTGCAGGA | | AAAGTGGCACCGAGTCGGTGC | |
| | | | GAAGTCTGCCGTTACTGCCCTGTGG | | | |
| | | | GGCAAGGTGaacg | | | |
| 340 | SauCas9 | + | TCATCCACGTTCACCTTGCCCGTTT | 19067 | CATCTATTGCTTACATTTGCTGTTT | 19244 |
| | KKH | | TAGTACTCTGGAAACAGAATCTACT | | TAGTACTCTGGAAACAGAATCTACT | |
| | | | AAAACAAGGCAAAATGCCGTGTTTA | | AAAACAAGGCAAAATGCCGTGTTTA | |
| | | | TCTCGTCAACTTGTTGGCGAGAGGA | | TCTCGTCAACTTGTTGGCGAGA | |
| | | | GAAGTCTGCCGTTACTGCCCTGTGG | | | |
| | | | GGCAAGGTGAacgt | | | |
| 343 | ScaCas9- | − | TGTTCACTAGCAACCTCAAAGTTTT | 19068 | ACCTTGATACCAACCTGCCCGTTTT | 19245 |
| | Sc++ | | AGAGCTAGAAATAGCAAGTTAAAAT | | AGAGCTAGAAATAGCAAGTTAAAAT | |
| | | | AAGGCTAGTCCGTTATCAACTTGAA | | AAGGCTAGTCCGTTATCAACTTGAA | |
| | | | AAAGTGGCACCGAGTCGGTGCCAGG | | AAAGTGGCACCGAGTCGGTGC | |
| | | | AGTCAGATGCACCATGGTGTCTGTT | | | |
| | | | TGAGGTTGCtagt | | | |
| 344 | SpyCas9- | − | TGTTCACTAGCAACCTCAAAGTTTT | 19069 | ACCTTGATACCAACCTGCCCGTTTT | 19246 |
| | SpRY | | AGAGCTAGAAATAGCAAGTTAAAAT | | AGAGCTAGAAATAGCAAGTTAAAAT | |
| | | | AAGGCTAGTCCGTTATCAACTTGAA | | AAGGCTAGTCCGTTATCAACTTGAA | |
| | | | AAAGTGGCACCGAGTCGGTGCCAGG | | AAAGTGGCACCGAGTCGGTGC | |
| | | | AGTCAGATGCACCATGGTGTCTGTT | | | |
| | | | TGAGGTTGCtagt | | | |
| 345 | SpyCas9- | + | CATCCACGTTCACCTTGCCCGTTTT | 19070 | AGAGCCATCTATTGCTTACAGTTTT | 19247 |
| | SpRY | | AGAGCTAGAAATAGCAAGTTAAAAT | | AGAGCTAGAAATAGCAAGTTAAAAT | |
| | | | AAGGCTAGTCCGTTATCAACTTGAA | | AAGGCTAGTCCGTTATCAACTTGAA | |
| | | | AAAGTGGCACCGAGTCGGTGCGGAG | | AAAGTGGCACCGAGTCGGTGC | |
| | | | AAGTCTGCCGTTACTGCCCTGTGGG | | | |
| | | | GCAAGGTGAacgt | | | |
| 346 | BlatCas9 | − | ctgtGTTCACTAGCAACCTCAAAGC | 19071 | gtaaCCTTGATACCAACCTGCCCGC | 19248 |
| | | | TATAGTTCCTTACTGAAAGGTAAGT | | TATAGTTCCTTACTGAAAGGTAAGT | |
| | | | TGCTATAGTAAGGGCAACAGACCCG | | TGCTATAGTAAGGGCAACAGACCCG | |
| | | | AGGCGTTGGGGATCGCCTAGCCCGT | | AGGCGTTGGGGATCGCCTAGCCCGT | |
| | | | GTTTACGGGCTCTCCCCATATTCAA | | GTTTACGGGCTCTCCCCATATTCAA | |
| | | | AATAATGACAGACGAGCACCTTGGA | | AATAATGACAGACGAGCACCTTGGA | |
| | | | GCATTTATCTCCGAGGTGCTCAGGA | | GCATTTATCTCCGAGGTGCT | |
| | | | GTCAGATGCACCATGGTGTCTGTTT | | | |
| | | | GAGGTTGCtagt | | | |

[0603] Capital letters indicate “core nucleotides” while lower case letters indicate “flanking nucleotides.” Herein, when an RNA sequence (e.g., a template RNA sequence) is said to comprise a particular sequence (e.g., a sequence of Table 4 or a portion thereof) that comprises thymine (T), it is of course understood that the RNA sequence may (and frequently does) comprise uracil (U) in place of T. For instance, the RNA sequence may comprise U at every position shown as T in the sequence in Table 4. More specifically, the present disclosure provides an RNA sequence according to every template sequence shown in Table 4, wherein the RNA sequence has a U in place of each T in the sequence of Table 4.

[0604] In some embodiments, the systems and methods provided herein may comprise a template sequence listed in any of Tables 5A-5D. Tables 5A-5D provide exemplary template RNA sequences (column 2) designed to be paired with a gene modifying polypeptide to correct a mutation in the HBB gene. The templates in Tables 5A-5D are meant to exemplify the total sequence of: (1) gRNA spacer (e.g., for targeting for first strand nick), (2) gRNA scaffold, (3) RT (heterologous object sequence) sequence, and (4) PBS sequence (e.g., for initiating TPRT at first strand nick).

TABLE 5A
Exemplary template RNA sequences
Table 5A provides design of exemplary DNA components of gene modifying systems for
correcting the pathogenic E6V mutation in HBB to the wild-type form. This table
details the sequence of a complete template RNA for use in exemplary gene modifying
systems comprising a gene modifying polypeptide. Templates in this table employ the
HBB5 spacer (CATGGTGCACCTGACTCCTG SEQ ID NO: 19249) and a gRNA scaffold sequence of
GTTTTAGAGCTAGAAATAGCAAGTTAAAATAAGGCTAGTCCGTTATCAACTTGAAAAAGTGGCACCGAGTCGGTGC
(SEQ ID NO: 20923). For exemplification, the lengths of the RT (heterologous object)
sequences and PBS sequences were varied at the 3′ end. The length of these respective
sequences is reflected in columns 3 and 4, respectively. The longest form of the RT
sequence is AGTAACGGCAGACTTCTCTTCAG (SEQ ID NO: 20954). The longest form of the PBS
is GAGTCAGGTGCACCATG (SEQ ID NO: 19431).

| | | SEQ | | | |
|---|---|---|---|---|---|
| Sequence | | ID | RT | PBS | Total |
| Name | Full DNA sequence | NO | length | length | length |
| HBB5_corr_WT | CATGGTGCACCTGACTCCTGGTTTTAGAGCTAGAAATAGCAAGTTAAAATAA | 20958 | 23 | 17 | 136 |
| RT23_PBS17 | GGCTAGTCCGTTATCAACTTGAAAAAGTGGCACCGAGTCGGTGCAGTAACGG | | | | |
| | CAGACTTCTCTTCAGGAGTCAGGTGCACCATG | | | | |
| HBB5_corr_WT | CATGGTGCACCTGACTCCTGGTTTTAGAGCTAGAAATAGCAAGTTAAAATAA | 20959 | 23 | 16 | 135 |
| RT23_PBS16 | GGCTAGTCCGTTATCAACTTGAAAAAGTGGCACCGAGTCGGTGCAGTAACGG | | | | |
| | CAGACTTCTCTTCAGGAGTCAGGTGCACCAT | | | | |
| HBB5_corr_WT | CATGGTGCACCTGACTCCTGGTTTTAGAGCTAGAAATAGCAAGTTAAAATAA | 20960 | 23 | 15 | 134 |
| RT23_PBS15 | GGCTAGTCCGTTATCAACTTGAAAAAGTGGCACCGAGTCGGTGCAGTAACGG | | | | |
| | CAGACTTCTCTTCAGGAGTCAGGTGCACCA | | | | |
| HBB5_corr_WT | CATGGTGCACCTGACTCCTGGTTTTAGAGCTAGAAATAGCAAGTTAAAATAA | 20961 | 23 | 14 | 133 |
| RT23_PBS14 | GGCTAGTCCGTTATCAACTTGAAAAAGTGGCACCGAGTCGGTGCAGTAACGG | | | | |
| | CAGACTTCTCTTCAGGAGTCAGGTGCACC | | | | |
| HBB5_corr_WT | CATGGTGCACCTGACTCCTGGTTTTAGAGCTAGAAATAGCAAGTTAAAATAA | 20962 | 23 | 13 | 132 |
| RT23_PBS13 | GGCTAGTCCGTTATCAACTTGAAAAAGTGGCACCGAGTCGGTGCAGTAACGG | | | | |
| | CAGACTTCTCTTCAGGAGTCAGGTGCAC | | | | |
| HBB5_corr_WT | CATGGTGCACCTGACTCCTGGTTTTAGAGCTAGAAATAGCAAGTTAAAATAA | 20963 | 23 | 12 | 131 |
| RT23_PBS12 | GGCTAGTCCGTTATCAACTTGAAAAAGTGGCACCGAGTCGGTGCAGTAACGG | | | | |
| | CAGACTTCTCTTCAGGAGTCAGGTGCA | | | | |
| HBB5_corr_WT | CATGGTGCACCTGACTCCTGGTTTTAGAGCTAGAAATAGCAAGTTAAAATAA | 20964 | 23 | 11 | 130 |
| RT23_PBS11 | GGCTAGTCCGTTATCAACTTGAAAAAGTGGCACCGAGTCGGTGCAGTAACGG | | | | |
| | CAGACTTCTCTTCAGGAGTCAGGTGC | | | | |
| HBB5_corr_WT | CATGGTGCACCTGACTCCTGGTTTTAGAGCTAGAAATAGCAAGTTAAAATAA | 20965 | 23 | 10 | 129 |
| RT23_PBS10 | GGCTAGTCCGTTATCAACTTGAAAAAGTGGCACCGAGTCGGTGCAGTAACGG | | | | |
| | CAGACTTCTCTTCAGGAGTCAGGTG | | | | |
| HBB5_corr_WT | CATGGTGCACCTGACTCCTGGTTTTAGAGCTAGAAATAGCAAGTTAAAATAA | 20966 | 23 | 9 | 128 |
| RT23_PBS9 | GGCTAGTCCGTTATCAACTTGAAAAAGTGGCACCGAGTCGGTGCAGTAACGG | | | | |
| | CAGACTTCTCTTCAGGAGTCAGGT | | | | |
| HBB5_corr_WT | CATGGTGCACCTGACTCCTGGTTTTAGAGCTAGAAATAGCAAGTTAAAATAA | 20967 | 23 | 8 | 127 |
| RT23_PBS8 | GGCTAGTCCGTTATCAACTTGAAAAAGTGGCACCGAGTCGGTGCAGTAACGG | | | | |
| | CAGACTTCTCTTCAGGAGTCAGG | | | | |
| HBB5_corr_WT | CATGGTGCACCTGACTCCTGGTTTTAGAGCTAGAAATAGCAAGTTAAAATAA | 20968 | 22 | 17 | 135 |
| RT22_PBS17 | GGCTAGTCCGTTATCAACTTGAAAAAGTGGCACCGAGTCGGTGCGTAACGGC | | | | |
| | AGACTTCTCTTCAGGAGTCAGGTGCACCATG | | | | |
| HBB5_corr_WT | CATGGTGCACCTGACTCCTGGTTTTAGAGCTAGAAATAGCAAGTTAAAATAA | 20969 | 22 | 16 | 134 |
| RT22_PBS16 | GGCTAGTCCGTTATCAACTTGAAAAAGTGGCACCGAGTCGGTGCGTAACGGC | | | | |
| | AGACTTCTCTTCAGGAGTCAGGTGCACCAT | | | | |
| HBB5_corr_WT | CATGGTGCACCTGACTCCTGGTTTTAGAGCTAGAAATAGCAAGTTAAAATAA | 20970 | 22 | 15 | 133 |
| RT22_PBS15 | GGCTAGTCCGTTATCAACTTGAAAAAGTGGCACCGAGTCGGTGCGTAACGGC | | | | |
| | AGACTTCTCTTCAGGAGTCAGGTGCACCA | | | | |
| HBB5_corr_WT | CATGGTGCACCTGACTCCTGGTTTTAGAGCTAGAAATAGCAAGTTAAAATAA | 20971 | 22 | 14 | 132 |
| RT22_PBS14 | GGCTAGTCCGTTATCAACTTGAAAAAGTGGCACCGAGTCGGTGCGTAACGGC | | | | |
| | AGACTTCTCTTCAGGAGTCAGGTGCACC | | | | |
| HBB5_corr_WT | CATGGTGCACCTGACTCCTGGTTTTAGAGCTAGAAATAGCAAGTTAAAATAA | 20972 | 22 | 13 | 131 |
| RT22_PBS13 | GGCTAGTCCGTTATCAACTTGAAAAAGTGGCACCGAGTCGGTGCGTAACGGC | | | | |
| | AGACTTCTCTTCAGGAGTCAGGTGCAC | | | | |
| HBB5_corr_WT | CATGGTGCACCTGACTCCTGGTTTTAGAGCTAGAAATAGCAAGTTAAAATAA | 20973 | 22 | 12 | 130 |
| RT22_PBS12 | GGCTAGTCCGTTATCAACTTGAAAAAGTGGCACCGAGTCGGTGCGTAACGGC | | | | |
| | AGACTTCTCTTCAGGAGTCAGGTGCA | | | | |
| HBB5_corr_WT | CATGGTGCACCTGACTCCTGGTTTTAGAGCTAGAAATAGCAAGTTAAAATAA | 20974 | 22 | 11 | 129 |
| RT22_PBS11 | GGCTAGTCCGTTATCAACTTGAAAAAGTGGCACCGAGTCGGTGCGTAACGGC | | | | |
| | AGACTTCTCTTCAGGAGTCAGGTGC | | | | |
| HBB5_corr_WT | CATGGTGCACCTGACTCCTGGTTTTAGAGCTAGAAATAGCAAGTTAAAATAA | 20975 | 22 | 10 | 128 |
| RT22_PBS10 | GGCTAGTCCGTTATCAACTTGAAAAAGTGGCACCGAGTCGGTGCGTAACGGC | | | | |
| | AGACTTCTCTTCAGGAGTCAGGTG | | | | |
| HBB5_corr_WT | CATGGTGCACCTGACTCCTGGTTTTAGAGCTAGAAATAGCAAGTTAAAATAA | 20976 | 22 | 9 | 127 |
| RT22_PBS9 | GGCTAGTCCGTTATCAACTTGAAAAAGTGGCACCGAGTCGGTGCGTAACGGC | | | | |
| | AGACTTCTCTTCAGGAGTCAGGT | | | | |
| HBB5_corr_WT | CATGGTGCACCTGACTCCTGGTTTTAGAGCTAGAAATAGCAAGTTAAAATAA | 20977 | 22 | 8 | 126 |
| RT22_PBS8 | GGCTAGTCCGTTATCAACTTGAAAAAGTGGCACCGAGTCGGTGCGTAACGGC | | | | |
| | AGACTTCTCTTCAGGAGTCAGG | | | | |
| HBB5_corr_WT | CATGGTGCACCTGACTCCTGGTTTTAGAGCTAGAAATAGCAAGTTAAAATAA | 20978 | 21 | 17 | 134 |
| RT21_PBS17 | GGCTAGTCCGTTATCAACTTGAAAAAGTGGCACCGAGTCGGTGCTAACGGCA | | | | |
| | GACTTCTCTTCAGGAGTCAGGTGCACCATG | | | | |
| HBB5_corr_WT | CATGGTGCACCTGACTCCTGGTTTTAGAGCTAGAAATAGCAAGTTAAAATAA | 20979 | 21 | 16 | 133 |
| RT21_PBS16 | GGCTAGTCCGTTATCAACTTGAAAAAGTGGCACCGAGTCGGTGCTAACGGCA | | | | |
| | GACTTCTCTTCAGGAGTCAGGTGCACCAT | | | | |
| HBB5_corr_WT | CATGGTGCACCTGACTCCTGGTTTTAGAGCTAGAAATAGCAAGTTAAAATAA | 20980 | 21 | 15 | 132 |
| RT21_PBS15 | GGCTAGTCCGTTATCAACTTGAAAAAGTGGCACCGAGTCGGTGCTAACGGCA | | | | |
| | GACTTCTCTTCAGGAGTCAGGTGCACCA | | | | |
| HBB5_corr_WT | CATGGTGCACCTGACTCCTGGTTTTAGAGCTAGAAATAGCAAGTTAAAATAA | 20981 | 21 | 14 | 131 |
| RT21_PBS14 | GGCTAGTCCGTTATCAACTTGAAAAAGTGGCACCGAGTCGGTGCTAACGGCA | | | | |
| | GACTTCTCTTCAGGAGTCAGGTGCACC | | | | |
| HBB5_corr_WT | CATGGTGCACCTGACTCCTGGTTTTAGAGCTAGAAATAGCAAGTTAAAATAA | 20982 | 21 | 13 | 130 |
| RT21_PBS13 | GGCTAGTCCGTTATCAACTTGAAAAAGTGGCACCGAGTCGGTGCTAACGGCA | | | | |
| | GACTTCTCTTCAGGAGTCAGGTGCAC | | | | |
| HBB5_corr_WT | CATGGTGCACCTGACTCCTGGTTTTAGAGCTAGAAATAGCAAGTTAAAATAA | 20983 | 21 | 12 | 129 |
| RT21_PBS12 | GGCTAGTCCGTTATCAACTTGAAAAAGTGGCACCGAGTCGGTGCTAACGGCA | | | | |
| | GACTTCTCTTCAGGAGTCAGGTGCA | | | | |
| HBB5_corr_WT | CATGGTGCACCTGACTCCTGGTTTTAGAGCTAGAAATAGCAAGTTAAAATAA | 20984 | 21 | 11 | 128 |
| RT21_PBS11 | GGCTAGTCCGTTATCAACTTGAAAAAGTGGCACCGAGTCGGTGCTAACGGCA | | | | |
| | GACTTCTCTTCAGGAGTCAGGTGC | | | | |
| HBB5_corr_WT | CATGGTGCACCTGACTCCTGGTTTTAGAGCTAGAAATAGCAAGTTAAAATAA | 20985 | 21 | 10 | 127 |
| RT21_PBS10 | GGCTAGTCCGTTATCAACTTGAAAAAGTGGCACCGAGTCGGTGCTAACGGCA | | | | |
| | GACTTCTCTTCAGGAGTCAGGTG | | | | |
| HBB5_corr_WT | CATGGTGCACCTGACTCCTGGTTTTAGAGCTAGAAATAGCAAGTTAAAATAA | 20986 | 21 | 9 | 126 |
| RT21_PBS9 | GGCTAGTCCGTTATCAACTTGAAAAAGTGGCACCGAGTCGGTGCTAACGGCA | | | | |
| | GACTTCTCTTCAGGAGTCAGGT | | | | |
| HBB5_corr_WT | CATGGTGCACCTGACTCCTGGTTTTAGAGCTAGAAATAGCAAGTTAAAATAA | 20987 | 21 | 8 | 125 |
| RT21_PBS8 | GGCTAGTCCGTTATCAACTTGAAAAAGTGGCACCGAGTCGGTGCTAACGGCA | | | | |
| | GACTTCTCTTCAGGAGTCAGG | | | | |
| HBB5_corr_WT | CATGGTGCACCTGACTCCTGGTTTTAGAGCTAGAAATAGCAAGTTAAAATAA | 20988 | 20 | 17 | 133 |
| RT20_PBS17 | GGCTAGTCCGTTATCAACTTGAAAAAGTGGCACCGAGTCGGTGCAACGGCAG | | | | |
| | ACTTCTCTTCAGGAGTCAGGTGCACCATG | | | | |
| HBB5_corr_WT | CATGGTGCACCTGACTCCTGGTTTTAGAGCTAGAAATAGCAAGTTAAAATAA | 20989 | 20 | 16 | 132 |
| RT20_PBS16 | GGCTAGTCCGTTATCAACTTGAAAAAGTGGCACCGAGTCGGTGCAACGGCAG | | | | |
| | ACTTCTCTTCAGGAGTCAGGTGCACCAT | | | | |
| HBB5_corr_WT | CATGGTGCACCTGACTCCTGGTTTTAGAGCTAGAAATAGCAAGTTAAAATAA | 20990 | 20 | 15 | 131 |
| RT20_PBS15 | GGCTAGTCCGTTATCAACTTGAAAAAGTGGCACCGAGTCGGTGCAACGGCAG | | | | |
| | ACTTCTCTTCAGGAGTCAGGTGCACCA | | | | |
| HBB5_corr_WT | CATGGTGCACCTGACTCCTGGTTTTAGAGCTAGAAATAGCAAGTTAAAATAA | 20991 | 20 | 14 | 130 |
| RT20_PBS14 | GGCTAGTCCGTTATCAACTTGAAAAAGTGGCACCGAGTCGGTGCAACGGCAG | | | | |
| | ACTTCTCTTCAGGAGTCAGGTGCACC | | | | |
| HBB5_corr_WT | CATGGTGCACCTGACTCCTGGTTTTAGAGCTAGAAATAGCAAGTTAAAATAA | 20992 | 20 | 13 | 129 |
| RT20_PBS13 | GGCTAGTCCGTTATCAACTTGAAAAAGTGGCACCGAGTCGGTGCAACGGCAG | | | | |
| | ACTTCTCTTCAGGAGTCAGGTGCAC | | | | |
| HBB5_corr_WT | CATGGTGCACCTGACTCCTGGTTTTAGAGCTAGAAATAGCAAGTTAAAATAA | 20993 | 20 | 12 | 128 |
| RT20_PBS12 | GGCTAGTCCGTTATCAACTTGAAAAAGTGGCACCGAGTCGGTGCAACGGCAG | | | | |
| | ACTTCTCTTCAGGAGTCAGGTGCA | | | | |
| HBB5_corr_WT | CATGGTGCACCTGACTCCTGGTTTTAGAGCTAGAAATAGCAAGTTAAAATAA | 20994 | 20 | 11 | 127 |
| RT20_PBS11 | GGCTAGTCCGTTATCAACTTGAAAAAGTGGCACCGAGTCGGTGCAACGGCAG | | | | |
| | ACTTCTCTTCAGGAGTCAGGTGC | | | | |
| HBB5_corr_WT | CATGGTGCACCTGACTCCTGGTTTTAGAGCTAGAAATAGCAAGTTAAAATAA | 20995 | 20 | 10 | 126 |
| RT20_PBS10 | GGCTAGTCCGTTATCAACTTGAAAAAGTGGCACCGAGTCGGTGCAACGGCAG | | | | |
| | ACTTCTCTTCAGGAGTCAGGTG | | | | |
| HBB5_corr_WT | CATGGTGCACCTGACTCCTGGTTTTAGAGCTAGAAATAGCAAGTTAAAATAA | 20996 | 20 | 9 | 125 |
| RT20_PBS9 | GGCTAGTCCGTTATCAACTTGAAAAAGTGGCACCGAGTCGGTGCAACGGCAG | | | | |
| | ACTTCTCTTCAGGAGTCAGGT | | | | |
| HBB5_corr_WT | CATGGTGCACCTGACTCCTGGTTTTAGAGCTAGAAATAGCAAGTTAAAATAA | 20997 | 20 | 8 | 124 |
| RT20_PBS8 | GGCTAGTCCGTTATCAACTTGAAAAAGTGGCACCGAGTCGGTGCAACGGCAG | | | | |
| | ACTTCTCTTCAGGAGTCAGG | | | | |
| HBB5_corr_WT | CATGGTGCACCTGACTCCTGGTTTTAGAGCTAGAAATAGCAAGTTAAAATAA | 20998 | 19 | 17 | 132 |
| RT19_PBS17 | GGCTAGTCCGTTATCAACTTGAAAAAGTGGCACCGAGTCGGTGCACGGCAGA | | | | |
| | CTTCTCTTCAGGAGTCAGGTGCACCATG | | | | |
| HBB5_corr_WT | CATGGTGCACCTGACTCCTGGTTTTAGAGCTAGAAATAGCAAGTTAAAATAA | 20999 | 19 | 16 | 131 |
| RT19_PBS16 | GGCTAGTCCGTTATCAACTTGAAAAAGTGGCACCGAGTCGGTGCACGGCAGA | | | | |
| | CTTCTCTTCAGGAGTCAGGTGCACCAT | | | | |
| HBB5_corr_WT | CATGGTGCACCTGACTCCTGGTTTTAGAGCTAGAAATAGCAAGTTAAAATAA | 21000 | 19 | 15 | 130 |
| RT19_PBS15 | GGCTAGTCCGTTATCAACTTGAAAAAGTGGCACCGAGTCGGTGCACGGCAGA | | | | |
| | CTTCTCTTCAGGAGTCAGGTGCACCA | | | | |
| HBB5_corr_WT | CATGGTGCACCTGACTCCTGGTTTTAGAGCTAGAAATAGCAAGTTAAAATAA | 21001 | 19 | 14 | 129 |
| RT19_PBS14 | GGCTAGTCCGTTATCAACTTGAAAAAGTGGCACCGAGTCGGTGCACGGCAGA | | | | |
| | CTTCTCTTCAGGAGTCAGGTGCACC | | | | |
| HBB5_corr_WT | CATGGTGCACCTGACTCCTGGTTTTAGAGCTAGAAATAGCAAGTTAAAATAA | 21002 | 19 | 13 | 128 |
| RT19_PBS13 | GGCTAGTCCGTTATCAACTTGAAAAAGTGGCACCGAGTCGGTGCACGGCAGA | | | | |
| | CTTCTCTTCAGGAGTCAGGTGCAC | | | | |
| HBB5_corr_WT | CATGGTGCACCTGACTCCTGGTTTTAGAGCTAGAAATAGCAAGTTAAAATAA | 21003 | 19 | 12 | 127 |
| RT19_PBS12 | GGCTAGTCCGTTATCAACTTGAAAAAGTGGCACCGAGTCGGTGCACGGCAGA | | | | |
| | CTTCTCTTCAGGAGTCAGGTGCA | | | | |
| HBB5_corr_WT | CATGGTGCACCTGACTCCTGGTTTTAGAGCTAGAAATAGCAAGTTAAAATAA | 21004 | 19 | 11 | 126 |
| RT19_PBS11 | GGCTAGTCCGTTATCAACTTGAAAAAGTGGCACCGAGTCGGTGCACGGCAGA | | | | |
| | CTTCTCTTCAGGAGTCAGGTGC | | | | |
| HBB5_corr_WT | CATGGTGCACCTGACTCCTGGTTTTAGAGCTAGAAATAGCAAGTTAAAATAA | 21005 | 19 | 10 | 125 |
| RT19_PBS10 | GGCTAGTCCGTTATCAACTTGAAAAAGTGGCACCGAGTCGGTGCACGGCAGA | | | | |
| | CTTCTCTTCAGGAGTCAGGTG | | | | |
| HBB5_corr_WT | CATGGTGCACCTGACTCCTGGTTTTAGAGCTAGAAATAGCAAGTTAAAATAA | 21006 | 19 | 9 | 124 |
| RT19_PBS9 | GGCTAGTCCGTTATCAACTTGAAAAAGTGGCACCGAGTCGGTGCACGGCAGA | | | | |
| | CTTCTCTTCAGGAGTCAGGT | | | | |
| HBB5_corr_WT | CATGGTGCACCTGACTCCTGGTTTTAGAGCTAGAAATAGCAAGTTAAAATAA | 21007 | 19 | 8 | 123 |
| RT19_PBS8 | GGCTAGTCCGTTATCAACTTGAAAAAGTGGCACCGAGTCGGTGCACGGCAGA | | | | |
| | CTTCTCTTCAGGAGTCAGG | | | | |
| HBB5_corr_WT | CATGGTGCACCTGACTCCTGGTTTTAGAGCTAGAAATAGCAAGTTAAAATAA | 21008 | 18 | 17 | 131 |
| RT18_PBS17 | GGCTAGTCCGTTATCAACTTGAAAAAGTGGCACCGAGTCGGTGCCGGCAGAC | | | | |
| | TTCTCTTCAGGAGTCAGGTGCACCATG | | | | |
| HBB5_corr_WT | CATGGTGCACCTGACTCCTGGTTTTAGAGCTAGAAATAGCAAGTTAAAATAA | 21009 | 18 | 16 | 130 |
| RT18_PBS16 | GGCTAGTCCGTTATCAACTTGAAAAAGTGGCACCGAGTCGGTGCCGGCAGAC | | | | |
| | TTCTCTTCAGGAGTCAGGTGCACCAT | | | | |
| HBB5_corr_WT | CATGGTGCACCTGACTCCTGGTTTTAGAGCTAGAAATAGCAAGTTAAAATAA | 21010 | 18 | 15 | 129 |
| RT18_PBS15 | GGCTAGTCCGTTATCAACTTGAAAAAGTGGCACCGAGTCGGTGCCGGCAGAC | | | | |
| | TTCTCTTCAGGAGTCAGGTGCACCA | | | | |
| HBB5_corr_WT | CATGGTGCACCTGACTCCTGGTTTTAGAGCTAGAAATAGCAAGTTAAAATAA | 21011 | 18 | 14 | 128 |
| RT18_PBS14 | GGCTAGTCCGTTATCAACTTGAAAAAGTGGCACCGAGTCGGTGCCGGCAGAC | | | | |
| | TTCTCTTCAGGAGTCAGGTGCACC | | | | |
| HBB5_corr_WT | CATGGTGCACCTGACTCCTGGTTTTAGAGCTAGAAATAGCAAGTTAAAATAA | 21012 | 18 | 13 | 127 |
| RT18_PBS13 | GGCTAGTCCGTTATCAACTTGAAAAAGTGGCACCGAGTCGGTGCCGGCAGAC | | | | |
| | TTCTCTTCAGGAGTCAGGTGCAC | | | | |
| HBB5_corr_WT | CATGGTGCACCTGACTCCTGGTTTTAGAGCTAGAAATAGCAAGTTAAAATAA | 21013 | 18 | 12 | 126 |
| RT18_PBS12 | GGCTAGTCCGTTATCAACTTGAAAAAGTGGCACCGAGTCGGTGCCGGCAGAC | | | | |
| | TTCTCTTCAGGAGTCAGGTGCA | | | | |
| HBB5_corr_WT | CATGGTGCACCTGACTCCTGGTTTTAGAGCTAGAAATAGCAAGTTAAAATAA | 21014 | 18 | 11 | 125 |
| RT18_PBS11 | GGCTAGTCCGTTATCAACTTGAAAAAGTGGCACCGAGTCGGTGCCGGCAGAC | | | | |
| | TTCTCTTCAGGAGTCAGGTGC | | | | |
| HBB5_corr_WT | CATGGTGCACCTGACTCCTGGTTTTAGAGCTAGAAATAGCAAGTTAAAATAA | 21015 | 18 | 10 | 124 |
| RT18_PBS10 | GGCTAGTCCGTTATCAACTTGAAAAAGTGGCACCGAGTCGGTGCCGGCAGAC | | | | |
| | TTCTCTTCAGGAGTCAGGTG | | | | |
| HBB5_corr_WT | CATGGTGCACCTGACTCCTGGTTTTAGAGCTAGAAATAGCAAGTTAAAATAA | 21016 | 18 | 9 | 123 |
| RT18_PBS9 | GGCTAGTCCGTTATCAACTTGAAAAAGTGGCACCGAGTCGGTGCCGGCAGAC | | | | |
| | TTCTCTTCAGGAGTCAGGT | | | | |
| HBB5_corr_WT | CATGGTGCACCTGACTCCTGGTTTTAGAGCTAGAAATAGCAAGTTAAAATAA | 21017 | 18 | 8 | 122 |
| RT18_PBS8 | GGCTAGTCCGTTATCAACTTGAAAAAGTGGCACCGAGTCGGTGCCGGCAGAC | | | | |
| | TTCTCTTCAGGAGTCAGG | | | | |
| HBB5_corr_WT | CATGGTGCACCTGACTCCTGGTTTTAGAGCTAGAAATAGCAAGTTAAAATAA | 21018 | 17 | 17 | 130 |
| RT17_PBS17 | GGCTAGTCCGTTATCAACTTGAAAAAGTGGCACCGAGTCGGTGCGGCAGACT | | | | |
| | TCTCTTCAGGAGTCAGGTGCACCATG | | | | |
| HBB5_corr_WT | CATGGTGCACCTGACTCCTGGTTTTAGAGCTAGAAATAGCAAGTTAAAATAA | 21019 | 17 | 16 | 129 |
| RT17_PBS16 | GGCTAGTCCGTTATCAACTTGAAAAAGTGGCACCGAGTCGGTGCGGCAGACT | | | | |
| | TCTCTTCAGGAGTCAGGTGCACCAT | | | | |
| HBB5_corr_WT | CATGGTGCACCTGACTCCTGGTTTTAGAGCTAGAAATAGCAAGTTAAAATAA | 21020 | 17 | 15 | 128 |
| RT17_PBS15 | GGCTAGTCCGTTATCAACTTGAAAAAGTGGCACCGAGTCGGTGCGGCAGACT | | | | |
| | TCTCTTCAGGAGTCAGGTGCACCA | | | | |
| HBB5_corr_WT | CATGGTGCACCTGACTCCTGGTTTTAGAGCTAGAAATAGCAAGTTAAAATAA | 21021 | 17 | 14 | 127 |
| RT17_PBS14 | GGCTAGTCCGTTATCAACTTGAAAAAGTGGCACCGAGTCGGTGCGGCAGACT | | | | |
| | TCTCTTCAGGAGTCAGGTGCACC | | | | |
| HBB5_corr_WT | CATGGTGCACCTGACTCCTGGTTTTAGAGCTAGAAATAGCAAGTTAAAATAA | 21022 | 17 | 13 | 126 |
| RT17_PBS13 | GGCTAGTCCGTTATCAACTTGAAAAAGTGGCACCGAGTCGGTGCGGCAGACT | | | | |
| | TCTCTTCAGGAGTCAGGTGCAC | | | | |
| HBB5_corr_WT | CATGGTGCACCTGACTCCTGGTTTTAGAGCTAGAAATAGCAAGTTAAAATAA | 21023 | 17 | 12 | 125 |
| RT17_PBS12 | GGCTAGTCCGTTATCAACTTGAAAAAGTGGCACCGAGTCGGTGCGGCAGACT | | | | |
| | TCTCTTCAGGAGTCAGGTGCA | | | | |
| HBB5_corr_WT | CATGGTGCACCTGACTCCTGGTTTTAGAGCTAGAAATAGCAAGTTAAAATAA | 21024 | 17 | 11 | 124 |
| RT17_PBS11 | GGCTAGTCCGTTATCAACTTGAAAAAGTGGCACCGAGTCGGTGCGGCAGACT | | | | |
| | TCTCTTCAGGAGTCAGGTGC | | | | |
| HBB5_corr_WT | CATGGTGCACCTGACTCCTGGTTTTAGAGCTAGAAATAGCAAGTTAAAATAA | 21025 | 17 | 10 | 123 |
| RT17_PBS10 | GGCTAGTCCGTTATCAACTTGAAAAAGTGGCACCGAGTCGGTGCGGCAGACT | | | | |
| | TCTCTTCAGGAGTCAGGTG | | | | |
| HBB5_corr_WT | CATGGTGCACCTGACTCCTGGTTTTAGAGCTAGAAATAGCAAGTTAAAATAA | 21026 | 17 | 9 | 122 |
| RT17_PBS9 | GGCTAGTCCGTTATCAACTTGAAAAAGTGGCACCGAGTCGGTGCGGCAGACT | | | | |
| | TCTCTTCAGGAGTCAGGT | | | | |
| HBB5_corr_WT | CATGGTGCACCTGACTCCTGGTTTTAGAGCTAGAAATAGCAAGTTAAAATAA | 21027 | 17 | 8 | 121 |
| RT17_PBS8 | GGCTAGTCCGTTATCAACTTGAAAAAGTGGCACCGAGTCGGTGCGGCAGACT | | | | |
| | TCTCTTCAGGAGTCAGG | | | | |
| HBB5_corr_WT | CATGGTGCACCTGACTCCTGGTTTTAGAGCTAGAAATAGCAAGTTAAAATAA | 21028 | 16 | 17 | 129 |
| RT16_PBS17 | GGCTAGTCCGTTATCAACTTGAAAAAGTGGCACCGAGTCGGTGCGCAGACTT | | | | |
| | CTCTTCAGGAGTCAGGTGCACCATG | | | | |
| HBB5_corr_WT | CATGGTGCACCTGACTCCTGGTTTTAGAGCTAGAAATAGCAAGTTAAAATAA | 21029 | 16 | 16 | 128 |
| RT16_PBS16 | GGCTAGTCCGTTATCAACTTGAAAAAGTGGCACCGAGTCGGTGCGCAGACTT | | | | |
| | CTCTTCAGGAGTCAGGTGCACCAT | | | | |
| HBB5_corr_WT | CATGGTGCACCTGACTCCTGGTTTTAGAGCTAGAAATAGCAAGTTAAAATAA | 21030 | 16 | 15 | 127 |
| RT16_PBS15 | GGCTAGTCCGTTATCAACTTGAAAAAGTGGCACCGAGTCGGTGCGCAGACTT | | | | |
| | CTCTTCAGGAGTCAGGTGCACCA | | | | |
| HBB5_corr_WT | CATGGTGCACCTGACTCCTGGTTTTAGAGCTAGAAATAGCAAGTTAAAATAA | 21031 | 16 | 14 | 126 |
| RT16_PBS14 | GGCTAGTCCGTTATCAACTTGAAAAAGTGGCACCGAGTCGGTGCGCAGACTT | | | | |
| | CTCTTCAGGAGTCAGGTGCACC | | | | |
| HBB5_corr_WT | CATGGTGCACCTGACTCCTGGTTTTAGAGCTAGAAATAGCAAGTTAAAATAA | 21032 | 16 | 13 | 125 |
| RT16_PBS13 | GGCTAGTCCGTTATCAACTTGAAAAAGTGGCACCGAGTCGGTGCGCAGACTT | | | | |
| | CTCTTCAGGAGTCAGGTGCAC | | | | |
| HBB5_corr_WT | CATGGTGCACCTGACTCCTGGTTTTAGAGCTAGAAATAGCAAGTTAAAATAA | 21033 | 16 | 12 | 124 |
| RT16_PBS12 | GGCTAGTCCGTTATCAACTTGAAAAAGTGGCACCGAGTCGGTGCGCAGACTT | | | | |
| | CTCTTCAGGAGTCAGGTGCA | | | | |
| HBB5_corr_WT | CATGGTGCACCTGACTCCTGGTTTTAGAGCTAGAAATAGCAAGTTAAAATAA | 21034 | 16 | 11 | 123 |
| RT16_PBS11 | GGCTAGTCCGTTATCAACTTGAAAAAGTGGCACCGAGTCGGTGCGCAGACTT | | | | |
| | CTCTTCAGGAGTCAGGTGC | | | | |
| HBB5_corr_WT | CATGGTGCACCTGACTCCTGGTTTTAGAGCTAGAAATAGCAAGTTAAAATAA | 21035 | 16 | 10 | 122 |
| RT16_PBS10 | GGCTAGTCCGTTATCAACTTGAAAAAGTGGCACCGAGTCGGTGCGCAGACTT | | | | |
| | CTCTTCAGGAGTCAGGTG | | | | |
| HBB5_corr_WT | CATGGTGCACCTGACTCCTGGTTTTAGAGCTAGAAATAGCAAGTTAAAATAA | 21036 | 16 | 9 | 121 |
| RT16_PBS9 | GGCTAGTCCGTTATCAACTTGAAAAAGTGGCACCGAGTCGGTGCGCAGACTT | | | | |
| | CTCTTCAGGAGTCAGGT | | | | |
| HBB5_corr_WT | CATGGTGCACCTGACTCCTGGTTTTAGAGCTAGAAATAGCAAGTTAAAATAA | 21037 | 16 | 8 | 120 |
| RT16_PBS8 | GGCTAGTCCGTTATCAACTTGAAAAAGTGGCACCGAGTCGGTGCGCAGACTT | | | | |
| | CTCTTCAGGAGTCAGG | | | | |
| HBB5_corr_WT | CATGGTGCACCTGACTCCTGGTTTTAGAGCTAGAAATAGCAAGTTAAAATAA | 21038 | 15 | 17 | 128 |
| RT15_PBS17 | GGCTAGTCCGTTATCAACTTGAAAAAGTGGCACCGAGTCGGTGCCAGACTTC | | | | |
| | TCTTCAGGAGTCAGGTGCACCATG | | | | |
| HBB5_corr_WT | CATGGTGCACCTGACTCCTGGTTTTAGAGCTAGAAATAGCAAGTTAAAATAA | 21039 | 15 | 16 | 127 |
| RT15_PBS16 | GGCTAGTCCGTTATCAACTTGAAAAAGTGGCACCGAGTCGGTGCCAGACTTC | | | | |
| | TCTTCAGGAGTCAGGTGCACCAT | | | | |
| HBB5_corr_WT | CATGGTGCACCTGACTCCTGGTTTTAGAGCTAGAAATAGCAAGTTAAAATAA | 21040 | 15 | 15 | 126 |
| RT15_PBS15 | GGCTAGTCCGTTATCAACTTGAAAAAGTGGCACCGAGTCGGTGCCAGACTTC | | | | |
| | TCTTCAGGAGTCAGGTGCACCA | | | | |
| HBB5_corr_WT | CATGGTGCACCTGACTCCTGGTTTTAGAGCTAGAAATAGCAAGTTAAAATAA | 21041 | 15 | 14 | 125 |
| RT15_PBS14 | GGCTAGTCCGTTATCAACTTGAAAAAGTGGCACCGAGTCGGTGCCAGACTTC | | | | |
| | TCTTCAGGAGTCAGGTGCACC | | | | |
| HBB5_corr_WT | CATGGTGCACCTGACTCCTGGTTTTAGAGCTAGAAATAGCAAGTTAAAATAA | 21042 | 15 | 13 | 124 |
| RT15_PBS13 | GGCTAGTCCGTTATCAACTTGAAAAAGTGGCACCGAGTCGGTGCCAGACTTC | | | | |
| | TCTTCAGGAGTCAGGTGCAC | | | | |
| HBB5_corr_WT | CATGGTGCACCTGACTCCTGGTTTTAGAGCTAGAAATAGCAAGTTAAAATAA | 21043 | 15 | 12 | 123 |
| RT15_PBS12 | GGCTAGTCCGTTATCAACTTGAAAAAGTGGCACCGAGTCGGTGCCAGACTTC | | | | |
| | TCTTCAGGAGTCAGGTGCA | | | | |
| HBB5_corr_WT | CATGGTGCACCTGACTCCTGGTTTTAGAGCTAGAAATAGCAAGTTAAAATAA | 21044 | 15 | 11 | 122 |
| RT15_PBS11 | GGCTAGTCCGTTATCAACTTGAAAAAGTGGCACCGAGTCGGTGCCAGACTTC | | | | |
| | TCTTCAGGAGTCAGGTGC | | | | |
| HBB5_corr_WT | CATGGTGCACCTGACTCCTGGTTTTAGAGCTAGAAATAGCAAGTTAAAATAA | 21045 | 15 | 10 | 121 |
| RT15_PBS10 | GGCTAGTCCGTTATCAACTTGAAAAAGTGGCACCGAGTCGGTGCCAGACTTC | | | | |
| | TCTTCAGGAGTCAGGTG | | | | |
| HBB5_corr_WT | CATGGTGCACCTGACTCCTGGTTTTAGAGCTAGAAATAGCAAGTTAAAATAA | 21046 | 15 | 9 | 120 |
| RT15_PBS9 | GGCTAGTCCGTTATCAACTTGAAAAAGTGGCACCGAGTCGGTGCCAGACTTC | | | | |
| | TCTTCAGGAGTCAGGT | | | | |
| HBB5_corr_WT | CATGGTGCACCTGACTCCTGGTTTTAGAGCTAGAAATAGCAAGTTAAAATAA | 21047 | 15 | 8 | 119 |
| RT15_PBS8 | GGCTAGTCCGTTATCAACTTGAAAAAGTGGCACCGAGTCGGTGCCAGACTTC | | | | |
| | TCTTCAGGAGTCAGG | | | | |
| HBB5_corr_WT | CATGGTGCACCTGACTCCTGGTTTTAGAGCTAGAAATAGCAAGTTAAAATAA | 21048 | 14 | 17 | 127 |
| RT14_PBS17 | GGCTAGTCCGTTATCAACTTGAAAAAGTGGCACCGAGTCGGTGCAGACTTCT | | | | |
| | CTTCAGGAGTCAGGTGCACCATG | | | | |
| HBB5_corr_WT | CATGGTGCACCTGACTCCTGGTTTTAGAGCTAGAAATAGCAAGTTAAAATAA | 21049 | 14 | 16 | 126 |
| RT14_PBS16 | GGCTAGTCCGTTATCAACTTGAAAAAGTGGCACCGAGTCGGTGCAGACTTCT | | | | |
| | CTTCAGGAGTCAGGTGCACCAT | | | | |
| HBB5_corr_WT | CATGGTGCACCTGACTCCTGGTTTTAGAGCTAGAAATAGCAAGTTAAAATAA | 21050 | 14 | 15 | 125 |
| RT14_PBS15 | GGCTAGTCCGTTATCAACTTGAAAAAGTGGCACCGAGTCGGTGCAGACTTCT | | | | |
| | CTTCAGGAGTCAGGTGCACCA | | | | |
| HBB5_corr_WT | CATGGTGCACCTGACTCCTGGTTTTAGAGCTAGAAATAGCAAGTTAAAATAA | 21051 | 14 | 14 | 124 |
| RT14_PBS14 | GGCTAGTCCGTTATCAACTTGAAAAAGTGGCACCGAGTCGGTGCAGACTTCT | | | | |
| | CTTCAGGAGTCAGGTGCACC | | | | |
| HBB5_corr_WT | CATGGTGCACCTGACTCCTGGTTTTAGAGCTAGAAATAGCAAGTTAAAATAA | 21052 | 14 | 13 | 123 |
| RT14_PBS13 | GGCTAGTCCGTTATCAACTTGAAAAAGTGGCACCGAGTCGGTGCAGACTTCT | | | | |
| | CTTCAGGAGTCAGGTGCAC | | | | |
| HBB5_corr_WT | CATGGTGCACCTGACTCCTGGTTTTAGAGCTAGAAATAGCAAGTTAAAATAA | 21053 | 14 | 12 | 122 |
| RT14_PBS12 | GGCTAGTCCGTTATCAACTTGAAAAAGTGGCACCGAGTCGGTGCAGACTTCT | | | | |
| | CTTCAGGAGTCAGGTGCA | | | | |
| HBB5_corr_WT | CATGGTGCACCTGACTCCTGGTTTTAGAGCTAGAAATAGCAAGTTAAAATAA | 21054 | 14 | 11 | 121 |
| RT14_PBS11 | GGCTAGTCCGTTATCAACTTGAAAAAGTGGCACCGAGTCGGTGCAGACTTCT | | | | |
| | CTTCAGGAGTCAGGTGC | | | | |
| HBB5_corr_WT | CATGGTGCACCTGACTCCTGGTTTTAGAGCTAGAAATAGCAAGTTAAAATAA | 21055 | 14 | 10 | 120 |
| RT14_PBS10 | GGCTAGTCCGTTATCAACTTGAAAAAGTGGCACCGAGTCGGTGCAGACTTCT | | | | |
| | CTTCAGGAGTCAGGTG | | | | |
| HBB5_corr_WT | CATGGTGCACCTGACTCCTGGTTTTAGAGCTAGAAATAGCAAGTTAAAATAA | 21056 | 14 | 9 | 119 |
| RT14_PBS9 | GGCTAGTCCGTTATCAACTTGAAAAAGTGGCACCGAGTCGGTGCAGACTTCT | | | | |
| | CTTCAGGAGTCAGGT | | | | |
| HBB5_corr_WT | CATGGTGCACCTGACTCCTGGTTTTAGAGCTAGAAATAGCAAGTTAAAATAA | 21057 | 14 | 8 | 118 |
| RT14_PBS8 | GGCTAGTCCGTTATCAACTTGAAAAAGTGGCACCGAGTCGGTGCAGACTTCT | | | | |
| | CTTCAGGAGTCAGG | | | | |
| HBB5_corr_WT | CATGGTGCACCTGACTCCTGGTTTTAGAGCTAGAAATAGCAAGTTAAAATAA | 21058 | 13 | 17 | 126 |
| RT13_PBS17 | GGCTAGTCCGTTATCAACTTGAAAAAGTGGCACCGAGTCGGTGCGACTTCTC | | | | |
| | TTCAGGAGTCAGGTGCACCATG | | | | |
| HBB5_corr_WT | CATGGTGCACCTGACTCCTGGTTTTAGAGCTAGAAATAGCAAGTTAAAATAA | 21059 | 13 | 16 | 125 |
| RT13_PBS16 | GGCTAGTCCGTTATCAACTTGAAAAAGTGGCACCGAGTCGGTGCGACTTCTC | | | | |
| | TTCAGGAGTCAGGTGCACCAT | | | | |
| HBB5_corr_WT | CATGGTGCACCTGACTCCTGGTTTTAGAGCTAGAAATAGCAAGTTAAAATAA | 21060 | 13 | 15 | 124 |
| RT13_PBS15 | GGCTAGTCCGTTATCAACTTGAAAAAGTGGCACCGAGTCGGTGCGACTTCTC | | | | |
| | TTCAGGAGTCAGGTGCACCA | | | | |
| HBB5_corr_WT | CATGGTGCACCTGACTCCTGGTTTTAGAGCTAGAAATAGCAAGTTAAAATAA | 21061 | 13 | 14 | 123 |
| RT13_PBS14 | GGCTAGTCCGTTATCAACTTGAAAAAGTGGCACCGAGTCGGTGCGACTTCTC | | | | |
| | TTCAGGAGTCAGGTGCACC | | | | |
| HBB5_corr_WT | CATGGTGCACCTGACTCCTGGTTTTAGAGCTAGAAATAGCAAGTTAAAATAA | 21062 | 13 | 13 | 122 |
| RT13_PBS13 | GGCTAGTCCGTTATCAACTTGAAAAAGTGGCACCGAGTCGGTGCGACTTCTC | | | | |
| | TTCAGGAGTCAGGTGCAC | | | | |
| HBB5_corr_WT | CATGGTGCACCTGACTCCTGGTTTTAGAGCTAGAAATAGCAAGTTAAAATAA | 21063 | 13 | 12 | 121 |
| RT13_PBS12 | GGCTAGTCCGTTATCAACTTGAAAAAGTGGCACCGAGTCGGTGCGACTTCTC | | | | |
| | TTCAGGAGTCAGGTGCA | | | | |
| HBB5_corr_WT | CATGGTGCACCTGACTCCTGGTTTTAGAGCTAGAAATAGCAAGTTAAAATAA | 21064 | 13 | 11 | 120 |
| RT13_PBS11 | GGCTAGTCCGTTATCAACTTGAAAAAGTGGCACCGAGTCGGTGCGACTTCTC | | | | |
| | TTCAGGAGTCAGGTGC | | | | |
| HBB5_corr_WT | CATGGTGCACCTGACTCCTGGTTTTAGAGCTAGAAATAGCAAGTTAAAATAA | 21065 | 13 | 10 | 119 |
| RT13_PBS10 | GGCTAGTCCGTTATCAACTTGAAAAAGTGGCACCGAGTCGGTGCGACTTCTC | | | | |
| | TTCAGGAGTCAGGTG | | | | |
| HBB5_corr_WT | CATGGTGCACCTGACTCCTGGTTTTAGAGCTAGAAATAGCAAGTTAAAATAA | 21066 | 13 | 9 | 118 |
| RT13_PBS9 | GGCTAGTCCGTTATCAACTTGAAAAAGTGGCACCGAGTCGGTGCGACTTCTC | | | | |
| | TTCAGGAGTCAGGT | | | | |
| HBB5_corr_WT | CATGGTGCACCTGACTCCTGGTTTTAGAGCTAGAAATAGCAAGTTAAAATAA | 21067 | 13 | 8 | 117 |
| RT13_PBS8 | GGCTAGTCCGTTATCAACTTGAAAAAGTGGCACCGAGTCGGTGCGACTTCTC | | | | |
| | TTCAGGAGTCAGG | | | | |
| HBB5_corr_WT | CATGGTGCACCTGACTCCTGGTTTTAGAGCTAGAAATAGCAAGTTAAAATAA | 21068 | 12 | 17 | 125 |
| RT12_PBS17 | GGCTAGTCCGTTATCAACTTGAAAAAGTGGCACCGAGTCGGTGCACTTCTCT | | | | |
| | TCAGGAGTCAGGTGCACCATG | | | | |
| HBB5_corr_WT | CATGGTGCACCTGACTCCTGGTTTTAGAGCTAGAAATAGCAAGTTAAAATAA | 21069 | 12 | 16 | 124 |
| RT12_PBS16 | GGCTAGTCCGTTATCAACTTGAAAAAGTGGCACCGAGTCGGTGCACTTCTCT | | | | |
| | TCAGGAGTCAGGTGCACCAT | | | | |
| HBB5_corr_WT | CATGGTGCACCTGACTCCTGGTTTTAGAGCTAGAAATAGCAAGTTAAAATAA | 21070 | 12 | 15 | 123 |
| RT12_PBS15 | GGCTAGTCCGTTATCAACTTGAAAAAGTGGCACCGAGTCGGTGCACTTCTCT | | | | |
| | TCAGGAGTCAGGTGCACCA | | | | |
| HBB5_corr_WT | CATGGTGCACCTGACTCCTGGTTTTAGAGCTAGAAATAGCAAGTTAAAATAA | 21071 | 12 | 14 | 122 |
| RT12_PBS14 | GGCTAGTCCGTTATCAACTTGAAAAAGTGGCACCGAGTCGGTGCACTTCTCT | | | | |
| | TCAGGAGTCAGGTGCACC | | | | |
| HBB5_corr_WT | CATGGTGCACCTGACTCCTGGTTTTAGAGCTAGAAATAGCAAGTTAAAATAA | 21072 | 12 | 13 | 121 |
| RT12_PBS13 | GGCTAGTCCGTTATCAACTTGAAAAAGTGGCACCGAGTCGGTGCACTTCTCT | | | | |
| | TCAGGAGTCAGGTGCAC | | | | |
| HBB5_corr_WT | CATGGTGCACCTGACTCCTGGTTTTAGAGCTAGAAATAGCAAGTTAAAATAA | 21073 | 12 | 12 | 120 |
| RT12_PBS12 | GGCTAGTCCGTTATCAACTTGAAAAAGTGGCACCGAGTCGGTGCACTTCTCT | | | | |
| | TCAGGAGTCAGGTGCA | | | | |
| HBB5_corr_WT | CATGGTGCACCTGACTCCTGGTTTTAGAGCTAGAAATAGCAAGTTAAAATAA | 21074 | 12 | 11 | 119 |
| RT12_PBS11 | GGCTAGTCCGTTATCAACTTGAAAAAGTGGCACCGAGTCGGTGCACTTCTCT | | | | |
| | TCAGGAGTCAGGTGC | | | | |
| HBB5_corr_WT | CATGGTGCACCTGACTCCTGGTTTTAGAGCTAGAAATAGCAAGTTAAAATAA | 21075 | 12 | 10 | 118 |
| RT12_PBS10 | GGCTAGTCCGTTATCAACTTGAAAAAGTGGCACCGAGTCGGTGCACTTCTCT | | | | |
| | TCAGGAGTCAGGTG | | | | |
| HBB5_corr_WT | CATGGTGCACCTGACTCCTGGTTTTAGAGCTAGAAATAGCAAGTTAAAATAA | 21076 | 12 | 9 | 117 |
| RT12_PBS9 | GGCTAGTCCGTTATCAACTTGAAAAAGTGGCACCGAGTCGGTGCACTTCTCT | | | | |
| | TCAGGAGTCAGGT | | | | |
| HBB5_corr_WT | CATGGTGCACCTGACTCCTGGTTTTAGAGCTAGAAATAGCAAGTTAAAATAA | 21077 | 12 | 8 | 116 |
| RT12_PBS8 | GGCTAGTCCGTTATCAACTTGAAAAAGTGGCACCGAGTCGGTGCACTTCTCT | | | | |
| | TCAGGAGTCAGG | | | | |
| HBB5_corr_WT | CATGGTGCACCTGACTCCTGGTTTTAGAGCTAGAAATAGCAAGTTAAAATAA | 21078 | 11 | 17 | 124 |
| RT11_PBS17 | GGCTAGTCCGTTATCAACTTGAAAAAGTGGCACCGAGTCGGTGCCTTCTCTTC | | | | |
| | AGGAGTCAGGTGCACCATG | | | | |
| HBB5_corr_WT | CATGGTGCACCTGACTCCTGGTTTTAGAGCTAGAAATAGCAAGTTAAAATAA | 21079 | 11 | 16 | 123 |
| RT11_PBS16 | GGCTAGTCCGTTATCAACTTGAAAAAGTGGCACCGAGTCGGTGCCTTCTCTTC | | | | |
| | AGGAGTCAGGTGCACCAT | | | | |
| HBB5_corr_WT | CATGGTGCACCTGACTCCTGGTTTTAGAGCTAGAAATAGCAAGTTAAAATAA | 21080 | 11 | 15 | 122 |
| RT11_PBS15 | GGCTAGTCCGTTATCAACTTGAAAAAGTGGCACCGAGTCGGTGCCTTCTCTTC | | | | |
| | AGGAGTCAGGTGCACCA | | | | |
| HBB5_corr_WT | CATGGTGCACCTGACTCCTGGTTTTAGAGCTAGAAATAGCAAGTTAAAATAA | 21081 | 11 | 14 | 121 |
| RT11_PBS14 | GGCTAGTCCGTTATCAACTTGAAAAAGTGGCACCGAGTCGGTGCCTTCTCTTC | | | | |
| | AGGAGTCAGGTGCACC | | | | |
| HBB5_corr_WT | CATGGTGCACCTGACTCCTGGTTTTAGAGCTAGAAATAGCAAGTTAAAATAA | 21082 | 11 | 13 | 120 |
| RT11_PBS13 | GGCTAGTCCGTTATCAACTTGAAAAAGTGGCACCGAGTCGGTGCCTTCTCTTC | | | | |
| | AGGAGTCAGGTGCAC | | | | |
| HBB5_corr_WT | CATGGTGCACCTGACTCCTGGTTTTAGAGCTAGAAATAGCAAGTTAAAATAA | 21083 | 11 | 12 | 119 |
| RT11_PBS12 | GGCTAGTCCGTTATCAACTTGAAAAAGTGGCACCGAGTCGGTGCCTTCTCTTC | | | | |
| | AGGAGTCAGGTGCA | | | | |
| HBB5_corr_WT | CATGGTGCACCTGACTCCTGGTTTTAGAGCTAGAAATAGCAAGTTAAAATAA | 21084 | 11 | 11 | 118 |
| RT11_PBS11 | GGCTAGTCCGTTATCAACTTGAAAAAGTGGCACCGAGTCGGTGCCTTCTCTTC | | | | |
| | AGGAGTCAGGTGC | | | | |
| HBB5_corr_WT | CATGGTGCACCTGACTCCTGGTTTTAGAGCTAGAAATAGCAAGTTAAAATAA | 21085 | 11 | 10 | 117 |
| RT11_PBS10 | GGCTAGTCCGTTATCAACTTGAAAAAGTGGCACCGAGTCGGTGCCTTCTCTTC | | | | |
| | AGGAGTCAGGTG | | | | |
| HBB5_corr_WT | CATGGTGCACCTGACTCCTGGTTTTAGAGCTAGAAATAGCAAGTTAAAATAA | 21086 | 11 | 9 | 116 |
| RT11_PBS9 | GGCTAGTCCGTTATCAACTTGAAAAAGTGGCACCGAGTCGGTGCCTTCTCTTC | | | | |
| | AGGAGTCAGGT | | | | |
| HBB5_corr_WT | CATGGTGCACCTGACTCCTGGTTTTAGAGCTAGAAATAGCAAGTTAAAATAA | 21087 | 11 | 8 | 115 |
| RT11_PBS8 | GGCTAGTCCGTTATCAACTTGAAAAAGTGGCACCGAGTCGGTGCCTTCTCTTC | | | | |
| | AGGAGTCAGG | | | | |
| HBB5_corr_WT | CATGGTGCACCTGACTCCTGGTTTTAGAGCTAGAAATAGCAAGTTAAAATAA | 21088 | 10 | 17 | 123 |
| RT10_PBS17 | GGCTAGTCCGTTATCAACTTGAAAAAGTGGCACCGAGTCGGTGCTTCTCTTC | | | | |
| | AGGAGTCAGGTGCACCATG | | | | |
| HBB5_corr_WT | CATGGTGCACCTGACTCCTGGTTTTAGAGCTAGAAATAGCAAGTTAAAATAA | 21089 | 10 | 16 | 122 |
| RT10_PBS16 | GGCTAGTCCGTTATCAACTTGAAAAAGTGGCACCGAGTCGGTGCTTCTCTTC | | | | |
| | AGGAGTCAGGTGCACCAT | | | | |
| HBB5_corr_WT | CATGGTGCACCTGACTCCTGGTTTTAGAGCTAGAAATAGCAAGTTAAAATAA | 21090 | 10 | 15 | 121 |
| RT10_PBS15 | GGCTAGTCCGTTATCAACTTGAAAAAGTGGCACCGAGTCGGTGCTTCTCTTC | | | | |
| | AGGAGTCAGGTGCACCA | | | | |
| HBB5_corr_WT | CATGGTGCACCTGACTCCTGGTTTTAGAGCTAGAAATAGCAAGTTAAAATAA | 21091 | 10 | 14 | 120 |
| RT10_PBS14 | GGCTAGTCCGTTATCAACTTGAAAAAGTGGCACCGAGTCGGTGCTTCTCTTC | | | | |
| | AGGAGTCAGGTGCACC | | | | |
| HBB5_corr_WT | CATGGTGCACCTGACTCCTGGTTTTAGAGCTAGAAATAGCAAGTTAAAATAA | 21092 | 10 | 13 | 119 |
| RT10_PBS13 | GGCTAGTCCGTTATCAACTTGAAAAAGTGGCACCGAGTCGGTGCTTCTCTTC | | | | |
| | AGGAGTCAGGTGCAC | | | | |
| HBB5_corr_WT | CATGGTGCACCTGACTCCTGGTTTTAGAGCTAGAAATAGCAAGTTAAAATAA | 21093 | 10 | 12 | 118 |
| RT10_PBS12 | GGCTAGTCCGTTATCAACTTGAAAAAGTGGCACCGAGTCGGTGCTTCTCTTC | | | | |
| | AGGAGTCAGGTGCA | | | | |
| HBB5_corr_WT | CATGGTGCACCTGACTCCTGGTTTTAGAGCTAGAAATAGCAAGTTAAAATAA | 21094 | 10 | 11 | 117 |
| RT10_PBS11 | GGCTAGTCCGTTATCAACTTGAAAAAGTGGCACCGAGTCGGTGCTTCTCTTC | | | | |
| | AGGAGTCAGGTGC | | | | |
| HBB5_corr_WT | CATGGTGCACCTGACTCCTGGTTTTAGAGCTAGAAATAGCAAGTTAAAATAA | 21095 | 10 | 10 | 116 |
| RT10_PBS10 | GGCTAGTCCGTTATCAACTTGAAAAAGTGGCACCGAGTCGGTGCTTCTCTTC | | | | |
| | AGGAGTCAGGTG | | | | |
| HBB5_corr_WT | CATGGTGCACCTGACTCCTGGTTTTAGAGCTAGAAATAGCAAGTTAAAATAA | 21096 | 10 | 9 | 115 |
| RT10_PBS9 | GGCTAGTCCGTTATCAACTTGAAAAAGTGGCACCGAGTCGGTGCTTCTCTTC | | | | |
| | AGGAGTCAGGT | | | | |
| HBB5_corr_WT | CATGGTGCACCTGACTCCTGGTTTTAGAGCTAGAAATAGCAAGTTAAAATAA | 21097 | 10 | 8 | 114 |
| RT10_PBS8 | GGCTAGTCCGTTATCAACTTGAAAAAGTGGCACCGAGTCGGTGCTTCTCTTC | | | | |
| | AGGAGTCAGG | | | | |
| HBB5_corr_WT | CATGGTGCACCTGACTCCTGGTTTTAGAGCTAGAAATAGCAAGTTAAAATAA | 21098 | 9 | 17 | 122 |
| RT9_PBS17 | GGCTAGTCCGTTATCAACTTGAAAAAGTGGCACCGAGTCGGTGCTCTCTTCA | | | | |
| | GGAGTCAGGTGCACCATG | | | | |
| HBB5_corr_WT | CATGGTGCACCTGACTCCTGGTTTTAGAGCTAGAAATAGCAAGTTAAAATAA | 21099 | 9 | 16 | 121 |
| RT9_PBS16 | GGCTAGTCCGTTATCAACTTGAAAAAGTGGCACCGAGTCGGTGCTCTCTTCA | | | | |
| | GGAGTCAGGTGCACCAT | | | | |
| HBB5_corr_WT | CATGGTGCACCTGACTCCTGGTTTTAGAGCTAGAAATAGCAAGTTAAAATAA | 21100 | 9 | 15 | 120 |
| RT9_PBS15 | GGCTAGTCCGTTATCAACTTGAAAAAGTGGCACCGAGTCGGTGCTCTCTTCA | | | | |
| | GGAGTCAGGTGCACCA | | | | |
| HBB5_corr_WT | CATGGTGCACCTGACTCCTGGTTTTAGAGCTAGAAATAGCAAGTTAAAATAA | 21101 | 9 | 14 | 119 |
| RT9_PBS14 | GGCTAGTCCGTTATCAACTTGAAAAAGTGGCACCGAGTCGGTGCTCTCTTCA | | | | |
| | GGAGTCAGGTGCACC | | | | |
| HBB5_corr_WT | CATGGTGCACCTGACTCCTGGTTTTAGAGCTAGAAATAGCAAGTTAAAATAA | 21102 | 9 | 13 | 118 |
| RT9_PBS13 | GGCTAGTCCGTTATCAACTTGAAAAAGTGGCACCGAGTCGGTGCTCTCTTCA | | | | |
| | GGAGTCAGGTGCAC | | | | |
| HBB5_corr_WT | CATGGTGCACCTGACTCCTGGTTTTAGAGCTAGAAATAGCAAGTTAAAATAA | 21103 | 9 | 12 | 117 |
| RT9_PBS12 | GGCTAGTCCGTTATCAACTTGAAAAAGTGGCACCGAGTCGGTGCTCTCTTCA | | | | |
| | GGAGTCAGGTGCA | | | | |
| HBB5_corr_WT | CATGGTGCACCTGACTCCTGGTTTTAGAGCTAGAAATAGCAAGTTAAAATAA | 21104 | 9 | 11 | 116 |
| RT9_PBS11 | GGCTAGTCCGTTATCAACTTGAAAAAGTGGCACCGAGTCGGTGCTCTCTTCA | | | | |
| | GGAGTCAGGTGC | | | | |
| HBB5_corr_WT | CATGGTGCACCTGACTCCTGGTTTTAGAGCTAGAAATAGCAAGTTAAAATAA | 21105 | 9 | 10 | 115 |
| RT9_PBS10 | GGCTAGTCCGTTATCAACTTGAAAAAGTGGCACCGAGTCGGTGCTCTCTTCA | | | | |
| | GGAGTCAGGTG | | | | |
| HBB5_corr_WT | CATGGTGCACCTGACTCCTGGTTTTAGAGCTAGAAATAGCAAGTTAAAATAA | 21106 | 9 | 9 | 114 |
| RT9_PBS9 | GGCTAGTCCGTTATCAACTTGAAAAAGTGGCACCGAGTCGGTGCTCTCTTCA | | | | |
| | GGAGTCAGGT | | | | |
| HBB5_corr_WT | CATGGTGCACCTGACTCCTGGTTTTAGAGCTAGAAATAGCAAGTTAAAATAA | 21107 | 9 | 8 | 113 |
| RT9_PBS8 | GGCTAGTCCGTTATCAACTTGAAAAAGTGGCACCGAGTCGGTGCTCTCTTCA | | | | |
| | GGAGTCAGG | | | | |
| HBB5_corr_WT | CATGGTGCACCTGACTCCTGGTTTTAGAGCTAGAAATAGCAAGTTAAAATAA | 21108 | 8 | 17 | 121 |
| RT8_PBS17 | GGCTAGTCCGTTATCAACTTGAAAAAGTGGCACCGAGTCGGTGCCTCTTCAG | | | | |
| | GAGTCAGGTGCACCATG | | | | |
| HBB5_corr_WT | CATGGTGCACCTGACTCCTGGTTTTAGAGCTAGAAATAGCAAGTTAAAATAA | 21109 | 8 | 16 | 120 |
| RT8_PBS16 | GGCTAGTCCGTTATCAACTTGAAAAAGTGGCACCGAGTCGGTGCCTCTTCAG | | | | |
| | GAGTCAGGTGCACCAT | | | | |
| HBB5_corr_WT | CATGGTGCACCTGACTCCTGGTTTTAGAGCTAGAAATAGCAAGTTAAAATAA | 21110 | 8 | 15 | 119 |
| RT8_PBS15 | GGCTAGTCCGTTATCAACTTGAAAAAGTGGCACCGAGTCGGTGCCTCTTCAG | | | | |
| | GAGTCAGGTGCACCA | | | | |
| HBB5_corr_WT | CATGGTGCACCTGACTCCTGGTTTTAGAGCTAGAAATAGCAAGTTAAAATAA | 21111 | 8 | 14 | 118 |
| RT8_PBS14 | GGCTAGTCCGTTATCAACTTGAAAAAGTGGCACCGAGTCGGTGCCTCTTCAG | | | | |
| | GAGTCAGGTGCACC | | | | |
| HBB5_corr_WT | CATGGTGCACCTGACTCCTGGTTTTAGAGCTAGAAATAGCAAGTTAAAATAA | 21112 | 8 | 13 | 117 |
| RT8_PBS13 | GGCTAGTCCGTTATCAACTTGAAAAAGTGGCACCGAGTCGGTGCCTCTTCAG | | | | |
| | GAGTCAGGTGCAC | | | | |
| HBB5_corr_WT | CATGGTGCACCTGACTCCTGGTTTTAGAGCTAGAAATAGCAAGTTAAAATAA | 21113 | 8 | 12 | 116 |
| RT8_PBS12 | GGCTAGTCCGTTATCAACTTGAAAAAGTGGCACCGAGTCGGTGCCTCTTCAG | | | | |
| | GAGTCAGGTGCA | | | | |
| HBB5_corr_WT | CATGGTGCACCTGACTCCTGGTTTTAGAGCTAGAAATAGCAAGTTAAAATAA | 21114 | 8 | 11 | 115 |
| RT8_PBS11 | GGCTAGTCCGTTATCAACTTGAAAAAGTGGCACCGAGTCGGTGCCTCTTCAG | | | | |
| | GAGTCAGGTGC | | | | |
| HBB5_corr_WT | CATGGTGCACCTGACTCCTGGTTTTAGAGCTAGAAATAGCAAGTTAAAATAA | 21115 | 8 | 10 | 114 |
| RT8_PBS10 | GGCTAGTCCGTTATCAACTTGAAAAAGTGGCACCGAGTCGGTGCCTCTTCAG | | | | |
| | GAGTCAGGTG | | | | |
| HBB5_corr_WT | CATGGTGCACCTGACTCCTGGTTTTAGAGCTAGAAATAGCAAGTTAAAATAA | 21116 | 8 | 9 | 113 |
| RT8_PBS9 | GGCTAGTCCGTTATCAACTTGAAAAAGTGGCACCGAGTCGGTGCCTCTTCAG | | | | |
| | GAGTCAGGT | | | | |
| HBB5_corr_WT | CATGGTGCACCTGACTCCTGGTTTTAGAGCTAGAAATAGCAAGTTAAAATAA | 21117 | 8 | 8 | 112 |
| RT8_PBS8 | GGCTAGTCCGTTATCAACTTGAAAAAGTGGCACCGAGTCGGTGCCTCTTCAG | | | | |
| | GAGTCAGG | | | | |

TABLE 5B
Exemplary template RNA sequences
Table 5B provides design of exemplary DNA components of gene modifying systems for
correcting the pathogenic E6V mutation in HBB to the Makassar form. This table
details the sequence of a complete template RNA for use in an exemplary gene
modifying system comprising a gene modifying polypeptide. Templates in this
table employ the HBB5 spacer (CATGGTGCACCTGACTCCTG SEQ ID NO: 19249) and a
gRNA scaffold sequence of GTTTTAGAGCTAGAAATAGCAAGTTAAAATAAGGCTAGTCCGTTATCA
ACTTGAAAAAGTGGCACCGAGTCGGTGC (SEQ ID NO: 20923). For exemplification, the
lengths of the RT (heterologous object) sequences and PBS sequences were
varied at the 3′ end. The length of these respective sequences is reflected
in columns 3 and 4, respectively. The longest form of the RT sequence is
AGTAACGGCAGACTTCTCTGCAG (SEQ ID NO: 20955). The longest form of the PBS
is GAGTCAGGTGCACCATG (SEQ ID NO: 19431).

| | | SEQ | | | |
|---|---|---|---|---|---|
| Sequence | | ID | RT | PBS | Total |
| Name | Full DNA sequence | NO | length | length | length |
| HBB5_corr | CATGGTGCACCTGACTCCTGGTTTTAGAGCTAGAAATAGCAAGTTAAAATAAGG | 21118 | 23 | 17 | 136 |
| Mak_RT23 | CTAGTCCGTTATCAACTTGAAAAAGTGGCACCGAGTCGGTGCAGTAACGGCAG | | | | |
| PBS17 | ACTTCTCTGCAGGAGTCAGGTGCACCATG | | | | |
| HBB5_corr | CATGGTGCACCTGACTCCTGGTTTTAGAGCTAGAAATAGCAAGTTAAAATAAGG | 21119 | 23 | 16 | 135 |
| Mak_RT23 | CTAGTCCGTTATCAACTTGAAAAAGTGGCACCGAGTCGGTGCAGTAACGGCAG | | | | |
| PBS16 | ACTTCTCTGCAGGAGTCAGGTGCACCAT | | | | |
| HBB5_corr | CATGGTGCACCTGACTCCTGGTTTTAGAGCTAGAAATAGCAAGTTAAAATAAGG | 21120 | 23 | 15 | 134 |
| Mak_RT23 | CTAGTCCGTTATCAACTTGAAAAAGTGGCACCGAGTCGGTGCAGTAACGGCAG | | | | |
| PBS15 | ACTTCTCTGCAGGAGTCAGGTGCACCA | | | | |
| HBB5_corr | CATGGTGCACCTGACTCCTGGTTTTAGAGCTAGAAATAGCAAGTTAAAATAAGG | 21121 | 23 | 14 | 133 |
| Mak_RT23 | CTAGTCCGTTATCAACTTGAAAAAGTGGCACCGAGTCGGTGCAGTAACGGCAG | | | | |
| PBS14 | ACTTCTCTGCAGGAGTCAGGTGCACC | | | | |
| HBB5_corr | CATGGTGCACCTGACTCCTGGTTTTAGAGCTAGAAATAGCAAGTTAAAATAAGG | 21122 | 23 | 13 | 132 |
| Mak_RT23 | CTAGTCCGTTATCAACTTGAAAAAGTGGCACCGAGTCGGTGCAGTAACGGCAG | | | | |
| PBS13 | ACTTCTCTGCAGGAGTCAGGTGCAC | | | | |
| HBB5_corr | CATGGTGCACCTGACTCCTGGTTTTAGAGCTAGAAATAGCAAGTTAAAATAAGG | 21123 | 23 | 12 | 131 |
| Mak_RT23 | CTAGTCCGTTATCAACTTGAAAAAGTGGCACCGAGTCGGTGCAGTAACGGCAG | | | | |
| PBS12 | ACTTCTCTGCAGGAGTCAGGTGCA | | | | |
| HBB5_corr | CATGGTGCACCTGACTCCTGGTTTTAGAGCTAGAAATAGCAAGTTAAAATAAGG | 21124 | 23 | 11 | 130 |
| Mak_RT23 | CTAGTCCGTTATCAACTTGAAAAAGTGGCACCGAGTCGGTGCAGTAACGGCAG | | | | |
| PBS11 | ACTTCTCTGCAGGAGTCAGGTGC | | | | |
| HBB5_corr | CATGGTGCACCTGACTCCTGGTTTTAGAGCTAGAAATAGCAAGTTAAAATAAGG | 21125 | 23 | 10 | 129 |
| Mak_RT23 | CTAGTCCGTTATCAACTTGAAAAAGTGGCACCGAGTCGGTGCAGTAACGGCAG | | | | |
| PBS10 | ACTTCTCTGCAGGAGTCAGGTG | | | | |
| HBB5_corr | CATGGTGCACCTGACTCCTGGTTTTAGAGCTAGAAATAGCAAGTTAAAATAAGG | 21126 | 23 | 9 | 128 |
| Mak_RT23 | CTAGTCCGTTATCAACTTGAAAAAGTGGCACCGAGTCGGTGCAGTAACGGCAG | | | | |
| PBS9 | ACTTCTCTGCAGGAGTCAGGT | | | | |
| HBB5_corr | CATGGTGCACCTGACTCCTGGTTTTAGAGCTAGAAATAGCAAGTTAAAATAAGG | 21127 | 23 | 8 | 127 |
| Mak_RT23 | CTAGTCCGTTATCAACTTGAAAAAGTGGCACCGAGTCGGTGCAGTAACGGCAG | | | | |
| PBS8 | ACTTCTCTGCAGGAGTCAGG | | | | |
| HBB5_corr | CATGGTGCACCTGACTCCTGGTTTTAGAGCTAGAAATAGCAAGTTAAAATAAGG | 21128 | 22 | 17 | 135 |
| Mak_RT22 | CTAGTCCGTTATCAACTTGAAAAAGTGGCACCGAGTCGGTGCGTAACGGCAGAC | | | | |
| PBS17 | TTCTCTGCAGGAGTCAGGTGCACCATG | | | | |
| HBB5_corr | CATGGTGCACCTGACTCCTGGTTTTAGAGCTAGAAATAGCAAGTTAAAATAAGG | 21129 | 22 | 16 | 134 |
| Mak_RT22 | CTAGTCCGTTATCAACTTGAAAAAGTGGCACCGAGTCGGTGCGTAACGGCAGAC | | | | |
| PBS16 | TTCTCTGCAGGAGTCAGGTGCACCAT | | | | |
| HBB5_corr | CATGGTGCACCTGACTCCTGGTTTTAGAGCTAGAAATAGCAAGTTAAAATAAGG | 21130 | 22 | 15 | 133 |
| Mak_RT22 | CTAGTCCGTTATCAACTTGAAAAAGTGGCACCGAGTCGGTGCGTAACGGCAGAC | | | | |
| PBS15 | TTCTCTGCAGGAGTCAGGTGCACCA | | | | |
| HBB5_corr | CATGGTGCACCTGACTCCTGGTTTTAGAGCTAGAAATAGCAAGTTAAAATAAGG | 21131 | 22 | 14 | 132 |
| Mak_RT22 | CTAGTCCGTTATCAACTTGAAAAAGTGGCACCGAGTCGGTGCGTAACGGCAGAC | | | | |
| PBS14 | TTCTCTGCAGGAGTCAGGTGCACC | | | | |
| HBB5_corr | CATGGTGCACCTGACTCCTGGTTTTAGAGCTAGAAATAGCAAGTTAAAATAAGG | 21132 | 22 | 13 | 131 |
| Mak_RT22 | CTAGTCCGTTATCAACTTGAAAAAGTGGCACCGAGTCGGTGCGTAACGGCAGAC | | | | |
| PBS13 | TTCTCTGCAGGAGTCAGGTGCAC | | | | |
| HBB5_corr | CATGGTGCACCTGACTCCTGGTTTTAGAGCTAGAAATAGCAAGTTAAAATAAGG | 21133 | 22 | 12 | 130 |
| Mak_RT22 | CTAGTCCGTTATCAACTTGAAAAAGTGGCACCGAGTCGGTGCGTAACGGCAGAC | | | | |
| PBS12 | TTCTCTGCAGGAGTCAGGTGCA | | | | |
| HBB5_corr | CATGGTGCACCTGACTCCTGGTTTTAGAGCTAGAAATAGCAAGTTAAAATAAGG | 21134 | 22 | 11 | 129 |
| Mak_RT22 | CTAGTCCGTTATCAACTTGAAAAAGTGGCACCGAGTCGGTGCGTAACGGCAGAC | | | | |
| PBS11 | TTCTCTGCAGGAGTCAGGTGC | | | | |
| HBB5_corr | CATGGTGCACCTGACTCCTGGTTTTAGAGCTAGAAATAGCAAGTTAAAATAAGG | 21135 | 22 | 10 | 128 |
| Mak_RT22 | CTAGTCCGTTATCAACTTGAAAAAGTGGCACCGAGTCGGTGCGTAACGGCAGAC | | | | |
| PBS10 | TTCTCTGCAGGAGTCAGGTG | | | | |
| HBB5_corr | CATGGTGCACCTGACTCCTGGTTTTAGAGCTAGAAATAGCAAGTTAAAATAAGG | 21136 | 22 | 9 | 127 |
| Mak_RT22 | CTAGTCCGTTATCAACTTGAAAAAGTGGCACCGAGTCGGTGCGTAACGGCAGAC | | | | |
| PBS9 | TTCTCTGCAGGAGTCAGGT | | | | |
| HBB5_corr | CATGGTGCACCTGACTCCTGGTTTTAGAGCTAGAAATAGCAAGTTAAAATAAGG | 21137 | 22 | 8 | 126 |
| Mak_RT22 | CTAGTCCGTTATCAACTTGAAAAAGTGGCACCGAGTCGGTGCGTAACGGCAGAC | | | | |
| PBS8 | TTCTCTGCAGGAGTCAGG | | | | |
| HBB5_corr | CATGGTGCACCTGACTCCTGGTTTTAGAGCTAGAAATAGCAAGTTAAAATAAGG | 21138 | 21 | 17 | 134 |
| Mak_RT21 | CTAGTCCGTTATCAACTTGAAAAAGTGGCACCGAGTCGGTGCTAACGGCAGACT | | | | |
| PBS17 | TCTCTGCAGGAGTCAGGTGCACCATG | | | | |
| HBB5_corr | CATGGTGCACCTGACTCCTGGTTTTAGAGCTAGAAATAGCAAGTTAAAATAAGG | 21139 | 21 | 16 | 133 |
| Mak_RT21 | CTAGTCCGTTATCAACTTGAAAAAGTGGCACCGAGTCGGTGCTAACGGCAGACT | | | | |
| PBS16 | TCTCTGCAGGAGTCAGGTGCACCAT | | | | |
| HBB5_corr | CATGGTGCACCTGACTCCTGGTTTTAGAGCTAGAAATAGCAAGTTAAAATAAGG | 21140 | 21 | 15 | 132 |
| Mak_RT21 | CTAGTCCGTTATCAACTTGAAAAAGTGGCACCGAGTCGGTGCTAACGGCAGACT | | | | |
| PBS15 | TCTCTGCAGGAGTCAGGTGCACCA | | | | |
| HBB5_corr | CATGGTGCACCTGACTCCTGGTTTTAGAGCTAGAAATAGCAAGTTAAAATAAGG | 21141 | 21 | 14 | 131 |
| Mak_RT21 | CTAGTCCGTTATCAACTTGAAAAAGTGGCACCGAGTCGGTGCTAACGGCAGACT | | | | |
| PBS14 | TCTCTGCAGGAGTCAGGTGCACC | | | | |
| HBB5_corr | CATGGTGCACCTGACTCCTGGTTTTAGAGCTAGAAATAGCAAGTTAAAATAAGG | 21142 | 21 | 13 | 130 |
| Mak_RT21 | CTAGTCCGTTATCAACTTGAAAAAGTGGCACCGAGTCGGTGCTAACGGCAGACT | | | | |
| PBS13 | TCTCTGCAGGAGTCAGGTGCAC | | | | |
| HBB5_corr | CATGGTGCACCTGACTCCTGGTTTTAGAGCTAGAAATAGCAAGTTAAAATAAGG | 21143 | 21 | 12 | 129 |
| Mak_RT21 | CTAGTCCGTTATCAACTTGAAAAAGTGGCACCGAGTCGGTGCTAACGGCAGACT | | | | |
| PBS12 | TCTCTGCAGGAGTCAGGTGCA | | | | |
| HBB5_corr | CATGGTGCACCTGACTCCTGGTTTTAGAGCTAGAAATAGCAAGTTAAAATAAGG | 21144 | 21 | 11 | 128 |
| Mak_RT21 | CTAGTCCGTTATCAACTTGAAAAAGTGGCACCGAGTCGGTGCTAACGGCAGACT | | | | |
| PBS11 | TCTCTGCAGGAGTCAGGTGC | | | | |
| HBB5_corr | CATGGTGCACCTGACTCCTGGTTTTAGAGCTAGAAATAGCAAGTTAAAATAAGG | 21145 | 21 | 10 | 127 |
| Mak_RT21 | CTAGTCCGTTATCAACTTGAAAAAGTGGCACCGAGTCGGTGCTAACGGCAGACT | | | | |
| PBS10 | TCTCTGCAGGAGTCAGGTG | | | | |
| HBB5_corr | CATGGTGCACCTGACTCCTGGTTTTAGAGCTAGAAATAGCAAGTTAAAATAAGG | 21146 | 21 | 9 | 126 |
| Mak_RT21 | CTAGTCCGTTATCAACTTGAAAAAGTGGCACCGAGTCGGTGCTAACGGCAGACT | | | | |
| PBS9 | TCTCTGCAGGAGTCAGGT | | | | |
| HBB5_corr | CATGGTGCACCTGACTCCTGGTTTTAGAGCTAGAAATAGCAAGTTAAAATAAGG | 21147 | 21 | 8 | 125 |
| Mak_RT21 | CTAGTCCGTTATCAACTTGAAAAAGTGGCACCGAGTCGGTGCTAACGGCAGACT | | | | |
| PBS8 | TCTCTGCAGGAGTCAGG | | | | |
| HBB5_corr | CATGGTGCACCTGACTCCTGGTTTTAGAGCTAGAAATAGCAAGTTAAAATAAGG | 21148 | 20 | 17 | 133 |
| Mak_RT20 | CTAGTCCGTTATCAACTTGAAAAAGTGGCACCGAGTCGGTGCAACGGCAGACTT | | | | |
| PBS17 | CTCTGCAGGAGTCAGGTGCACCATG | | | | |
| HBB5_corr | CATGGTGCACCTGACTCCTGGTTTTAGAGCTAGAAATAGCAAGTTAAAATAAGG | 21149 | 20 | 16 | 132 |
| Mak_RT20 | CTAGTCCGTTATCAACTTGAAAAAGTGGCACCGAGTCGGTGCAACGGCAGACTT | | | | |
| PBS16 | CTCTGCAGGAGTCAGGTGCACCAT | | | | |
| HBB5_corr | CATGGTGCACCTGACTCCTGGTTTTAGAGCTAGAAATAGCAAGTTAAAATAAGG | 21150 | 20 | 15 | 131 |
| Mak_RT20 | CTAGTCCGTTATCAACTTGAAAAAGTGGCACCGAGTCGGTGCAACGGCAGACTT | | | | |
| PBS15 | CTCTGCAGGAGTCAGGTGCACCA | | | | |
| HBB5_corr | CATGGTGCACCTGACTCCTGGTTTTAGAGCTAGAAATAGCAAGTTAAAATAAGG | 21151 | 20 | 14 | 130 |
| Mak_RT20 | CTAGTCCGTTATCAACTTGAAAAAGTGGCACCGAGTCGGTGCAACGGCAGACTT | | | | |
| PBS14 | CTCTGCAGGAGTCAGGTGCACC | | | | |
| HBB5_corr | CATGGTGCACCTGACTCCTGGTTTTAGAGCTAGAAATAGCAAGTTAAAATAAGG | 21152 | 20 | 13 | 129 |
| Mak_RT20 | CTAGTCCGTTATCAACTTGAAAAAGTGGCACCGAGTCGGTGCAACGGCAGACTT | | | | |
| PBS13 | CTCTGCAGGAGTCAGGTGCAC | | | | |
| HBB5_corr | CATGGTGCACCTGACTCCTGGTTTTAGAGCTAGAAATAGCAAGTTAAAATAAGG | 21153 | 20 | 12 | 128 |
| Mak_RT20 | CTAGTCCGTTATCAACTTGAAAAAGTGGCACCGAGTCGGTGCAACGGCAGACTT | | | | |
| PBS12 | CTCTGCAGGAGTCAGGTGCA | | | | |
| HBB5_corr | CATGGTGCACCTGACTCCTGGTTTTAGAGCTAGAAATAGCAAGTTAAAATAAGG | 21154 | 20 | 11 | 127 |
| Mak_RT20 | CTAGTCCGTTATCAACTTGAAAAAGTGGCACCGAGTCGGTGCAACGGCAGACTT | | | | |
| PBS11 | CTCTGCAGGAGTCAGGTGC | | | | |
| HBB5_corr | CATGGTGCACCTGACTCCTGGTTTTAGAGCTAGAAATAGCAAGTTAAAATAAGG | 21155 | 20 | 10 | 126 |
| Mak_RT20 | CTAGTCCGTTATCAACTTGAAAAAGTGGCACCGAGTCGGTGCAACGGCAGACTT | | | | |
| PBS10 | CTCTGCAGGAGTCAGGTG | | | | |
| HBB5_corr | CATGGTGCACCTGACTCCTGGTTTTAGAGCTAGAAATAGCAAGTTAAAATAAGG | 21156 | 20 | 9 | 125 |
| Mak_RT20 | CTAGTCCGTTATCAACTTGAAAAAGTGGCACCGAGTCGGTGCAACGGCAGACTT | | | | |
| PBS9 | CTCTGCAGGAGTCAGGT | | | | |
| HBB5_corr | CATGGTGCACCTGACTCCTGGTTTTAGAGCTAGAAATAGCAAGTTAAAATAAGG | 21157 | 20 | 8 | 124 |
| Mak_RT20 | CTAGTCCGTTATCAACTTGAAAAAGTGGCACCGAGTCGGTGCAACGGCAGACTT | | | | |
| PBS8 | CTCTGCAGGAGTCAGG | | | | |
| HBB5_corr | CATGGTGCACCTGACTCCTGGTTTTAGAGCTAGAAATAGCAAGTTAAAATAAGG | 21158 | 19 | 17 | 132 |
| Mak_RT19 | CTAGTCCGTTATCAACTTGAAAAAGTGGCACCGAGTCGGTGCACGGCAGACTTC | | | | |
| PBS17 | TCTGCAGGAGTCAGGTGCACCATG | | | | |
| HBB5_corr | CATGGTGCACCTGACTCCTGGTTTTAGAGCTAGAAATAGCAAGTTAAAATAAGG | 21159 | 19 | 16 | 131 |
| Mak_RT19 | CTAGTCCGTTATCAACTTGAAAAAGTGGCACCGAGTCGGTGCACGGCAGACTTC | | | | |
| PBS16 | TCTGCAGGAGTCAGGTGCACCAT | | | | |
| HBB5_corr | CATGGTGCACCTGACTCCTGGTTTTAGAGCTAGAAATAGCAAGTTAAAATAAGG | 21160 | 19 | 15 | 130 |
| Mak_RT19 | CTAGTCCGTTATCAACTTGAAAAAGTGGCACCGAGTCGGTGCACGGCAGACTTC | | | | |
| PBS15 | TCTGCAGGAGTCAGGTGCACCA | | | | |
| HBB5_corr | CATGGTGCACCTGACTCCTGGTTTTAGAGCTAGAAATAGCAAGTTAAAATAAGG | 21161 | 19 | 14 | 129 |
| Mak_RT19 | CTAGTCCGTTATCAACTTGAAAAAGTGGCACCGAGTCGGTGCACGGCAGACTTC | | | | |
| PBS14 | TCTGCAGGAGTCAGGTGCACC | | | | |
| HBB5_corr | CATGGTGCACCTGACTCCTGGTTTTAGAGCTAGAAATAGCAAGTTAAAATAAGG | 21162 | 19 | 13 | 128 |
| Mak_RT19 | CTAGTCCGTTATCAACTTGAAAAAGTGGCACCGAGTCGGTGCACGGCAGACTTC | | | | |
| PBS13 | TCTGCAGGAGTCAGGTGCAC | | | | |
| HBB5_corr | CATGGTGCACCTGACTCCTGGTTTTAGAGCTAGAAATAGCAAGTTAAAATAAGG | 21163 | 19 | 12 | 127 |
| Mak_RT19 | CTAGTCCGTTATCAACTTGAAAAAGTGGCACCGAGTCGGTGCACGGCAGACTTC | | | | |
| PBS12 | TCTGCAGGAGTCAGGTGCA | | | | |
| HBB5_corr | CATGGTGCACCTGACTCCTGGTTTTAGAGCTAGAAATAGCAAGTTAAAATAAGG | 21164 | 19 | 11 | 126 |
| Mak_RT19 | CTAGTCCGTTATCAACTTGAAAAAGTGGCACCGAGTCGGTGCACGGCAGACTTC | | | | |
| PBS11 | TCTGCAGGAGTCAGGTGC | | | | |
| HBB5_corr | CATGGTGCACCTGACTCCTGGTTTTAGAGCTAGAAATAGCAAGTTAAAATAAGG | 21165 | 19 | 10 | 125 |
| Mak_RT19 | CTAGTCCGTTATCAACTTGAAAAAGTGGCACCGAGTCGGTGCACGGCAGACTTC | | | | |
| PBS10 | TCTGCAGGAGTCAGGTG | | | | |
| HBB5_corr | CATGGTGCACCTGACTCCTGGTTTTAGAGCTAGAAATAGCAAGTTAAAATAAGG | 21166 | 19 | 9 | 124 |
| Mak_RT19 | CTAGTCCGTTATCAACTTGAAAAAGTGGCACCGAGTCGGTGCACGGCAGACTTC | | | | |
| PBS9 | TCTGCAGGAGTCAGGT | | | | |
| HBB5_corr | CATGGTGCACCTGACTCCTGGTTTTAGAGCTAGAAATAGCAAGTTAAAATAAGG | 21167 | 19 | 8 | 123 |
| Mak_RT19 | CTAGTCCGTTATCAACTTGAAAAAGTGGCACCGAGTCGGTGCACGGCAGACTTC | | | | |
| PBS8 | TCTGCAGGAGTCAGG | | | | |
| HBB5_corr | CATGGTGCACCTGACTCCTGGTTTTAGAGCTAGAAATAGCAAGTTAAAATAAGG | 21168 | 18 | 17 | 131 |
| Mak_RT18 | CTAGTCCGTTATCAACTTGAAAAAGTGGCACCGAGTCGGTGCCGGCAGACTTCT | | | | |
| PBS17 | CTGCAGGAGTCAGGTGCACCATG | | | | |
| HBB5_corr | CATGGTGCACCTGACTCCTGGTTTTAGAGCTAGAAATAGCAAGTTAAAATAAGG | 21169 | 18 | 16 | 130 |
| Mak_RT18 | CTAGTCCGTTATCAACTTGAAAAAGTGGCACCGAGTCGGTGCCGGCAGACTTCT | | | | |
| PBS16 | CTGCAGGAGTCAGGTGCACCAT | | | | |
| HBB5_corr | CATGGTGCACCTGACTCCTGGTTTTAGAGCTAGAAATAGCAAGTTAAAATAAGG | 21170 | 18 | 15 | 129 |
| Mak_RT18 | CTAGTCCGTTATCAACTTGAAAAAGTGGCACCGAGTCGGTGCCGGCAGACTTCT | | | | |
| PBS15 | CTGCAGGAGTCAGGTGCACCA | | | | |
| HBB5_corr | CATGGTGCACCTGACTCCTGGTTTTAGAGCTAGAAATAGCAAGTTAAAATAAGG | 21171 | 18 | 14 | 128 |
| Mak_RT18 | CTAGTCCGTTATCAACTTGAAAAAGTGGCACCGAGTCGGTGCCGGCAGACTTCT | | | | |
| PBS14 | CTGCAGGAGTCAGGTGCACC | | | | |
| HBB5_corr | CATGGTGCACCTGACTCCTGGTTTTAGAGCTAGAAATAGCAAGTTAAAATAAGG | 21172 | 18 | 13 | 127 |
| Mak_RT18 | CTAGTCCGTTATCAACTTGAAAAAGTGGCACCGAGTCGGTGCCGGCAGACTTCT | | | | |
| PBS13 | CTGCAGGAGTCAGGTGCAC | | | | |
| HBB5_corr | CATGGTGCACCTGACTCCTGGTTTTAGAGCTAGAAATAGCAAGTTAAAATAAGG | 21173 | 18 | 12 | 126 |
| Mak_RT18 | CTAGTCCGTTATCAACTTGAAAAAGTGGCACCGAGTCGGTGCCGGCAGACTTCT | | | | |
| PBS12 | CTGCAGGAGTCAGGTGCA | | | | |
| HBB5_corr | CATGGTGCACCTGACTCCTGGTTTTAGAGCTAGAAATAGCAAGTTAAAATAAGG | 21174 | 18 | 11 | 125 |
| Mak_RT18 | CTAGTCCGTTATCAACTTGAAAAAGTGGCACCGAGTCGGTGCCGGCAGACTTCT | | | | |
| PBS11 | CTGCAGGAGTCAGGTGC | | | | |
| HBB5_corr | CATGGTGCACCTGACTCCTGGTTTTAGAGCTAGAAATAGCAAGTTAAAATAAGG | 21175 | 18 | 10 | 124 |
| Mak_RT18 | CTAGTCCGTTATCAACTTGAAAAAGTGGCACCGAGTCGGTGCCGGCAGACTTCT | | | | |
| PBS10 | CTGCAGGAGTCAGGTG | | | | |
| HBB5_corr | CATGGTGCACCTGACTCCTGGTTTTAGAGCTAGAAATAGCAAGTTAAAATAAGG | 21176 | 18 | 9 | 123 |
| Mak_RT18 | CTAGTCCGTTATCAACTTGAAAAAGTGGCACCGAGTCGGTGCCGGCAGACTTCT | | | | |
| PBS9 | CTGCAGGAGTCAGGT | | | | |
| HBB5_corr | CATGGTGCACCTGACTCCTGGTTTTAGAGCTAGAAATAGCAAGTTAAAATAAGG | 21177 | 18 | 8 | 122 |
| Mak_RT18 | CTAGTCCGTTATCAACTTGAAAAAGTGGCACCGAGTCGGTGCCGGCAGACTTCT | | | | |
| PBS8 | CTGCAGGAGTCAGG | | | | |
| HBB5_corr | CATGGTGCACCTGACTCCTGGTTTTAGAGCTAGAAATAGCAAGTTAAAATAAGG | 21178 | 17 | 17 | 130 |
| Mak_RT17 | CTAGTCCGTTATCAACTTGAAAAAGTGGCACCGAGTCGGTGCGGCAGACTTCTC | | | | |
| PBS17 | TGCAGGAGTCAGGTGCACCATG | | | | |
| HBB5_corr | CATGGTGCACCTGACTCCTGGTTTTAGAGCTAGAAATAGCAAGTTAAAATAAGG | 21179 | 17 | 16 | 129 |
| Mak_RT17 | CTAGTCCGTTATCAACTTGAAAAAGTGGCACCGAGTCGGTGCGGCAGACTTCTC | | | | |
| PBS16 | TGCAGGAGTCAGGTGCACCAT | | | | |
| HBB5_corr | CATGGTGCACCTGACTCCTGGTTTTAGAGCTAGAAATAGCAAGTTAAAATAAGG | 21180 | 17 | 15 | 128 |
| Mak_RT17 | CTAGTCCGTTATCAACTTGAAAAAGTGGCACCGAGTCGGTGCGGCAGACTTCTC | | | | |
| PBS15 | TGCAGGAGTCAGGTGCACCA | | | | |
| HBB5_corr | CATGGTGCACCTGACTCCTGGTTTTAGAGCTAGAAATAGCAAGTTAAAATAAGG | 21181 | 17 | 14 | 127 |
| Mak_RT17 | CTAGTCCGTTATCAACTTGAAAAAGTGGCACCGAGTCGGTGCGGCAGACTTCTC | | | | |
| PBS14 | TGCAGGAGTCAGGTGCACC | | | | |
| HBB5_corr | CATGGTGCACCTGACTCCTGGTTTTAGAGCTAGAAATAGCAAGTTAAAATAAGG | 21182 | 17 | 13 | 126 |
| Mak_RT17 | CTAGTCCGTTATCAACTTGAAAAAGTGGCACCGAGTCGGTGCGGCAGACTTCTC | | | | |
| PBS13 | TGCAGGAGTCAGGTGCAC | | | | |
| HBB5_corr | CATGGTGCACCTGACTCCTGGTTTTAGAGCTAGAAATAGCAAGTTAAAATAAGG | 21183 | 17 | 12 | 125 |
| Mak_RT17 | CTAGTCCGTTATCAACTTGAAAAAGTGGCACCGAGTCGGTGCGGCAGACTTCTC | | | | |
| PBS12 | TGCAGGAGTCAGGTGCA | | | | |
| HBB5_corr | CATGGTGCACCTGACTCCTGGTTTTAGAGCTAGAAATAGCAAGTTAAAATAAGG | 21184 | 17 | 11 | 124 |
| Mak_RT17 | CTAGTCCGTTATCAACTTGAAAAAGTGGCACCGAGTCGGTGCGGCAGACTTCTC | | | | |
| PBS11 | TGCAGGAGTCAGGTGC | | | | |
| HBB5_corr | CATGGTGCACCTGACTCCTGGTTTTAGAGCTAGAAATAGCAAGTTAAAATAAGG | 21185 | 17 | 10 | 123 |
| Mak_RT17 | CTAGTCCGTTATCAACTTGAAAAAGTGGCACCGAGTCGGTGCGGCAGACTTCTC | | | | |
| PBS10 | TGCAGGAGTCAGGTG | | | | |
| HBB5_corr | CATGGTGCACCTGACTCCTGGTTTTAGAGCTAGAAATAGCAAGTTAAAATAAGG | 21186 | 17 | 9 | 122 |
| Mak_RT17 | CTAGTCCGTTATCAACTTGAAAAAGTGGCACCGAGTCGGTGCGGCAGACTTCTC | | | | |
| PBS9 | TGCAGGAGTCAGGT | | | | |
| HBB5_corr | CATGGTGCACCTGACTCCTGGTTTTAGAGCTAGAAATAGCAAGTTAAAATAAGG | 21187 | 17 | 8 | 121 |
| Mak_RT17 | CTAGTCCGTTATCAACTTGAAAAAGTGGCACCGAGTCGGTGCGGCAGACTTCTC | | | | |
| PBS8 | TGCAGGAGTCAGG | | | | |
| HBB5_corr | CATGGTGCACCTGACTCCTGGTTTTAGAGCTAGAAATAGCAAGTTAAAATAAGG | 21188 | 16 | 17 | 129 |
| Mak_RT16 | CTAGTCCGTTATCAACTTGAAAAAGTGGCACCGAGTCGGTGCGCAGACTTCTCT | | | | |
| PBS17 | GCAGGAGTCAGGTGCACCATG | | | | |
| HBB5_corr | CATGGTGCACCTGACTCCTGGTTTTAGAGCTAGAAATAGCAAGTTAAAATAAGG | 21189 | 16 | 16 | 128 |
| Mak_RT16 | CTAGTCCGTTATCAACTTGAAAAAGTGGCACCGAGTCGGTGCGCAGACTTCTCT | | | | |
| PBS16 | GCAGGAGTCAGGTGCACCAT | | | | |
| HBB5_corr | CATGGTGCACCTGACTCCTGGTTTTAGAGCTAGAAATAGCAAGTTAAAATAAGG | 21190 | 16 | 15 | 127 |
| Mak_RT16 | CTAGTCCGTTATCAACTTGAAAAAGTGGCACCGAGTCGGTGCGCAGACTTCTCT | | | | |
| PBS15 | GCAGGAGTCAGGTGCACCA | | | | |
| HBB5_corr | CATGGTGCACCTGACTCCTGGTTTTAGAGCTAGAAATAGCAAGTTAAAATAAGG | 21191 | 16 | 14 | 126 |
| Mak_RT16 | CTAGTCCGTTATCAACTTGAAAAAGTGGCACCGAGTCGGTGCGCAGACTTCTCT | | | | |
| PBS14 | GCAGGAGTCAGGTGCACC | | | | |
| HBB5_corr | CATGGTGCACCTGACTCCTGGTTTTAGAGCTAGAAATAGCAAGTTAAAATAAGG | 21192 | 16 | 13 | 125 |
| Mak_RT16 | CTAGTCCGTTATCAACTTGAAAAAGTGGCACCGAGTCGGTGCGCAGACTTCTCT | | | | |
| PBS13 | GCAGGAGTCAGGTGCAC | | | | |
| HBB5_corr | CATGGTGCACCTGACTCCTGGTTTTAGAGCTAGAAATAGCAAGTTAAAATAAGG | 21193 | 16 | 12 | 124 |
| Mak_RT16 | CTAGTCCGTTATCAACTTGAAAAAGTGGCACCGAGTCGGTGCGCAGACTTCTCT | | | | |
| PBS12 | GCAGGAGTCAGGTGCA | | | | |
| HBB5_corr | CATGGTGCACCTGACTCCTGGTTTTAGAGCTAGAAATAGCAAGTTAAAATAAGG | 21194 | 16 | 11 | 123 |
| Mak_RT16 | CTAGTCCGTTATCAACTTGAAAAAGTGGCACCGAGTCGGTGCGCAGACTTCTCT | | | | |
| PBS11 | GCAGGAGTCAGGTGC | | | | |
| HBB5_corr | CATGGTGCACCTGACTCCTGGTTTTAGAGCTAGAAATAGCAAGTTAAAATAAGG | 21195 | 16 | 10 | 122 |
| Mak_RT16 | CTAGTCCGTTATCAACTTGAAAAAGTGGCACCGAGTCGGTGCGCAGACTTCTCT | | | | |
| PBS10 | GCAGGAGTCAGGTG | | | | |
| HBB5_corr | CATGGTGCACCTGACTCCTGGTTTTAGAGCTAGAAATAGCAAGTTAAAATAAGG | 21196 | 16 | 9 | 121 |
| Mak_RT16 | CTAGTCCGTTATCAACTTGAAAAAGTGGCACCGAGTCGGTGCGCAGACTTCTCT | | | | |
| PBS9 | GCAGGAGTCAGGT | | | | |
| HBB5_corr | CATGGTGCACCTGACTCCTGGTTTTAGAGCTAGAAATAGCAAGTTAAAATAAGG | 21197 | 16 | 8 | 120 |
| Mak_RT16 | CTAGTCCGTTATCAACTTGAAAAAGTGGCACCGAGTCGGTGCGCAGACTTCTCT | | | | |
| PBS8 | GCAGGAGTCAGG | | | | |
| HBB5_corr | CATGGTGCACCTGACTCCTGGTTTTAGAGCTAGAAATAGCAAGTTAAAATAAGG | 21198 | 15 | 17 | 128 |
| Mak_RT15 | CTAGTCCGTTATCAACTTGAAAAAGTGGCACCGAGTCGGTGCCAGACTTCTCTG | | | | |
| PBS17 | CAGGAGTCAGGTGCACCATG | | | | |
| HBB5_corr | CATGGTGCACCTGACTCCTGGTTTTAGAGCTAGAAATAGCAAGTTAAAATAAGG | 21199 | 15 | 16 | 127 |
| Mak_RT15 | CTAGTCCGTTATCAACTTGAAAAAGTGGCACCGAGTCGGTGCCAGACTTCTCTG | | | | |
| PBS16 | CAGGAGTCAGGTGCACCAT | | | | |
| HBB5_corr | CATGGTGCACCTGACTCCTGGTTTTAGAGCTAGAAATAGCAAGTTAAAATAAGG | 21200 | 15 | 15 | 126 |
| Mak_RT15 | CTAGTCCGTTATCAACTTGAAAAAGTGGCACCGAGTCGGTGCCAGACTTCTCTG | | | | |
| PBS15 | CAGGAGTCAGGTGCACCA | | | | |
| HBB5_corr | CATGGTGCACCTGACTCCTGGTTTTAGAGCTAGAAATAGCAAGTTAAAATAAGG | 21201 | 15 | 14 | 125 |
| Mak_RT15 | CTAGTCCGTTATCAACTTGAAAAAGTGGCACCGAGTCGGTGCCAGACTTCTCTG | | | | |
| PBS14 | CAGGAGTCAGGTGCACC | | | | |
| HBB5_corr | CATGGTGCACCTGACTCCTGGTTTTAGAGCTAGAAATAGCAAGTTAAAATAAGG | 21202 | 15 | 13 | 124 |
| Mak_RT15 | CTAGTCCGTTATCAACTTGAAAAAGTGGCACCGAGTCGGTGCCAGACTTCTCTG | | | | |
| PBS13 | CAGGAGTCAGGTGCAC | | | | |
| HBB5_corr | CATGGTGCACCTGACTCCTGGTTTTAGAGCTAGAAATAGCAAGTTAAAATAAGG | 21203 | 15 | 12 | 123 |
| Mak_RT15 | CTAGTCCGTTATCAACTTGAAAAAGTGGCACCGAGTCGGTGCCAGACTTCTCTG | | | | |
| PBS12 | CAGGAGTCAGGTGCA | | | | |
| HBB5_corr | CATGGTGCACCTGACTCCTGGTTTTAGAGCTAGAAATAGCAAGTTAAAATAAGG | 21204 | 15 | 11 | 122 |
| Mak_RT15 | CTAGTCCGTTATCAACTTGAAAAAGTGGCACCGAGTCGGTGCCAGACTTCTCTG | | | | |
| PBS11 | CAGGAGTCAGGTGC | | | | |
| HBB5_corr | CATGGTGCACCTGACTCCTGGTTTTAGAGCTAGAAATAGCAAGTTAAAATAAGG | 21205 | 15 | 10 | 121 |
| Mak_RT15 | CTAGTCCGTTATCAACTTGAAAAAGTGGCACCGAGTCGGTGCCAGACTTCTCTG | | | | |
| PBS10 | CAGGAGTCAGGTG | | | | |
| HBB5_corr | CATGGTGCACCTGACTCCTGGTTTTAGAGCTAGAAATAGCAAGTTAAAATAAGG | 21206 | 15 | 9 | 120 |
| Mak_RT15 | CTAGTCCGTTATCAACTTGAAAAAGTGGCACCGAGTCGGTGCCAGACTTCTCTG | | | | |
| PBS9 | CAGGAGTCAGGT | | | | |
| HBB5_corr | CATGGTGCACCTGACTCCTGGTTTTAGAGCTAGAAATAGCAAGTTAAAATAAGG | 21207 | 15 | 8 | 119 |
| Mak_RT15 | CTAGTCCGTTATCAACTTGAAAAAGTGGCACCGAGTCGGTGCCAGACTTCTCTG | | | | |
| PBS8 | CAGGAGTCAGG | | | | |
| HBB5_corr | CATGGTGCACCTGACTCCTGGTTTTAGAGCTAGAAATAGCAAGTTAAAATAAGG | 21208 | 14 | 17 | 127 |
| Mak_RT14 | CTAGTCCGTTATCAACTTGAAAAAGTGGCACCGAGTCGGTGCAGACTTCTCTGC | | | | |
| PBS17 | AGGAGTCAGGTGCACCATG | | | | |
| HBB5_corr | CATGGTGCACCTGACTCCTGGTTTTAGAGCTAGAAATAGCAAGTTAAAATAAGG | 21209 | 14 | 16 | 126 |
| Mak_RT14 | CTAGTCCGTTATCAACTTGAAAAAGTGGCACCGAGTCGGTGCAGACTTCTCTGC | | | | |
| PBS16 | AGGAGTCAGGTGCACCAT | | | | |
| HBB5_corr | CATGGTGCACCTGACTCCTGGTTTTAGAGCTAGAAATAGCAAGTTAAAATAAGG | 21210 | 14 | 15 | 125 |
| Mak_RT14 | CTAGTCCGTTATCAACTTGAAAAAGTGGCACCGAGTCGGTGCAGACTTCTCTGC | | | | |
| PBS15 | AGGAGTCAGGTGCACCA | | | | |
| HBB5_corr | CATGGTGCACCTGACTCCTGGTTTTAGAGCTAGAAATAGCAAGTTAAAATAAGG | 21211 | 14 | 14 | 124 |
| Mak_RT14 | CTAGTCCGTTATCAACTTGAAAAAGTGGCACCGAGTCGGTGCAGACTTCTCTGC | | | | |
| PBS14 | AGGAGTCAGGTGCACC | | | | |
| HBB5_corr | CATGGTGCACCTGACTCCTGGTTTTAGAGCTAGAAATAGCAAGTTAAAATAAGG | 21212 | 14 | 13 | 123 |
| Mak_RT14 | CTAGTCCGTTATCAACTTGAAAAAGTGGCACCGAGTCGGTGCAGACTTCTCTGC | | | | |
| PBS13 | AGGAGTCAGGTGCAC | | | | |
| HBB5_corr | CATGGTGCACCTGACTCCTGGTTTTAGAGCTAGAAATAGCAAGTTAAAATAAGG | 21213 | 14 | 12 | 122 |
| Mak_RT14 | CTAGTCCGTTATCAACTTGAAAAAGTGGCACCGAGTCGGTGCAGACTTCTCTGC | | | | |
| PBS12 | AGGAGTCAGGTGCA | | | | |
| HBB5_corr | CATGGTGCACCTGACTCCTGGTTTTAGAGCTAGAAATAGCAAGTTAAAATAAGG | 21214 | 14 | 11 | 121 |
| Mak_RT14 | CTAGTCCGTTATCAACTTGAAAAAGTGGCACCGAGTCGGTGCAGACTTCTCTGC | | | | |
| PBS11 | AGGAGTCAGGTGC | | | | |
| HBB5_corr | CATGGTGCACCTGACTCCTGGTTTTAGAGCTAGAAATAGCAAGTTAAAATAAGG | 21215 | 14 | 10 | 120 |
| Mak_RT14 | CTAGTCCGTTATCAACTTGAAAAAGTGGCACCGAGTCGGTGCAGACTTCTCTGC | | | | |
| PBS10 | AGGAGTCAGGTG | | | | |
| HBB5_corr | CATGGTGCACCTGACTCCTGGTTTTAGAGCTAGAAATAGCAAGTTAAAATAAGG | 21216 | 14 | 9 | 119 |
| Mak_RT14 | CTAGTCCGTTATCAACTTGAAAAAGTGGCACCGAGTCGGTGCAGACTTCTCTGC | | | | |
| PBS9 | AGGAGTCAGGT | | | | |
| HBB5_corr | CATGGTGCACCTGACTCCTGGTTTTAGAGCTAGAAATAGCAAGTTAAAATAAGG | 21217 | 14 | 8 | 118 |
| Mak_RT14 | CTAGTCCGTTATCAACTTGAAAAAGTGGCACCGAGTCGGTGCAGACTTCTCTGC | | | | |
| PBS8 | AGGAGTCAGG | | | | |
| HBB5_corr | CATGGTGCACCTGACTCCTGGTTTTAGAGCTAGAAATAGCAAGTTAAAATAAGG | 21218 | 13 | 17 | 126 |
| Mak_RT13 | CTAGTCCGTTATCAACTTGAAAAAGTGGCACCGAGTCGGTGCGACTTCTCTGCA | | | | |
| PBS17 | GGAGTCAGGTGCACCATG | | | | |
| HBB5_corr | CATGGTGCACCTGACTCCTGGTTTTAGAGCTAGAAATAGCAAGTTAAAATAAGG | 21219 | 13 | 16 | 125 |
| Mak_RT13 | CTAGTCCGTTATCAACTTGAAAAAGTGGCACCGAGTCGGTGCGACTTCTCTGCA | | | | |
| PBS16 | GGAGTCAGGTGCACCAT | | | | |
| HBB5_corr | CATGGTGCACCTGACTCCTGGTTTTAGAGCTAGAAATAGCAAGTTAAAATAAGG | 21220 | 13 | 15 | 124 |
| Mak_RT13 | CTAGTCCGTTATCAACTTGAAAAAGTGGCACCGAGTCGGTGCGACTTCTCTGCA | | | | |
| PBS15 | GGAGTCAGGTGCACCA | | | | |
| HBB5_corr | CATGGTGCACCTGACTCCTGGTTTTAGAGCTAGAAATAGCAAGTTAAAATAAGG | 21221 | 13 | 14 | 123 |
| Mak_RT13 | CTAGTCCGTTATCAACTTGAAAAAGTGGCACCGAGTCGGTGCGACTTCTCTGCA | | | | |
| PBS14 | GGAGTCAGGTGCACC | | | | |
| HBB5_corr | CATGGTGCACCTGACTCCTGGTTTTAGAGCTAGAAATAGCAAGTTAAAATAAGG | 21222 | 13 | 13 | 122 |
| Mak_RT13 | CTAGTCCGTTATCAACTTGAAAAAGTGGCACCGAGTCGGTGCGACTTCTCTGCA | | | | |
| PBS13 | GGAGTCAGGTGCAC | | | | |
| HBB5_corr | CATGGTGCACCTGACTCCTGGTTTTAGAGCTAGAAATAGCAAGTTAAAATAAGG | 21223 | 13 | 12 | 121 |
| Mak_RT13 | CTAGTCCGTTATCAACTTGAAAAAGTGGCACCGAGTCGGTGCGACTTCTCTGCA | | | | |
| PBS12 | GGAGTCAGGTGCA | | | | |
| HBB5_corr | CATGGTGCACCTGACTCCTGGTTTTAGAGCTAGAAATAGCAAGTTAAAATAAGG | 21224 | 13 | 11 | 120 |
| Mak_RT13 | CTAGTCCGTTATCAACTTGAAAAAGTGGCACCGAGTCGGTGCGACTTCTCTGCA | | | | |
| PBS11 | GGAGTCAGGTGC | | | | |
| HBB5_corr | CATGGTGCACCTGACTCCTGGTTTTAGAGCTAGAAATAGCAAGTTAAAATAAGG | 21225 | 13 | 10 | 119 |
| Mak_RT13 | CTAGTCCGTTATCAACTTGAAAAAGTGGCACCGAGTCGGTGCGACTTCTCTGCA | | | | |
| PBS10 | GGAGTCAGGTG | | | | |
| HBB5_corr | CATGGTGCACCTGACTCCTGGTTTTAGAGCTAGAAATAGCAAGTTAAAATAAGG | 21226 | 13 | 9 | 118 |
| 1 | CTAGTCCGTTATCAACTTGAAAAAGTGGCACCGAGTCGGTGCGACTTCTCTGCA | | | | |
| Mak_RT13 | GGAGTCAGGT | | | | |
| PBS9 | | | | | |
| HBB5_corr | CATGGTGCACCTGACTCCTGGTTTTAGAGCTAGAAATAGCAAGTTAAAATAAGG | 21227 | 13 | 8 | 117 |
| Mak_RT13 | CTAGTCCGTTATCAACTTGAAAAAGTGGCACCGAGTCGGTGCGACTTCTCTGCA | | | | |
| PBS8 | GGAGTCAGG | | | | |
| HBB5_corr | CATGGTGCACCTGACTCCTGGTTTTAGAGCTAGAAATAGCAAGTTAAAATAAGG | 21228 | 12 | 17 | 125 |
| Mak_RT12 | CTAGTCCGTTATCAACTTGAAAAAGTGGCACCGAGTCGGTGCACTTCTCTGCAG | | | | |
| PBS17 | GAGTCAGGTGCACCATG | | | | |
| HBB5_corr | CATGGTGCACCTGACTCCTGGTTTTAGAGCTAGAAATAGCAAGTTAAAATAAGG | 21229 | 12 | 16 | 124 |
| Mak_RT12 | CTAGTCCGTTATCAACTTGAAAAAGTGGCACCGAGTCGGTGCACTTCTCTGCAG | | | | |
| PBS16 | GAGTCAGGTGCACCAT | | | | |
| HBB5_corr | CATGGTGCACCTGACTCCTGGTTTTAGAGCTAGAAATAGCAAGTTAAAATAAGG | 21230 | 12 | 15 | 123 |
| Mak_RT12 | CTAGTCCGTTATCAACTTGAAAAAGTGGCACCGAGTCGGTGCACTTCTCTGCAG | | | | |
| PBS15 | GAGTCAGGTGCACCA | | | | |
| HBB5_corr | CATGGTGCACCTGACTCCTGGTTTTAGAGCTAGAAATAGCAAGTTAAAATAAGG | 21231 | 12 | 14 | 122 |
| Mak_RT12 | CTAGTCCGTTATCAACTTGAAAAAGTGGCACCGAGTCGGTGCACTTCTCTGCAG | | | | |
| PBS14 | GAGTCAGGTGCACC | | | | |
| HBB5_corr | CATGGTGCACCTGACTCCTGGTTTTAGAGCTAGAAATAGCAAGTTAAAATAAGG | 21232 | 12 | 13 | 121 |
| Mak_RT12 | CTAGTCCGTTATCAACTTGAAAAAGTGGCACCGAGTCGGTGCACTTCTCTGCAG | | | | |
| PBS13 | GAGTCAGGTGCAC | | | | |
| HBB5_corr | CATGGTGCACCTGACTCCTGGTTTTAGAGCTAGAAATAGCAAGTTAAAATAAGG | 21233 | 12 | 12 | 120 |
| Mak_RT12 | CTAGTCCGTTATCAACTTGAAAAAGTGGCACCGAGTCGGTGCACTTCTCTGCAG | | | | |
| PBS12 | GAGTCAGGTGCA | | | | |
| HBB5_corr | CATGGTGCACCTGACTCCTGGTTTTAGAGCTAGAAATAGCAAGTTAAAATAAGG | 21234 | 12 | 11 | 119 |
| Mak_RT12 | CTAGTCCGTTATCAACTTGAAAAAGTGGCACCGAGTCGGTGCACTTCTCTGCAG | | | | |
| PBS11 | GAGTCAGGTGC | | | | |
| HBB5_corr | CATGGTGCACCTGACTCCTGGTTTTAGAGCTAGAAATAGCAAGTTAAAATAAGG | 21235 | 12 | 10 | 118 |
| Mak_RT12 | CTAGTCCGTTATCAACTTGAAAAAGTGGCACCGAGTCGGTGCACTTCTCTGCAG | | | | |
| PBS10 | GAGTCAGGTG | | | | |
| HBB5_corr | CATGGTGCACCTGACTCCTGGTTTTAGAGCTAGAAATAGCAAGTTAAAATAAGG | 21236 | 12 | 9 | 117 |
| Mak_RT12 | CTAGTCCGTTATCAACTTGAAAAAGTGGCACCGAGTCGGTGCACTTCTCTGCAG | | | | |
| PBS9 | GAGTCAGGT | | | | |
| HBB5_corr | CATGGTGCACCTGACTCCTGGTTTTAGAGCTAGAAATAGCAAGTTAAAATAAGG | 21237 | 12 | 8 | 116 |
| Mak_RT12 | CTAGTCCGTTATCAACTTGAAAAAGTGGCACCGAGTCGGTGCACTTCTCTGCAG | | | | |
| PBS8 | GAGTCAGG | | | | |
| HBB5_corr | CATGGTGCACCTGACTCCTGGTTTTAGAGCTAGAAATAGCAAGTTAAAATAAGG | 21238 | 11 | 17 | 124 |
| Mak_RT11 | CTAGTCCGTTATCAACTTGAAAAAGTGGCACCGAGTCGGTGCCTTCTCTGCAGG | | | | |
| PBS17 | AGTCAGGTGCACCATG | | | | |
| HBB5_corr | CATGGTGCACCTGACTCCTGGTTTTAGAGCTAGAAATAGCAAGTTAAAATAAGG | 21239 | 11 | 16 | 123 |
| Mak_RT11 | CTAGTCCGTTATCAACTTGAAAAAGTGGCACCGAGTCGGTGCCTTCTCTGCAGG | | | | |
| PBS16 | AGTCAGGTGCACCAT | | | | |
| HBB5_corr | CATGGTGCACCTGACTCCTGGTTTTAGAGCTAGAAATAGCAAGTTAAAATAAGG | 21240 | 11 | 15 | 122 |
| Mak_RT11 | CTAGTCCGTTATCAACTTGAAAAAGTGGCACCGAGTCGGTGCCTTCTCTGCAGG | | | | |
| PBS15 | AGTCAGGTGCACCA | | | | |
| HBB5_corr | CATGGTGCACCTGACTCCTGGTTTTAGAGCTAGAAATAGCAAGTTAAAATAAGG | 21241 | 11 | 14 | 121 |
| Mak_RT11 | CTAGTCCGTTATCAACTTGAAAAAGTGGCACCGAGTCGGTGCCTTCTCTGCAGG | | | | |
| PBS14 | AGTCAGGTGCACC | | | | |
| HBB5_corr | CATGGTGCACCTGACTCCTGGTTTTAGAGCTAGAAATAGCAAGTTAAAATAAGG | 21242 | 11 | 13 | 120 |
| Mak_RT11 | CTAGTCCGTTATCAACTTGAAAAAGTGGCACCGAGTCGGTGCCTTCTCTGCAGG | | | | |
| PBS13 | AGTCAGGTGCAC | | | | |
| HBB5_corr | CATGGTGCACCTGACTCCTGGTTTTAGAGCTAGAAATAGCAAGTTAAAATAAGG | 21243 | 11 | 12 | 119 |
| Mak_RT11 | CTAGTCCGTTATCAACTTGAAAAAGTGGCACCGAGTCGGTGCCTTCTCTGCAGG | | | | |
| PBS12 | AGTCAGGTGCA | | | | |
| HBB5_corr | CATGGTGCACCTGACTCCTGGTTTTAGAGCTAGAAATAGCAAGTTAAAATAAGG | 21244 | 11 | 11 | 118 |
| Mak_RT11 | CTAGTCCGTTATCAACTTGAAAAAGTGGCACCGAGTCGGTGCCTTCTCTGCAGG | | | | |
| PBS11 | AGTCAGGTGC | | | | |
| HBB5_corr | CATGGTGCACCTGACTCCTGGTTTTAGAGCTAGAAATAGCAAGTTAAAATAAGG | 21245 | 11 | 10 | 117 |
| Mak_RT11 | CTAGTCCGTTATCAACTTGAAAAAGTGGCACCGAGTCGGTGCCTTCTCTGCAGG | | | | |
| PBS10 | AGTCAGGTG | | | | |
| HBB5_corr | CATGGTGCACCTGACTCCTGGTTTTAGAGCTAGAAATAGCAAGTTAAAATAAGG | 21246 | 11 | 9 | 116 |
| Mak_RT11 | CTAGTCCGTTATCAACTTGAAAAAGTGGCACCGAGTCGGTGCCTTCTCTGCAGG | | | | |
| PBS9 | AGTCAGGT | | | | |
| HBB5_corr | CATGGTGCACCTGACTCCTGGTTTTAGAGCTAGAAATAGCAAGTTAAAATAAGG | 21247 | 11 | 8 | 115 |
| Mak_RT11 | CTAGTCCGTTATCAACTTGAAAAAGTGGCACCGAGTCGGTGCCTTCTCTGCAGG | | | | |
| PBS8 | AGTCAGG | | | | |
| HBB5_corr | CATGGTGCACCTGACTCCTGGTTTTAGAGCTAGAAATAGCAAGTTAAAATAAGG | 21248 | 10 | 17 | 123 |
| Mak_RT10 | CTAGTCCGTTATCAACTTGAAAAAGTGGCACCGAGTCGGTGCTTCTCTGCAGGA | | | | |
| PBS17 | GTCAGGTGCACCATG | | | | |
| HBB5_corr | CATGGTGCACCTGACTCCTGGTTTTAGAGCTAGAAATAGCAAGTTAAAATAAGG | 21249 | 10 | 16 | 122 |
| Mak_RT10 | CTAGTCCGTTATCAACTTGAAAAAGTGGCACCGAGTCGGTGCTTCTCTGCAGGA | | | | |
| PBS16 | GTCAGGTGCACCAT | | | | |
| HBB5_corr | CATGGTGCACCTGACTCCTGGTTTTAGAGCTAGAAATAGCAAGTTAAAATAAGG | 21250 | 10 | 15 | 121 |
| Mak_RT10 | CTAGTCCGTTATCAACTTGAAAAAGTGGCACCGAGTCGGTGCTTCTCTGCAGGA | | | | |
| PBS15 | GTCAGGTGCACCA | | | | |
| HBB5_corr | CATGGTGCACCTGACTCCTGGTTTTAGAGCTAGAAATAGCAAGTTAAAATAAGG | 21251 | 10 | 14 | 120 |
| Mak_RT10 | CTAGTCCGTTATCAACTTGAAAAAGTGGCACCGAGTCGGTGCTTCTCTGCAGGA | | | | |
| PBS14 | GTCAGGTGCACC | | | | |
| HBB5_corr | CATGGTGCACCTGACTCCTGGTTTTAGAGCTAGAAATAGCAAGTTAAAATAAGG | 21252 | 10 | 13 | 119 |
| Mak_RT10 | CTAGTCCGTTATCAACTTGAAAAAGTGGCACCGAGTCGGTGCTTCTCTGCAGGA | | | | |
| PBS13 | GTCAGGTGCAC | | | | |
| HBB5_corr | CATGGTGCACCTGACTCCTGGTTTTAGAGCTAGAAATAGCAAGTTAAAATAAGG | 21253 | 10 | 12 | 118 |
| Mak_RT10 | CTAGTCCGTTATCAACTTGAAAAAGTGGCACCGAGTCGGTGCTTCTCTGCAGGA | | | | |
| PBS12 | GTCAGGTGCA | | | | |
| HBB5_corr | CATGGTGCACCTGACTCCTGGTTTTAGAGCTAGAAATAGCAAGTTAAAATAAGG | 21254 | 10 | 11 | 117 |
| Mak_RT10 | CTAGTCCGTTATCAACTTGAAAAAGTGGCACCGAGTCGGTGCTTCTCTGCAGGA | | | | |
| PBS11 | GTCAGGTGC | | | | |
| HBB5_corr | CATGGTGCACCTGACTCCTGGTTTTAGAGCTAGAAATAGCAAGTTAAAATAAGG | 21255 | 10 | 10 | 116 |
| Mak_RT10 | CTAGTCCGTTATCAACTTGAAAAAGTGGCACCGAGTCGGTGCTTCTCTGCAGGA | | | | |
| PBS10 | GTCAGGTG | | | | |
| HBB5_corr | CATGGTGCACCTGACTCCTGGTTTTAGAGCTAGAAATAGCAAGTTAAAATAAGG | 21256 | 10 | 9 | 115 |
| Mak_RT10 | CTAGTCCGTTATCAACTTGAAAAAGTGGCACCGAGTCGGTGCTTCTCTGCAGGA | | | | |
| PBS9 | GTCAGGT | | | | |
| HBB5_corr | CATGGTGCACCTGACTCCTGGTTTTAGAGCTAGAAATAGCAAGTTAAAATAAGG | 21257 | 10 | 8 | 114 |
| Mak_RT10 | CTAGTCCGTTATCAACTTGAAAAAGTGGCACCGAGTCGGTGCTTCTCTGCAGGA | | | | |
| PBS8 | GTCAGG | | | | |
| HBB5_corr | CATGGTGCACCTGACTCCTGGTTTTAGAGCTAGAAATAGCAAGTTAAAATAAGG | 21258 | 9 | 17 | 122 |
| Mak_RT9_P | CTAGTCCGTTATCAACTTGAAAAAGTGGCACCGAGTCGGTGCTCTCTGCAGGAG | | | | |
| BS17 | TCAGGTGCACCATG | | | | |
| HBB5_corr | CATGGTGCACCTGACTCCTGGTTTTAGAGCTAGAAATAGCAAGTTAAAATAAGG | 21259 | 9 | 16 | 121 |
| Mak_RT9_P | CTAGTCCGTTATCAACTTGAAAAAGTGGCACCGAGTCGGTGCTCTCTGCAGGAG | | | | |
| BS16 | TCAGGTGCACCAT | | | | |
| HBB5_corr | CATGGTGCACCTGACTCCTGGTTTTAGAGCTAGAAATAGCAAGTTAAAATAAGG | 21260 | 9 | 15 | 120 |
| Mak_RT9_P | CTAGTCCGTTATCAACTTGAAAAAGTGGCACCGAGTCGGTGCTCTCTGCAGGAG | | | | |
| BS15 | TCAGGTGCACCA | | | | |
| HBB5_corr | CATGGTGCACCTGACTCCTGGTTTTAGAGCTAGAAATAGCAAGTTAAAATAAGG | 21261 | 9 | 14 | 119 |
| Mak_RT9_P | CTAGTCCGTTATCAACTTGAAAAAGTGGCACCGAGTCGGTGCTCTCTGCAGGAG | | | | |
| BS14 | TCAGGTGCACC | | | | |
| HBB5_corr | CATGGTGCACCTGACTCCTGGTTTTAGAGCTAGAAATAGCAAGTTAAAATAAGG | 21262 | 9 | 13 | 118 |
| Mak_RT9_P | CTAGTCCGTTATCAACTTGAAAAAGTGGCACCGAGTCGGTGCTCTCTGCAGGAG | | | | |
| BS13 | TCAGGTGCAC | | | | |
| HBB5_corr | CATGGTGCACCTGACTCCTGGTTTTAGAGCTAGAAATAGCAAGTTAAAATAAGG | 21263 | 9 | 12 | 117 |
| Mak_RT9_P | CTAGTCCGTTATCAACTTGAAAAAGTGGCACCGAGTCGGTGCTCTCTGCAGGAG | | | | |
| BS12 | TCAGGTGCA | | | | |
| HBB5_corr | CATGGTGCACCTGACTCCTGGTTTTAGAGCTAGAAATAGCAAGTTAAAATAAGG | 21264 | 9 | 11 | 116 |
| Mak_RT9_P | CTAGTCCGTTATCAACTTGAAAAAGTGGCACCGAGTCGGTGCTCTCTGCAGGAG | | | | |
| BS11 | TCAGGTGC | | | | |
| HBB5_corr | CATGGTGCACCTGACTCCTGGTTTTAGAGCTAGAAATAGCAAGTTAAAATAAGG | 21265 | 9 | 10 | 115 |
| Mak_RT9_P | CTAGTCCGTTATCAACTTGAAAAAGTGGCACCGAGTCGGTGCTCTCTGCAGGAG | | | | |
| BS10 | TCAGGTG | | | | |
| HBB5_corr | CATGGTGCACCTGACTCCTGGTTTTAGAGCTAGAAATAGCAAGTTAAAATAAGG | 21266 | 9 | 9 | 114 |
| Mak_RT9_P | CTAGTCCGTTATCAACTTGAAAAAGTGGCACCGAGTCGGTGCTCTCTGCAGGAG | | | | |
| BS9 | TCAGGT | | | | |
| HBB5_corr | CATGGTGCACCTGACTCCTGGTTTTAGAGCTAGAAATAGCAAGTTAAAATAAGG | 21267 | 9 | 8 | 113 |
| Mak_RT9_P | CTAGTCCGTTATCAACTTGAAAAAGTGGCACCGAGTCGGTGCTCTCTGCAGGAG | | | | |
| BS8 | TCAGG | | | | |
| HBB5_corr | CATGGTGCACCTGACTCCTGGTTTTAGAGCTAGAAATAGCAAGTTAAAATAAGG | 21268 | 8 | 17 | 121 |
| Mak_RT8_P | CTAGTCCGTTATCAACTTGAAAAAGTGGCACCGAGTCGGTGCCTCTGCAGGAGT | | | | |
| BS17 | CAGGTGCACCATG | | | | |
| HBB5_corr | CATGGTGCACCTGACTCCTGGTTTTAGAGCTAGAAATAGCAAGTTAAAATAAGG | 21269 | 8 | 16 | 120 |
| Mak_RT8_P | CTAGTCCGTTATCAACTTGAAAAAGTGGCACCGAGTCGGTGCCTCTGCAGGAGT | | | | |
| BS16 | CAGGTGCACCAT | | | | |
| HBB5_corr | CATGGTGCACCTGACTCCTGGTTTTAGAGCTAGAAATAGCAAGTTAAAATAAGG | 21270 | 8 | 15 | 119 |
| Mak_RT8_P | CTAGTCCGTTATCAACTTGAAAAAGTGGCACCGAGTCGGTGCCTCTGCAGGAGT | | | | |
| BS15 | CAGGTGCACCA | | | | |
| HBB5_corr | CATGGTGCACCTGACTCCTGGTTTTAGAGCTAGAAATAGCAAGTTAAAATAAGG | 21271 | 8 | 14 | 118 |
| Mak_RT8_P | CTAGTCCGTTATCAACTTGAAAAAGTGGCACCGAGTCGGTGCCTCTGCAGGAGT | | | | |
| BS14 | CAGGTGCACC | | | | |
| HBB5_corr | CATGGTGCACCTGACTCCTGGTTTTAGAGCTAGAAATAGCAAGTTAAAATAAGG | 21272 | 8 | 13 | 117 |
| Mak_RT8_P | CTAGTCCGTTATCAACTTGAAAAAGTGGCACCGAGTCGGTGCCTCTGCAGGAGT | | | | |
| BS13 | CAGGTGCAC | | | | |
| HBB5_corr | CATGGTGCACCTGACTCCTGGTTTTAGAGCTAGAAATAGCAAGTTAAAATAAGG | 21273 | 8 | 12 | 116 |
| Mak_RT8_P | CTAGTCCGTTATCAACTTGAAAAAGTGGCACCGAGTCGGTGCCTCTGCAGGAGT | | | | |
| BS12 | CAGGTGCA | | | | |
| HBB5_corr | CATGGTGCACCTGACTCCTGGTTTTAGAGCTAGAAATAGCAAGTTAAAATAAGG | 21274 | 8 | 11 | 115 |
| Mak_RT8_P | CTAGTCCGTTATCAACTTGAAAAAGTGGCACCGAGTCGGTGCCTCTGCAGGAGT | | | | |
| BS11 | CAGGTGC | | | | |
| HBB5_corr | CATGGTGCACCTGACTCCTGGTTTTAGAGCTAGAAATAGCAAGTTAAAATAAGG | 21275 | 8 | 10 | 114 |
| Mak_RT8_P | CTAGTCCGTTATCAACTTGAAAAAGTGGCACCGAGTCGGTGCCTCTGCAGGAGT | | | | |
| BS10 | CAGGTG | | | | |
| HBB5_corr | CATGGTGCACCTGACTCCTGGTTTTAGAGCTAGAAATAGCAAGTTAAAATAAGG | 21276 | 8 | 9 | 113 |
| Mak_RT8_P | CTAGTCCGTTATCAACTTGAAAAAGTGGCACCGAGTCGGTGCCTCTGCAGGAGT | | | | |
| BS9 | CAGGT | | | | |
| HBB5_corr | CATGGTGCACCTGACTCCTGGTTTTAGAGCTAGAAATAGCAAGTTAAAATAAGG | 21277 | 8 | 8 | 112 |
| Mak_RT8_P | CTAGTCCGTTATCAACTTGAAAAAGTGGCACCGAGTCGGTGCCTCTGCAGGAGT | | | | |
| BS8 | CAGG | | | | |

TABLE 5C
Exemplary template RNA sequences
Table 5C provides design of exemplary DNA components of gene modifying systems for
correcting the pathogenic E6V mutation in HBB to the wild-type form. This table
details the sequence of a complete template RNA for use in exemplary gene modifying
systems comprising a gene modifying polypeptide. Templates in this table employ the
HBB8 spacer (GTAACGGCAGACTTCTCCAC SEQ ID NO: 19971) and a gRNA scaffold sequence of
GTTTTAGAGCTAGAAATAGCAAGTTAAAATAAGGCTAGTCCGTTATCAACTTGAAAAAGTGGCACCGAGTCGGTGC
(SEQ ID NO: 20923). For exemplification, the lengths of the RT (heterologous object)
sequences and PBS sequences were varied at the 3′ end. The length of these respective
sequences is reflected in columns 3 and 4, respectively. The longest form of the RT
sequence is CCATGGTGCACCTGACTCCTGAG (SEQ ID NO: 20956). The longest form of the PBS
is GAGAAGTCTGCCGTTAC (SEQ ID NO: 20957).

| | | SEQ | | | |
|---|---|---|---|---|---|
| Sequence | | ID | RT | PBS | Total |
| Name | Full DNA sequence | NO | length | length | length |
| HBB8_corr | GTAACGGCAGACTTCTCCACGTTTTAGAGCTAGAAATAGCAAGTTAAAATAAGGC | 21278 | 23 | 17 | 136 |
| WT_RT23_PB | TAGTCCGTTATCAACTTGAAAAAGTGGCACCGAGTCGGTGCCCATGGTGCACCTG | | | | |
| S17 | ACTCCTGAGGAGAAGTCTGCCGTTAC | | | | |
| HBB8_corr | GTAACGGCAGACTTCTCCACGTTTTAGAGCTAGAAATAGCAAGTTAAAATAAGGC | 21279 | 23 | 16 | 135 |
| WT_RT23_PB | TAGTCCGTTATCAACTTGAAAAAGTGGCACCGAGTCGGTGCCCATGGTGCACCTG | | | | |
| S16 | ACTCCTGAGGAGAAGTCTGCCGTTA | | | | |
| HBB8_corr | GTAACGGCAGACTTCTCCACGTTTTAGAGCTAGAAATAGCAAGTTAAAATAAGGC | 21280 | 23 | 15 | 134 |
| WT_RT23_PB | TAGTCCGTTATCAACTTGAAAAAGTGGCACCGAGTCGGTGCCCATGGTGCACCTG | | | | |
| S15 | ACTCCTGAGGAGAAGTCTGCCGTT | | | | |
| HBB8_corr | GTAACGGCAGACTTCTCCACGTTTTAGAGCTAGAAATAGCAAGTTAAAATAAGGC | 21281 | 23 | 14 | 133 |
| WT_RT23_PB | TAGTCCGTTATCAACTTGAAAAAGTGGCACCGAGTCGGTGCCCATGGTGCACCTG | | | | |
| S14 | ACTCCTGAGGAGAAGTCTGCCGT | | | | |
| HBB8_corr | GTAACGGCAGACTTCTCCACGTTTTAGAGCTAGAAATAGCAAGTTAAAATAAGGC | 21282 | 23 | 13 | 132 |
| WT_RT23_PB | TAGTCCGTTATCAACTTGAAAAAGTGGCACCGAGTCGGTGCCCATGGTGCACCTG | | | | |
| S13 | ACTCCTGAGGAGAAGTCTGCCG | | | | |
| HBB8_corr | GTAACGGCAGACTTCTCCACGTTTTAGAGCTAGAAATAGCAAGTTAAAATAAGGC | 21283 | 23 | 12 | 131 |
| WT_RT23_PB | TAGTCCGTTATCAACTTGAAAAAGTGGCACCGAGTCGGTGCCCATGGTGCACCTG | | | | |
| S12 | ACTCCTGAGGAGAAGTCTGCC | | | | |
| HBB8_corr | GTAACGGCAGACTTCTCCACGTTTTAGAGCTAGAAATAGCAAGTTAAAATAAGGC | 21284 | 23 | 11 | 130 |
| WT_RT23_PB | TAGTCCGTTATCAACTTGAAAAAGTGGCACCGAGTCGGTGCCCATGGTGCACCTG | | | | |
| S11 | ACTCCTGAGGAGAAGTCTGC | | | | |
| HBB8_corr | GTAACGGCAGACTTCTCCACGTTTTAGAGCTAGAAATAGCAAGTTAAAATAAGGC | 21285 | 23 | 10 | 129 |
| WT_RT23_PB | TAGTCCGTTATCAACTTGAAAAAGTGGCACCGAGTCGGTGCCCATGGTGCACCTG | | | | |
| S10 | ACTCCTGAGGAGAAGTCTG | | | | |
| HBB8_corr | GTAACGGCAGACTTCTCCACGTTTTAGAGCTAGAAATAGCAAGTTAAAATAAGGC | 21286 | 23 | 9 | 128 |
| WT_RT23_PB | TAGTCCGTTATCAACTTGAAAAAGTGGCACCGAGTCGGTGCCCATGGTGCACCTG | | | | |
| S9 | ACTCCTGAGGAGAAGTCT | | | | |
| HBB8_corr | GTAACGGCAGACTTCTCCACGTTTTAGAGCTAGAAATAGCAAGTTAAAATAAGGC | 21287 | 23 | 8 | 127 |
| WT_RT23_PB | TAGTCCGTTATCAACTTGAAAAAGTGGCACCGAGTCGGTGCCCATGGTGCACCTG | | | | |
| S8 | ACTCCTGAGGAGAAGTC | | | | |
| HBB8_corr | GTAACGGCAGACTTCTCCACGTTTTAGAGCTAGAAATAGCAAGTTAAAATAAGGC | 21288 | 22 | 17 | 135 |
| WT_RT22_PB | TAGTCCGTTATCAACTTGAAAAAGTGGCACCGAGTCGGTGCCATGGTGCACCTGA | | | | |
| S17 | CTCCTGAGGAGAAGTCTGCCGTTAC | | | | |
| HBB8_corr | GTAACGGCAGACTTCTCCACGTTTTAGAGCTAGAAATAGCAAGTTAAAATAAGGC | 21289 | 22 | 16 | 134 |
| WT_RT22_PB | TAGTCCGTTATCAACTTGAAAAAGTGGCACCGAGTCGGTGCCATGGTGCACCTGA | | | | |
| S16 | CTCCTGAGGAGAAGTCTGCCGTTA | | | | |
| HBB8_corr | GTAACGGCAGACTTCTCCACGTTTTAGAGCTAGAAATAGCAAGTTAAAATAAGGC | 21290 | 22 | 15 | 133 |
| WT_RT22_PB | TAGTCCGTTATCAACTTGAAAAAGTGGCACCGAGTCGGTGCCATGGTGCACCTGA | | | | |
| S15 | CTCCTGAGGAGAAGTCTGCCGTT | | | | |
| HBB8_corr | GTAACGGCAGACTTCTCCACGTTTTAGAGCTAGAAATAGCAAGTTAAAATAAGGC | 21291 | 22 | 14 | 132 |
| WT_RT22_PB | TAGTCCGTTATCAACTTGAAAAAGTGGCACCGAGTCGGTGCCATGGTGCACCTGA | | | | |
| S14 | CTCCTGAGGAGAAGTCTGCCGT | | | | |
| HBB8_corr | GTAACGGCAGACTTCTCCACGTTTTAGAGCTAGAAATAGCAAGTTAAAATAAGGC | 21292 | 22 | 13 | 131 |
| WT_RT22_PB | TAGTCCGTTATCAACTTGAAAAAGTGGCACCGAGTCGGTGCCATGGTGCACCTGA | | | | |
| S13 | CTCCTGAGGAGAAGTCTGCCG | | | | |
| HBB8_corr | GTAACGGCAGACTTCTCCACGTTTTAGAGCTAGAAATAGCAAGTTAAAATAAGGC | 21293 | 22 | 12 | 130 |
| WT_RT22_PB | TAGTCCGTTATCAACTTGAAAAAGTGGCACCGAGTCGGTGCCATGGTGCACCTGA | | | | |
| S12 | CTCCTGAGGAGAAGTCTGCC | | | | |
| HBB8_corr | GTAACGGCAGACTTCTCCACGTTTTAGAGCTAGAAATAGCAAGTTAAAATAAGGC | 21294 | 22 | 11 | 129 |
| WT_RT22_PB | TAGTCCGTTATCAACTTGAAAAAGTGGCACCGAGTCGGTGCCATGGTGCACCTGA | | | | |
| S11 | CTCCTGAGGAGAAGTCTGC | | | | |
| HBB8_corr | GTAACGGCAGACTTCTCCACGTTTTAGAGCTAGAAATAGCAAGTTAAAATAAGGC | 21295 | 22 | 10 | 128 |
| WT_RT22_PB | TAGTCCGTTATCAACTTGAAAAAGTGGCACCGAGTCGGTGCCATGGTGCACCTGA | | | | |
| S10 | CTCCTGAGGAGAAGTCTG | | | | |
| HBB8_corr | GTAACGGCAGACTTCTCCACGTTTTAGAGCTAGAAATAGCAAGTTAAAATAAGGC | 21296 | 22 | 9 | 127 |
| WT_RT22_PB | TAGTCCGTTATCAACTTGAAAAAGTGGCACCGAGTCGGTGCCATGGTGCACCTGA | | | | |
| S9 | CTCCTGAGGAGAAGTCT | | | | |
| HBB8_corr | GTAACGGCAGACTTCTCCACGTTTTAGAGCTAGAAATAGCAAGTTAAAATAAGGC | 21297 | 22 | 8 | 126 |
| WT_RT22_PB | TAGTCCGTTATCAACTTGAAAAAGTGGCACCGAGTCGGTGCCATGGTGCACCTGA | | | | |
| S8 | CTCCTGAGGAGAAGTC | | | | |
| HBB8_corr | GTAACGGCAGACTTCTCCACGTTTTAGAGCTAGAAATAGCAAGTTAAAATAAGGC | 21298 | 21 | 17 | 134 |
| WT_RT21_PB | TAGTCCGTTATCAACTTGAAAAAGTGGCACCGAGTCGGTGCATGGTGCACCTGACT | | | | |
| S17 | CCTGAGGAGAAGTCTGCCGTTAC | | | | |
| HBB8_corr | GTAACGGCAGACTTCTCCACGTTTTAGAGCTAGAAATAGCAAGTTAAAATAAGGC | 21299 | 21 | 16 | 133 |
| WT_RT21_PB | TAGTCCGTTATCAACTTGAAAAAGTGGCACCGAGTCGGTGCATGGTGCACCTGACT | | | | |
| S16 | CCTGAGGAGAAGTCTGCCGTTA | | | | |
| HBB8_corr | GTAACGGCAGACTTCTCCACGTTTTAGAGCTAGAAATAGCAAGTTAAAATAAGGC | 21300 | 21 | 15 | 132 |
| WT_RT21_PB | TAGTCCGTTATCAACTTGAAAAAGTGGCACCGAGTCGGTGCATGGTGCACCTGACT | | | | |
| S15 | CCTGAGGAGAAGTCTGCCGTT | | | | |
| HBB8_corr | GTAACGGCAGACTTCTCCACGTTTTAGAGCTAGAAATAGCAAGTTAAAATAAGGC | 21301 | 21 | 14 | 131 |
| WT_RT21_PB | TAGTCCGTTATCAACTTGAAAAAGTGGCACCGAGTCGGTGCATGGTGCACCTGACT | | | | |
| S14 | CCTGAGGAGAAGTCTGCCGT | | | | |
| HBB8_corr | GTAACGGCAGACTTCTCCACGTTTTAGAGCTAGAAATAGCAAGTTAAAATAAGGC | 21302 | 21 | 13 | 130 |
| WT_RT21_PB | TAGTCCGTTATCAACTTGAAAAAGTGGCACCGAGTCGGTGCATGGTGCACCTGACT | | | | |
| S13 | CCTGAGGAGAAGTCTGCCG | | | | |
| HBB8_corr | GTAACGGCAGACTTCTCCACGTTTTAGAGCTAGAAATAGCAAGTTAAAATAAGGC | 21303 | 21 | 12 | 129 |
| WT_RT21_PB | TAGTCCGTTATCAACTTGAAAAAGTGGCACCGAGTCGGTGCATGGTGCACCTGACT | | | | |
| S12 | CCTGAGGAGAAGTCTGCC | | | | |
| HBB8_corr | GTAACGGCAGACTTCTCCACGTTTTAGAGCTAGAAATAGCAAGTTAAAATAAGGC | 21304 | 21 | 11 | 128 |
| WT_RT21_PB | TAGTCCGTTATCAACTTGAAAAAGTGGCACCGAGTCGGTGCATGGTGCACCTGACT | | | | |
| S11 | CCTGAGGAGAAGTCTGC | | | | |
| HBB8_corr | GTAACGGCAGACTTCTCCACGTTTTAGAGCTAGAAATAGCAAGTTAAAATAAGGC | 21305 | 21 | 10 | 127 |
| WT_RT21_PB | TAGTCCGTTATCAACTTGAAAAAGTGGCACCGAGTCGGTGCATGGTGCACCTGACT | | | | |
| S10 | CCTGAGGAGAAGTCTG | | | | |
| HBB8_corr | GTAACGGCAGACTTCTCCACGTTTTAGAGCTAGAAATAGCAAGTTAAAATAAGGC | 21306 | 21 | 9 | 126 |
| WT_RT21_PB | TAGTCCGTTATCAACTTGAAAAAGTGGCACCGAGTCGGTGCATGGTGCACCTGACT | | | | |
| S9 | CCTGAGGAGAAGTCT | | | | |
| HBB8_corr | GTAACGGCAGACTTCTCCACGTTTTAGAGCTAGAAATAGCAAGTTAAAATAAGGC | 21307 | 21 | 8 | 125 |
| WT_RT21_PB | TAGTCCGTTATCAACTTGAAAAAGTGGCACCGAGTCGGTGCATGGTGCACCTGACT | | | | |
| S8 | CCTGAGGAGAAGTC | | | | |
| HBB8_corr | GTAACGGCAGACTTCTCCACGTTTTAGAGCTAGAAATAGCAAGTTAAAATAAGGC | 21308 | 20 | 17 | 133 |
| WT_RT20_PB | TAGTCCGTTATCAACTTGAAAAAGTGGCACCGAGTCGGTGCTGGTGCACCTGACTC | | | | |
| S17 | CTGAGGAGAAGTCTGCCGTTAC | | | | |
| HBB8_corr | GTAACGGCAGACTTCTCCACGTTTTAGAGCTAGAAATAGCAAGTTAAAATAAGGC | 21309 | 20 | 16 | 132 |
| WT_RT20_PB | TAGTCCGTTATCAACTTGAAAAAGTGGCACCGAGTCGGTGCTGGTGCACCTGACTC | | | | |
| S16 | CTGAGGAGAAGTCTGCCGTTA | | | | |
| HBB8_corr | GTAACGGCAGACTTCTCCACGTTTTAGAGCTAGAAATAGCAAGTTAAAATAAGGC | 21310 | 20 | 15 | 131 |
| WT_RT20_PB | TAGTCCGTTATCAACTTGAAAAAGTGGCACCGAGTCGGTGCTGGTGCACCTGACTC | | | | |
| S15 | CTGAGGAGAAGTCTGCCGTT | | | | |
| HBB8_corr | GTAACGGCAGACTTCTCCACGTTTTAGAGCTAGAAATAGCAAGTTAAAATAAGGC | 21311 | 20 | 14 | 130 |
| WT_RT20_PB | TAGTCCGTTATCAACTTGAAAAAGTGGCACCGAGTCGGTGCTGGTGCACCTGACTC | | | | |
| S14 | CTGAGGAGAAGTCTGCCGT | | | | |
| HBB8_corr | GTAACGGCAGACTTCTCCACGTTTTAGAGCTAGAAATAGCAAGTTAAAATAAGGC | 21312 | 20 | 13 | 129 |
| WT_RT20_PB | TAGTCCGTTATCAACTTGAAAAAGTGGCACCGAGTCGGTGCTGGTGCACCTGACTC | | | | |
| S13 | CTGAGGAGAAGTCTGCCG | | | | |
| HBB8_corr | GTAACGGCAGACTTCTCCACGTTTTAGAGCTAGAAATAGCAAGTTAAAATAAGGC | 21313 | 20 | 12 | 128 |
| WT_RT20_PB | TAGTCCGTTATCAACTTGAAAAAGTGGCACCGAGTCGGTGCTGGTGCACCTGACTC | | | | |
| S12 | CTGAGGAGAAGTCTGCC | | | | |
| HBB8_corr | GTAACGGCAGACTTCTCCACGTTTTAGAGCTAGAAATAGCAAGTTAAAATAAGGC | 21314 | 20 | 11 | 127 |
| WT_RT20_PB | TAGTCCGTTATCAACTTGAAAAAGTGGCACCGAGTCGGTGCTGGTGCACCTGACTC | | | | |
| S11 | CTGAGGAGAAGTCTGC | | | | |
| HBB8_corr | GTAACGGCAGACTTCTCCACGTTTTAGAGCTAGAAATAGCAAGTTAAAATAAGGC | 21315 | 20 | 10 | 126 |
| WT_RT20_PB | TAGTCCGTTATCAACTTGAAAAAGTGGCACCGAGTCGGTGCTGGTGCACCTGACTC | | | | |
| S10 | CTGAGGAGAAGTCTG | | | | |
| HBB8_corr | GTAACGGCAGACTTCTCCACGTTTTAGAGCTAGAAATAGCAAGTTAAAATAAGGC | 21316 | 20 | 9 | 125 |
| WT_RT20_PB | TAGTCCGTTATCAACTTGAAAAAGTGGCACCGAGTCGGTGCTGGTGCACCTGACTC | | | | |
| S9 | CTGAGGAGAAGTCT | | | | |
| HBB8_corr | GTAACGGCAGACTTCTCCACGTTTTAGAGCTAGAAATAGCAAGTTAAAATAAGGC | 21317 | 20 | 8 | 124 |
| WT_RT20_PB | TAGTCCGTTATCAACTTGAAAAAGTGGCACCGAGTCGGTGCTGGTGCACCTGACTC | | | | |
| S8 | CTGAGGAGAAGTC | | | | |
| HBB8_corr | GTAACGGCAGACTTCTCCACGTTTTAGAGCTAGAAATAGCAAGTTAAAATAAGGC | 21318 | 19 | 17 | 132 |
| WT_RT19_PB | TAGTCCGTTATCAACTTGAAAAAGTGGCACCGAGTCGGTGCGGTGCACCTGACTCC | | | | |
| S17 | TGAGGAGAAGTCTGCCGTTAC | | | | |
| HBB8_corr | GTAACGGCAGACTTCTCCACGTTTTAGAGCTAGAAATAGCAAGTTAAAATAAGGC | 21319 | 19 | 16 | 131 |
| WT_RT19_PB | TAGTCCGTTATCAACTTGAAAAAGTGGCACCGAGTCGGTGCGGTGCACCTGACTCC | | | | |
| S16 | TGAGGAGAAGTCTGCCGTTA | | | | |
| HBB8_corr | GTAACGGCAGACTTCTCCACGTTTTAGAGCTAGAAATAGCAAGTTAAAATAAGGC | 21320 | 19 | 15 | 130 |
| WT_RT19_PB | TAGTCCGTTATCAACTTGAAAAAGTGGCACCGAGTCGGTGCGGTGCACCTGACTCC | | | | |
| S15 | TGAGGAGAAGTCTGCCGTT | | | | |
| HBB8_corr | GTAACGGCAGACTTCTCCACGTTTTAGAGCTAGAAATAGCAAGTTAAAATAAGGC | 21321 | 19 | 14 | 129 |
| WT_RT19_PB | TAGTCCGTTATCAACTTGAAAAAGTGGCACCGAGTCGGTGCGGTGCACCTGACTCC | | | | |
| S14 | TGAGGAGAAGTCTGCCGT | | | | |
| HBB8_corr | GTAACGGCAGACTTCTCCACGTTTTAGAGCTAGAAATAGCAAGTTAAAATAAGGC | 21322 | 19 | 13 | 128 |
| WT_RT19_PB | TAGTCCGTTATCAACTTGAAAAAGTGGCACCGAGTCGGTGCGGTGCACCTGACTCC | | | | |
| S13 | TGAGGAGAAGTCTGCCG | | | | |
| HBB8_corr | GTAACGGCAGACTTCTCCACGTTTTAGAGCTAGAAATAGCAAGTTAAAATAAGGC | 21323 | 19 | 12 | 127 |
| WT_RT19_PB | TAGTCCGTTATCAACTTGAAAAAGTGGCACCGAGTCGGTGCGGTGCACCTGACTCC | | | | |
| S12 | TGAGGAGAAGTCTGCC | | | | |
| HBB8_corr | GTAACGGCAGACTTCTCCACGTTTTAGAGCTAGAAATAGCAAGTTAAAATAAGGC | 21324 | 19 | 11 | 126 |
| WT_RT19_PB | TAGTCCGTTATCAACTTGAAAAAGTGGCACCGAGTCGGTGCGGTGCACCTGACTCC | | | | |
| S11 | TGAGGAGAAGTCTGC | | | | |
| HBB8_corr | GTAACGGCAGACTTCTCCACGTTTTAGAGCTAGAAATAGCAAGTTAAAATAAGGC | 21325 | 19 | 10 | 125 |
| WT_RT19_PB | TAGTCCGTTATCAACTTGAAAAAGTGGCACCGAGTCGGTGCGGTGCACCTGACTCC | | | | |
| S10 | TGAGGAGAAGTCTG | | | | |
| HBB8_corr | GTAACGGCAGACTTCTCCACGTTTTAGAGCTAGAAATAGCAAGTTAAAATAAGGC | 21326 | 19 | 9 | 124 |
| WT_RT19_PB | TAGTCCGTTATCAACTTGAAAAAGTGGCACCGAGTCGGTGCGGTGCACCTGACTCC | | | | |
| S9 | TGAGGAGAAGTCT | | | | |
| HBB8_corr | GTAACGGCAGACTTCTCCACGTTTTAGAGCTAGAAATAGCAAGTTAAAATAAGGC | 21327 | 19 | 8 | 123 |
| WT_RT19_PB | TAGTCCGTTATCAACTTGAAAAAGTGGCACCGAGTCGGTGCGGTGCACCTGACTCC | | | | |
| S8 | TGAGGAGAAGTC | | | | |
| HBB8_corr | GTAACGGCAGACTTCTCCACGTTTTAGAGCTAGAAATAGCAAGTTAAAATAAGGC | 21328 | 18 | 17 | 131 |
| WT_RT18_PB | TAGTCCGTTATCAACTTGAAAAAGTGGCACCGAGTCGGTGCGTGCACCTGACTCCT | | | | |
| S17 | GAGGAGAAGTCTGCCGTTAC | | | | |
| HBB8_corr | GTAACGGCAGACTTCTCCACGTTTTAGAGCTAGAAATAGCAAGTTAAAATAAGGC | 21329 | 18 | 16 | 130 |
| WT_RT18_PB | TAGTCCGTTATCAACTTGAAAAAGTGGCACCGAGTCGGTGCGTGCACCTGACTCCT | | | | |
| S16 | GAGGAGAAGTCTGCCGTTA | | | | |
| HBB8_corr | GTAACGGCAGACTTCTCCACGTTTTAGAGCTAGAAATAGCAAGTTAAAATAAGGC | 21330 | 18 | 15 | 129 |
| WT_RT18_PB | TAGTCCGTTATCAACTTGAAAAAGTGGCACCGAGTCGGTGCGTGCACCTGACTCCT | | | | |
| S15 | GAGGAGAAGTCTGCCGTT | | | | |
| HBB8_corr | GTAACGGCAGACTTCTCCACGTTTTAGAGCTAGAAATAGCAAGTTAAAATAAGGC | 21331 | 18 | 14 | 128 |
| WT_RT18_PB | TAGTCCGTTATCAACTTGAAAAAGTGGCACCGAGTCGGTGCGTGCACCTGACTCCT | | | | |
| S14 | GAGGAGAAGTCTGCCGT | | | | |
| HBB8_corr | GTAACGGCAGACTTCTCCACGTTTTAGAGCTAGAAATAGCAAGTTAAAATAAGGC | 21332 | 18 | 13 | 127 |
| WT_RT18_PB | TAGTCCGTTATCAACTTGAAAAAGTGGCACCGAGTCGGTGCGTGCACCTGACTCCT | | | | |
| S13 | GAGGAGAAGTCTGCCG | | | | |
| HBB8_corr | GTAACGGCAGACTTCTCCACGTTTTAGAGCTAGAAATAGCAAGTTAAAATAAGGC | 21333 | 18 | 12 | 126 |
| WT_RT18_PB | TAGTCCGTTATCAACTTGAAAAAGTGGCACCGAGTCGGTGCGTGCACCTGACTCCT | | | | |
| S12 | GAGGAGAAGTCTGCC | | | | |
| HBB8_corr | GTAACGGCAGACTTCTCCACGTTTTAGAGCTAGAAATAGCAAGTTAAAATAAGGC | 21334 | 18 | 11 | 125 |
| WT_RT18_PB | TAGTCCGTTATCAACTTGAAAAAGTGGCACCGAGTCGGTGCGTGCACCTGACTCCT | | | | |
| S11 | GAGGAGAAGTCTGC | | | | |
| HBB8_corr | GTAACGGCAGACTTCTCCACGTTTTAGAGCTAGAAATAGCAAGTTAAAATAAGGC | 21335 | 18 | 10 | 124 |
| WT_RT18_PB | TAGTCCGTTATCAACTTGAAAAAGTGGCACCGAGTCGGTGCGTGCACCTGACTCCT | | | | |
| S10 | GAGGAGAAGTCTG | | | | |
| HBB8_corr | GTAACGGCAGACTTCTCCACGTTTTAGAGCTAGAAATAGCAAGTTAAAATAAGGC | 21336 | 18 | 9 | 123 |
| WT_RT18_PB | TAGTCCGTTATCAACTTGAAAAAGTGGCACCGAGTCGGTGCGTGCACCTGACTCCT | | | | |
| S9 | GAGGAGAAGTCT | | | | |
| HBB8_corr | GTAACGGCAGACTTCTCCACGTTTTAGAGCTAGAAATAGCAAGTTAAAATAAGGC | 21337 | 18 | 8 | 122 |
| WT_RT18_PB | TAGTCCGTTATCAACTTGAAAAAGTGGCACCGAGTCGGTGCGTGCACCTGACTCCT | | | | |
| S8 | GAGGAGAAGTC | | | | |
| HBB8_corr | GTAACGGCAGACTTCTCCACGTTTTAGAGCTAGAAATAGCAAGTTAAAATAAGGC | 21338 | 17 | 17 | 130 |
| WT_RT17_PB | TAGTCCGTTATCAACTTGAAAAAGTGGCACCGAGTCGGTGCTGCACCTGACTCCTG | | | | |
| S17 | AGGAGAAGTCTGCCGTTAC | | | | |
| HBB8_corr | GTAACGGCAGACTTCTCCACGTTTTAGAGCTAGAAATAGCAAGTTAAAATAAGGC | 21339 | 17 | 16 | 129 |
| WT_RT17_PB | TAGTCCGTTATCAACTTGAAAAAGTGGCACCGAGTCGGTGCTGCACCTGACTCCTG | | | | |
| S16 | AGGAGAAGTCTGCCGTTA | | | | |
| HBB8_corr | GTAACGGCAGACTTCTCCACGTTTTAGAGCTAGAAATAGCAAGTTAAAATAAGGC | 21340 | 17 | 15 | 128 |
| WT_RT17_PB | TAGTCCGTTATCAACTTGAAAAAGTGGCACCGAGTCGGTGCTGCACCTGACTCCTG | | | | |
| S15 | AGGAGAAGTCTGCCGTT | | | | |
| HBB8_corr | GTAACGGCAGACTTCTCCACGTTTTAGAGCTAGAAATAGCAAGTTAAAATAAGGC | 21341 | 17 | 14 | 127 |
| WT_RT17_PB | TAGTCCGTTATCAACTTGAAAAAGTGGCACCGAGTCGGTGCTGCACCTGACTCCTG | | | | |
| S14 | AGGAGAAGTCTGCCGT | | | | |
| HBB8_corr | GTAACGGCAGACTTCTCCACGTTTTAGAGCTAGAAATAGCAAGTTAAAATAAGGC | 21342 | 17 | 13 | 126 |
| WT_RT17_PB | TAGTCCGTTATCAACTTGAAAAAGTGGCACCGAGTCGGTGCTGCACCTGACTCCTG | | | | |
| S13 | AGGAGAAGTCTGCCG | | | | |
| HBB8_corr | GTAACGGCAGACTTCTCCACGTTTTAGAGCTAGAAATAGCAAGTTAAAATAAGGC | 21343 | 17 | 12 | 125 |
| WT_RT17_PB | TAGTCCGTTATCAACTTGAAAAAGTGGCACCGAGTCGGTGCTGCACCTGACTCCTG | | | | |
| S12 | AGGAGAAGTCTGCC | | | | |
| HBB8_corr | GTAACGGCAGACTTCTCCACGTTTTAGAGCTAGAAATAGCAAGTTAAAATAAGGC | 21344 | 17 | 11 | 124 |
| WT_RT17_PB | TAGTCCGTTATCAACTTGAAAAAGTGGCACCGAGTCGGTGCTGCACCTGACTCCTG | | | | |
| S11 | AGGAGAAGTCTGC | | | | |
| HBB8_corr | GTAACGGCAGACTTCTCCACGTTTTAGAGCTAGAAATAGCAAGTTAAAATAAGGC | 21345 | 17 | 10 | 123 |
| WT_RT17_PB | TAGTCCGTTATCAACTTGAAAAAGTGGCACCGAGTCGGTGCTGCACCTGACTCCTG | | | | |
| S10 | AGGAGAAGTCTG | | | | |
| HBB8_corr | GTAACGGCAGACTTCTCCACGTTTTAGAGCTAGAAATAGCAAGTTAAAATAAGGC | 21346 | 17 | 9 | 122 |
| WT_RT17_PB | TAGTCCGTTATCAACTTGAAAAAGTGGCACCGAGTCGGTGCTGCACCTGACTCCTG | | | | |
| S9 | AGGAGAAGTCT | | | | |
| HBB8_corr | GTAACGGCAGACTTCTCCACGTTTTAGAGCTAGAAATAGCAAGTTAAAATAAGGC | 21347 | 17 | 8 | 121 |
| WT_RT17_PB | TAGTCCGTTATCAACTTGAAAAAGTGGCACCGAGTCGGTGCTGCACCTGACTCCTG | | | | |
| S8 | AGGAGAAGTC | | | | |
| HBB8_corr | GTAACGGCAGACTTCTCCACGTTTTAGAGCTAGAAATAGCAAGTTAAAATAAGGC | 21348 | 16 | 17 | 129 |
| WT_RT16_PB | TAGTCCGTTATCAACTTGAAAAAGTGGCACCGAGTCGGTGCGCACCTGACTCCTGA | | | | |
| S17 | GGAGAAGTCTGCCGTTAC | | | | |
| HBB8_corr | GTAACGGCAGACTTCTCCACGTTTTAGAGCTAGAAATAGCAAGTTAAAATAAGGC | 21349 | 16 | 16 | 128 |
| WT_RT16_PB | TAGTCCGTTATCAACTTGAAAAAGTGGCACCGAGTCGGTGCGCACCTGACTCCTGA | | | | |
| S16 | GGAGAAGTCTGCCGTTA | | | | |
| HBB8_corr | GTAACGGCAGACTTCTCCACGTTTTAGAGCTAGAAATAGCAAGTTAAAATAAGGC | 21350 | 16 | 15 | 127 |
| WT_RT16_PB | TAGTCCGTTATCAACTTGAAAAAGTGGCACCGAGTCGGTGCGCACCTGACTCCTGA | | | | |
| S15 | GGAGAAGTCTGCCGTT | | | | |
| HBB8_corr | GTAACGGCAGACTTCTCCACGTTTTAGAGCTAGAAATAGCAAGTTAAAATAAGGC | 21351 | 16 | 14 | 126 |
| WT_RT16_PB | TAGTCCGTTATCAACTTGAAAAAGTGGCACCGAGTCGGTGCGCACCTGACTCCTGA | | | | |
| S14 | GGAGAAGTCTGCCGT | | | | |
| HBB8_corr | GTAACGGCAGACTTCTCCACGTTTTAGAGCTAGAAATAGCAAGTTAAAATAAGGC | 21352 | 16 | 13 | 125 |
| WT_RT16_PB | TAGTCCGTTATCAACTTGAAAAAGTGGCACCGAGTCGGTGCGCACCTGACTCCTGA | | | | |
| S13 | GGAGAAGTCTGCCG | | | | |
| HBB8_corr | GTAACGGCAGACTTCTCCACGTTTTAGAGCTAGAAATAGCAAGTTAAAATAAGGC | 21353 | 16 | 12 | 124 |
| WT_RT16_PB | TAGTCCGTTATCAACTTGAAAAAGTGGCACCGAGTCGGTGCGCACCTGACTCCTGA | | | | |
| S12 | GGAGAAGTCTGCC | | | | |
| HBB8_corr | GTAACGGCAGACTTCTCCACGTTTTAGAGCTAGAAATAGCAAGTTAAAATAAGGC | 21354 | 16 | 11 | 123 |
| WT_RT16_PB | TAGTCCGTTATCAACTTGAAAAAGTGGCACCGAGTCGGTGCGCACCTGACTCCTGA | | | | |
| S11 | GGAGAAGTCTGC | | | | |
| HBB8_corr | GTAACGGCAGACTTCTCCACGTTTTAGAGCTAGAAATAGCAAGTTAAAATAAGGC | 21355 | 16 | 10 | 122 |
| WT_RT16_PB | TAGTCCGTTATCAACTTGAAAAAGTGGCACCGAGTCGGTGCGCACCTGACTCCTGA | | | | |
| S10 | GGAGAAGTCTG | | | | |
| HBB8_corr | GTAACGGCAGACTTCTCCACGTTTTAGAGCTAGAAATAGCAAGTTAAAATAAGGC | 21356 | 16 | 9 | 121 |
| WT_RT16_PB | TAGTCCGTTATCAACTTGAAAAAGTGGCACCGAGTCGGTGCGCACCTGACTCCTGA | | | | |
| S9 | GGAGAAGTCT | | | | |
| HBB8_corr | GTAACGGCAGACTTCTCCACGTTTTAGAGCTAGAAATAGCAAGTTAAAATAAGGC | 21357 | 16 | 8 | 120 |
| WT_RT16_PB | TAGTCCGTTATCAACTTGAAAAAGTGGCACCGAGTCGGTGCGCACCTGACTCCTGA | | | | |
| S8 | GGAGAAGTC | | | | |
| HBB8_corr | GTAACGGCAGACTTCTCCACGTTTTAGAGCTAGAAATAGCAAGTTAAAATAAGGC | 21358 | 15 | 17 | 128 |
| WT_RT15_PB | TAGTCCGTTATCAACTTGAAAAAGTGGCACCGAGTCGGTGCCACCTGACTCCTGAG | | | | |
| S17 | GAGAAGTCTGCCGTTAC | | | | |
| HBB8_corr | GTAACGGCAGACTTCTCCACGTTTTAGAGCTAGAAATAGCAAGTTAAAATAAGGC | 21359 | 15 | 16 | 127 |
| WT_RT15_PB | TAGTCCGTTATCAACTTGAAAAAGTGGCACCGAGTCGGTGCCACCTGACTCCTGAG | | | | |
| S16 | GAGAAGTCTGCCGTTA | | | | |
| HBB8_corr | GTAACGGCAGACTTCTCCACGTTTTAGAGCTAGAAATAGCAAGTTAAAATAAGGC | 21360 | 15 | 15 | 126 |
| WT_RT15_PB | TAGTCCGTTATCAACTTGAAAAAGTGGCACCGAGTCGGTGCCACCTGACTCCTGAG | | | | |
| S15 | GAGAAGTCTGCCGTT | | | | |
| HBB8_corr | GTAACGGCAGACTTCTCCACGTTTTAGAGCTAGAAATAGCAAGTTAAAATAAGGC | 21361 | 15 | 14 | 125 |
| WT_RT15_PB | TAGTCCGTTATCAACTTGAAAAAGTGGCACCGAGTCGGTGCCACCTGACTCCTGAG | | | | |
| S14 | GAGAAGTCTGCCGT | | | | |
| HBB8_corr | GTAACGGCAGACTTCTCCACGTTTTAGAGCTAGAAATAGCAAGTTAAAATAAGGC | 21362 | 15 | 13 | 124 |
| WT_RT15_PB | TAGTCCGTTATCAACTTGAAAAAGTGGCACCGAGTCGGTGCCACCTGACTCCTGAG | | | | |
| S13 | GAGAAGTCTGCCG | | | | |
| HBB8_corr | GTAACGGCAGACTTCTCCACGTTTTAGAGCTAGAAATAGCAAGTTAAAATAAGGC | 21363 | 15 | 12 | 123 |
| WT_RT15_PB | TAGTCCGTTATCAACTTGAAAAAGTGGCACCGAGTCGGTGCCACCTGACTCCTGAG | | | | |
| S12 | GAGAAGTCTGCC | | | | |
| HBB8_corr | GTAACGGCAGACTTCTCCACGTTTTAGAGCTAGAAATAGCAAGTTAAAATAAGGC | 21364 | 15 | 11 | 122 |
| WT_RT15_PB | TAGTCCGTTATCAACTTGAAAAAGTGGCACCGAGTCGGTGCCACCTGACTCCTGAG | | | | |
| S11 | GAGAAGTCTGC | | | | |
| HBB8_corr | GTAACGGCAGACTTCTCCACGTTTTAGAGCTAGAAATAGCAAGTTAAAATAAGGC | 21365 | 15 | 10 | 121 |
| WT_RT15_PB | TAGTCCGTTATCAACTTGAAAAAGTGGCACCGAGTCGGTGCCACCTGACTCCTGAG | | | | |
| S10 | GAGAAGTCTG | | | | |
| HBB8_corr | GTAACGGCAGACTTCTCCACGTTTTAGAGCTAGAAATAGCAAGTTAAAATAAGGC | 21366 | 15 | 9 | 120 |
| WT_RT15_PB | TAGTCCGTTATCAACTTGAAAAAGTGGCACCGAGTCGGTGCCACCTGACTCCTGAG | | | | |
| S9 | GAGAAGTCT | | | | |
| HBB8_corr | GTAACGGCAGACTTCTCCACGTTTTAGAGCTAGAAATAGCAAGTTAAAATAAGGC | 21367 | 15 | 8 | 119 |
| WT_RT15_PB | TAGTCCGTTATCAACTTGAAAAAGTGGCACCGAGTCGGTGCCACCTGACTCCTGAG | | | | |
| S8 | GAGAAGTC | | | | |
| HBB8_corr | GTAACGGCAGACTTCTCCACGTTTTAGAGCTAGAAATAGCAAGTTAAAATAAGGC | 21368 | 14 | 17 | 127 |
| WT_RT14_PB | TAGTCCGTTATCAACTTGAAAAAGTGGCACCGAGTCGGTGCACCTGACTCCTGAG | | | | |
| S17 | GAGAAGTCTGCCGTTAC | | | | |
| HBB8_corr | GTAACGGCAGACTTCTCCACGTTTTAGAGCTAGAAATAGCAAGTTAAAATAAGGC | 21369 | 14 | 16 | 126 |
| WT_RT14_PB | TAGTCCGTTATCAACTTGAAAAAGTGGCACCGAGTCGGTGCACCTGACTCCTGAG | | | | |
| S16 | GAGAAGTCTGCCGTTA | | | | |
| HBB8_corr | GTAACGGCAGACTTCTCCACGTTTTAGAGCTAGAAATAGCAAGTTAAAATAAGGC | 21370 | 14 | 15 | 125 |
| WT_RT14_PB | TAGTCCGTTATCAACTTGAAAAAGTGGCACCGAGTCGGTGCACCTGACTCCTGAG | | | | |
| S15 | GAGAAGTCTGCCGTT | | | | |
| HBB8_corr | GTAACGGCAGACTTCTCCACGTTTTAGAGCTAGAAATAGCAAGTTAAAATAAGGC | 21371 | 14 | 14 | 124 |
| WT_RT14_PB | TAGTCCGTTATCAACTTGAAAAAGTGGCACCGAGTCGGTGCACCTGACTCCTGAG | | | | |
| S14 | GAGAAGTCTGCCGT | | | | |
| HBB8_corr | GTAACGGCAGACTTCTCCACGTTTTAGAGCTAGAAATAGCAAGTTAAAATAAGGC | 21372 | 14 | 13 | 123 |
| WT_RT14_PB | TAGTCCGTTATCAACTTGAAAAAGTGGCACCGAGTCGGTGCACCTGACTCCTGAG | | | | |
| S13 | GAGAAGTCTGCCG | | | | |
| HBB8_corr | GTAACGGCAGACTTCTCCACGTTTTAGAGCTAGAAATAGCAAGTTAAAATAAGGC | 21373 | 14 | 12 | 122 |
| WT_RT14_PB | TAGTCCGTTATCAACTTGAAAAAGTGGCACCGAGTCGGTGCACCTGACTCCTGAG | | | | |
| S12 | GAGAAGTCTGCC | | | | |
| HBB8_corr | GTAACGGCAGACTTCTCCACGTTTTAGAGCTAGAAATAGCAAGTTAAAATAAGGC | 21374 | 14 | 11 | 121 |
| WT_RT14_PB | TAGTCCGTTATCAACTTGAAAAAGTGGCACCGAGTCGGTGCACCTGACTCCTGAG | | | | |
| S11 | GAGAAGTCTGC | | | | |
| HBB8_corr | GTAACGGCAGACTTCTCCACGTTTTAGAGCTAGAAATAGCAAGTTAAAATAAGGC | 21375 | 14 | 10 | 120 |
| WT_RT14_PB | TAGTCCGTTATCAACTTGAAAAAGTGGCACCGAGTCGGTGCACCTGACTCCTGAG | | | | |
| S10 | GAGAAGTCTG | | | | |
| HBB8_corr | GTAACGGCAGACTTCTCCACGTTTTAGAGCTAGAAATAGCAAGTTAAAATAAGGC | 21376 | 14 | 9 | 119 |
| WT_RT14_PB | TAGTCCGTTATCAACTTGAAAAAGTGGCACCGAGTCGGTGCACCTGACTCCTGAG | | | | |
| S9 | GAGAAGTCT | | | | |
| HBB8_corr | GTAACGGCAGACTTCTCCACGTTTTAGAGCTAGAAATAGCAAGTTAAAATAAGGC | 21377 | 14 | 8 | 118 |
| WT_RT14_PB | TAGTCCGTTATCAACTTGAAAAAGTGGCACCGAGTCGGTGCACCTGACTCCTGAG | | | | |
| S8 | GAGAAGTC | | | | |
| HBB8_corr | GTAACGGCAGACTTCTCCACGTTTTAGAGCTAGAAATAGCAAGTTAAAATAAGGC | 21378 | 13 | 17 | 126 |
| WT_RT13_PB | TAGTCCGTTATCAACTTGAAAAAGTGGCACCGAGTCGGTGCCCTGACTCCTGAGG | | | | |
| S17 | AGAAGTCTGCCGTTAC | | | | |
| HBB8_corr | GTAACGGCAGACTTCTCCACGTTTTAGAGCTAGAAATAGCAAGTTAAAATAAGGC | 21379 | 13 | 16 | 125 |
| WT_RT13_PB | TAGTCCGTTATCAACTTGAAAAAGTGGCACCGAGTCGGTGCCCTGACTCCTGAGG | | | | |
| S16 | AGAAGTCTGCCGTTA | | | | |
| HBB8_corr | GTAACGGCAGACTTCTCCACGTTTTAGAGCTAGAAATAGCAAGTTAAAATAAGGC | 21380 | 13 | 15 | 124 |
| WT_RT13_PB | TAGTCCGTTATCAACTTGAAAAAGTGGCACCGAGTCGGTGCCCTGACTCCTGAGG | | | | |
| S15 | AGAAGTCTGCCGTT | | | | |
| HBB8_corr | GTAACGGCAGACTTCTCCACGTTTTAGAGCTAGAAATAGCAAGTTAAAATAAGGC | 21381 | 13 | 14 | 123 |
| WT_RT13_PB | TAGTCCGTTATCAACTTGAAAAAGTGGCACCGAGTCGGTGCCCTGACTCCTGAGG | | | | |
| S14 | AGAAGTCTGCCGT | | | | |
| HBB8_corr | GTAACGGCAGACTTCTCCACGTTTTAGAGCTAGAAATAGCAAGTTAAAATAAGGC | 21382 | 13 | 13 | 122 |
| WT_RT13_PB | TAGTCCGTTATCAACTTGAAAAAGTGGCACCGAGTCGGTGCCCTGACTCCTGAGG | | | | |
| S13 | AGAAGTCTGCCG | | | | |
| HBB8_corr | GTAACGGCAGACTTCTCCACGTTTTAGAGCTAGAAATAGCAAGTTAAAATAAGGC | 21383 | 13 | 12 | 121 |
| WT_RT13_PB | TAGTCCGTTATCAACTTGAAAAAGTGGCACCGAGTCGGTGCCCTGACTCCTGAGG | | | | |
| S12 | AGAAGTCTGCC | | | | |
| HBB8_corr | GTAACGGCAGACTTCTCCACGTTTTAGAGCTAGAAATAGCAAGTTAAAATAAGGC | 21384 | 13 | 11 | 120 |
| WT_RT13_PB | TAGTCCGTTATCAACTTGAAAAAGTGGCACCGAGTCGGTGCCCTGACTCCTGAGG | | | | |
| S11 | AGAAGTCTGC | | | | |
| HBB8_corr | GTAACGGCAGACTTCTCCACGTTTTAGAGCTAGAAATAGCAAGTTAAAATAAGGC | 21385 | 13 | 10 | 119 |
| WT_RT13_PB | TAGTCCGTTATCAACTTGAAAAAGTGGCACCGAGTCGGTGCCCTGACTCCTGAGG | | | | |
| S10 | AGAAGTCTG | | | | |
| HBB8_corr | GTAACGGCAGACTTCTCCACGTTTTAGAGCTAGAAATAGCAAGTTAAAATAAGGC | 21386 | 13 | 9 | 118 |
| WT_RT13_PB | TAGTCCGTTATCAACTTGAAAAAGTGGCACCGAGTCGGTGCCCTGACTCCTGAGG | | | | |
| S9 | AGAAGTCT | | | | |
| HBB8_corr | GTAACGGCAGACTTCTCCACGTTTTAGAGCTAGAAATAGCAAGTTAAAATAAGGC | 21387 | 13 | 8 | 117 |
| WT_RT13_PB | TAGTCCGTTATCAACTTGAAAAAGTGGCACCGAGTCGGTGCCCTGACTCCTGAGG | | | | |
| S8 | AGAAGTC | | | | |
| HBB8_corr | GTAACGGCAGACTTCTCCACGTTTTAGAGCTAGAAATAGCAAGTTAAAATAAGGC | 21388 | 12 | 17 | 125 |
| WT_RT12_PB | TAGTCCGTTATCAACTTGAAAAAGTGGCACCGAGTCGGTGCCTGACTCCTGAGGA | | | | |
| S17 | GAAGTCTGCCGTTAC | | | | |
| HBB8_corr | GTAACGGCAGACTTCTCCACGTTTTAGAGCTAGAAATAGCAAGTTAAAATAAGGC | 21389 | 12 | 16 | 124 |
| WT_RT12_PB | TAGTCCGTTATCAACTTGAAAAAGTGGCACCGAGTCGGTGCCTGACTCCTGAGGA | | | | |
| S16 | GAAGTCTGCCGTTA | | | | |
| HBB8_corr | GTAACGGCAGACTTCTCCACGTTTTAGAGCTAGAAATAGCAAGTTAAAATAAGGC | 21390 | 12 | 15 | 123 |
| WT_RT12_PB | TAGTCCGTTATCAACTTGAAAAAGTGGCACCGAGTCGGTGCCTGACTCCTGAGGA | | | | |
| S15 | GAAGTCTGCCGTT | | | | |
| HBB8_corr | GTAACGGCAGACTTCTCCACGTTTTAGAGCTAGAAATAGCAAGTTAAAATAAGGC | 21391 | 12 | 14 | 122 |
| WT_RT12_PB | TAGTCCGTTATCAACTTGAAAAAGTGGCACCGAGTCGGTGCCTGACTCCTGAGGA | | | | |
| S14 | GAAGTCTGCCGT | | | | |
| HBB8_corr | GTAACGGCAGACTTCTCCACGTTTTAGAGCTAGAAATAGCAAGTTAAAATAAGGC | 21392 | 12 | 13 | 121 |
| WT_RT12_PB | TAGTCCGTTATCAACTTGAAAAAGTGGCACCGAGTCGGTGCCTGACTCCTGAGGA | | | | |
| S13 | GAAGTCTGCCG | | | | |
| HBB8_corr | GTAACGGCAGACTTCTCCACGTTTTAGAGCTAGAAATAGCAAGTTAAAATAAGGC | 21393 | 12 | 12 | 120 |
| WT_RT12_PB | TAGTCCGTTATCAACTTGAAAAAGTGGCACCGAGTCGGTGCCTGACTCCTGAGGA | | | | |
| S12 | GAAGTCTGCC | | | | |
| HBB8_corr | GTAACGGCAGACTTCTCCACGTTTTAGAGCTAGAAATAGCAAGTTAAAATAAGGC | 21394 | 12 | 11 | 119 |
| WT_RT12_PB | TAGTCCGTTATCAACTTGAAAAAGTGGCACCGAGTCGGTGCCTGACTCCTGAGGA | | | | |
| S11 | GAAGTCTGC | | | | |
| HBB8_corr | GTAACGGCAGACTTCTCCACGTTTTAGAGCTAGAAATAGCAAGTTAAAATAAGGC | 21395 | 12 | 10 | 118 |
| WT_RT12_PB | TAGTCCGTTATCAACTTGAAAAAGTGGCACCGAGTCGGTGCCTGACTCCTGAGGA | | | | |
| S10 | GAAGTCTG | | | | |
| HBB8_corr | GTAACGGCAGACTTCTCCACGTTTTAGAGCTAGAAATAGCAAGTTAAAATAAGGC | 21396 | 12 | 9 | 117 |
| WT_RT12_PB | TAGTCCGTTATCAACTTGAAAAAGTGGCACCGAGTCGGTGCCTGACTCCTGAGGA | | | | |
| S9 | GAAGTCT | | | | |
| HBB8_corr | GTAACGGCAGACTTCTCCACGTTTTAGAGCTAGAAATAGCAAGTTAAAATAAGGC | 21397 | 12 | 8 | 116 |
| WT_RT12_PB | TAGTCCGTTATCAACTTGAAAAAGTGGCACCGAGTCGGTGCCTGACTCCTGAGGA | | | | |
| S8 | GAAGTC | | | | |
| HBB8_corr | GTAACGGCAGACTTCTCCACGTTTTAGAGCTAGAAATAGCAAGTTAAAATAAGGC | 21398 | 11 | 17 | 124 |
| WT_RT11_PB | TAGTCCGTTATCAACTTGAAAAAGTGGCACCGAGTCGGTGCTGACTCCTGAGGAG | | | | |
| S17 | AAGTCTGCCGTTAC | | | | |
| HBB8_corr | GTAACGGCAGACTTCTCCACGTTTTAGAGCTAGAAATAGCAAGTTAAAATAAGGC | 21399 | 11 | 16 | 123 |
| WT_RT11_PB | TAGTCCGTTATCAACTTGAAAAAGTGGCACCGAGTCGGTGCTGACTCCTGAGGAG | | | | |
| S16 | AAGTCTGCCGTTA | | | | |
| HBB8_corr | GTAACGGCAGACTTCTCCACGTTTTAGAGCTAGAAATAGCAAGTTAAAATAAGGC | 21400 | 11 | 15 | 122 |
| WT_RT11_PB | TAGTCCGTTATCAACTTGAAAAAGTGGCACCGAGTCGGTGCTGACTCCTGAGGAG | | | | |
| S15 | AAGTCTGCCGTT | | | | |
| HBB8_corr | GTAACGGCAGACTTCTCCACGTTTTAGAGCTAGAAATAGCAAGTTAAAATAAGGC | 21401 | 11 | 14 | 121 |
| WT_RT11_PB | TAGTCCGTTATCAACTTGAAAAAGTGGCACCGAGTCGGTGCTGACTCCTGAGGAG | | | | |
| S14 | AAGTCTGCCGT | | | | |
| HBB8_corr | GTAACGGCAGACTTCTCCACGTTTTAGAGCTAGAAATAGCAAGTTAAAATAAGGC | 21402 | 11 | 13 | 120 |
| WT_RT11_PB | TAGTCCGTTATCAACTTGAAAAAGTGGCACCGAGTCGGTGCTGACTCCTGAGGAG | | | | |
| S13 | AAGTCTGCCG | | | | |
| HBB8_corr | GTAACGGCAGACTTCTCCACGTTTTAGAGCTAGAAATAGCAAGTTAAAATAAGGC | 21403 | 11 | 12 | 119 |
| WT_RT11_PB | TAGTCCGTTATCAACTTGAAAAAGTGGCACCGAGTCGGTGCTGACTCCTGAGGAG | | | | |
| S12 | AAGTCTGCC | | | | |
| HBB8_corr | GTAACGGCAGACTTCTCCACGTTTTAGAGCTAGAAATAGCAAGTTAAAATAAGGC | 21404 | 11 | 11 | 118 |
| WT_RT11_PB | TAGTCCGTTATCAACTTGAAAAAGTGGCACCGAGTCGGTGCTGACTCCTGAGGAG | | | | |
| S11 | AAGTCTGC | | | | |
| HBB8_corr | GTAACGGCAGACTTCTCCACGTTTTAGAGCTAGAAATAGCAAGTTAAAATAAGGC | 21405 | 11 | 10 | 117 |
| WT_RT11_PB | TAGTCCGTTATCAACTTGAAAAAGTGGCACCGAGTCGGTGCTGACTCCTGAGGAG | | | | |
| S10 | AAGTCTG | | | | |
| HBB8_corr | GTAACGGCAGACTTCTCCACGTTTTAGAGCTAGAAATAGCAAGTTAAAATAAGGC | 21406 | 11 | 9 | 116 |
| WT_RT11_PB | TAGTCCGTTATCAACTTGAAAAAGTGGCACCGAGTCGGTGCTGACTCCTGAGGAG | | | | |
| S9 | AAGTCT | | | | |
| HBB8_corr | GTAACGGCAGACTTCTCCACGTTTTAGAGCTAGAAATAGCAAGTTAAAATAAGGC | 21407 | 11 | 8 | 115 |
| WT_RT11_PB | TAGTCCGTTATCAACTTGAAAAAGTGGCACCGAGTCGGTGCTGACTCCTGAGGAG | | | | |
| S8 | AAGTC | | | | |
| HBB8_corr | GTAACGGCAGACTTCTCCACGTTTTAGAGCTAGAAATAGCAAGTTAAAATAAGGC | 21408 | 10 | 17 | 123 |
| WT_RT10_PB | TAGTCCGTTATCAACTTGAAAAAGTGGCACCGAGTCGGTGCGACTCCTGAGGAGA | | | | |
| S17 | AGTCTGCCGTTAC | | | | |
| HBB8_corr | GTAACGGCAGACTTCTCCACGTTTTAGAGCTAGAAATAGCAAGTTAAAATAAGGC | 21409 | 10 | 16 | 122 |
| WT_RT10_PB | TAGTCCGTTATCAACTTGAAAAAGTGGCACCGAGTCGGTGCGACTCCTGAGGAGA | | | | |
| S16 | AGTCTGCCGTTA | | | | |
| HBB8_corr | GTAACGGCAGACTTCTCCACGTTTTAGAGCTAGAAATAGCAAGTTAAAATAAGGC | 21410 | 10 | 15 | 121 |
| WT_RT10_PB | TAGTCCGTTATCAACTTGAAAAAGTGGCACCGAGTCGGTGCGACTCCTGAGGAGA | | | | |
| S15 | AGTCTGCCGTT | | | | |
| HBB8_corr | GTAACGGCAGACTTCTCCACGTTTTAGAGCTAGAAATAGCAAGTTAAAATAAGGC | 21411 | 10 | 14 | 120 |
| WT_RT10_PB | TAGTCCGTTATCAACTTGAAAAAGTGGCACCGAGTCGGTGCGACTCCTGAGGAGA | | | | |
| S14 | AGTCTGCCGT | | | | |
| HBB8_corr | GTAACGGCAGACTTCTCCACGTTTTAGAGCTAGAAATAGCAAGTTAAAATAAGGC | 21412 | 10 | 13 | 119 |
| WT_RT10_PB | TAGTCCGTTATCAACTTGAAAAAGTGGCACCGAGTCGGTGCGACTCCTGAGGAGA | | | | |
| S13 | AGTCTGCCG | | | | |
| HBB8_corr | GTAACGGCAGACTTCTCCACGTTTTAGAGCTAGAAATAGCAAGTTAAAATAAGGC | 21413 | 10 | 12 | 118 |
| WT_RT10_PB | TAGTCCGTTATCAACTTGAAAAAGTGGCACCGAGTCGGTGCGACTCCTGAGGAGA | | | | |
| S12 | AGTCTGCC | | | | |
| HBB8_corr | GTAACGGCAGACTTCTCCACGTTTTAGAGCTAGAAATAGCAAGTTAAAATAAGGC | 21414 | 10 | 11 | 117 |
| WT_RT10_PB | TAGTCCGTTATCAACTTGAAAAAGTGGCACCGAGTCGGTGCGACTCCTGAGGAGA | | | | |
| S11 | AGTCTGC | | | | |
| HBB8_corr | GTAACGGCAGACTTCTCCACGTTTTAGAGCTAGAAATAGCAAGTTAAAATAAGGC | 21415 | 10 | 10 | 116 |
| WT_RT10_PB | TAGTCCGTTATCAACTTGAAAAAGTGGCACCGAGTCGGTGCGACTCCTGAGGAGA | | | | |
| S10 | AGTCTG | | | | |
| HBB8_corr | GTAACGGCAGACTTCTCCACGTTTTAGAGCTAGAAATAGCAAGTTAAAATAAGGC | 21416 | 10 | 9 | 115 |
| WT_RT10_PB | TAGTCCGTTATCAACTTGAAAAAGTGGCACCGAGTCGGTGCGACTCCTGAGGAGA | | | | |
| S9 | AGTCT | | | | |
| HBB8_corr | GTAACGGCAGACTTCTCCACGTTTTAGAGCTAGAAATAGCAAGTTAAAATAAGGC | 21417 | 10 | 8 | 114 |
| WT_RT10_PB | TAGTCCGTTATCAACTTGAAAAAGTGGCACCGAGTCGGTGCGACTCCTGAGGAGA | | | | |
| S8 | AGTC | | | | |
| HBB8_corr | GTAACGGCAGACTTCTCCACGTTTTAGAGCTAGAAATAGCAAGTTAAAATAAGGC | 21418 | 9 | 17 | 122 |
| WT_RT9_PB | TAGTCCGTTATCAACTTGAAAAAGTGGCACCGAGTCGGTGCACTCCTGAGGAGAA | | | | |
| S17 | GTCTGCCGTTAC | | | | |
| HBB8_corr | GTAACGGCAGACTTCTCCACGTTTTAGAGCTAGAAATAGCAAGTTAAAATAAGGC | 21419 | 9 | 16 | 121 |
| WT_RT9_PB | TAGTCCGTTATCAACTTGAAAAAGTGGCACCGAGTCGGTGCACTCCTGAGGAGAA | | | | |
| S16 | GTCTGCCGTTA | | | | |
| HBB8_corr | GTAACGGCAGACTTCTCCACGTTTTAGAGCTAGAAATAGCAAGTTAAAATAAGGC | 21420 | 9 | 15 | 120 |
| WT_RT9_PB | TAGTCCGTTATCAACTTGAAAAAGTGGCACCGAGTCGGTGCACTCCTGAGGAGAA | | | | |
| S15 | GTCTGCCGTT | | | | |
| HBB8_corr | GTAACGGCAGACTTCTCCACGTTTTAGAGCTAGAAATAGCAAGTTAAAATAAGGC | 21421 | 9 | 14 | 119 |
| WT_RT9_PB | TAGTCCGTTATCAACTTGAAAAAGTGGCACCGAGTCGGTGCACTCCTGAGGAGAA | | | | |
| S14 | GTCTGCCGT | | | | |
| HBB8_corr | GTAACGGCAGACTTCTCCACGTTTTAGAGCTAGAAATAGCAAGTTAAAATAAGGC | 21422 | 9 | 13 | 118 |
| WT_RT9_PB | TAGTCCGTTATCAACTTGAAAAAGTGGCACCGAGTCGGTGCACTCCTGAGGAGAA | | | | |
| S13 | GTCTGCCG | | | | |
| HBB8_corr | GTAACGGCAGACTTCTCCACGTTTTAGAGCTAGAAATAGCAAGTTAAAATAAGGC | 21423 | 9 | 12 | 117 |
| WT_RT9_PB | TAGTCCGTTATCAACTTGAAAAAGTGGCACCGAGTCGGTGCACTCCTGAGGAGAA | | | | |
| S12 | GTCTGCC | | | | |
| HBB8_corr | GTAACGGCAGACTTCTCCACGTTTTAGAGCTAGAAATAGCAAGTTAAAATAAGGC | 21424 | 9 | 11 | 116 |
| WT_RT9_PB | TAGTCCGTTATCAACTTGAAAAAGTGGCACCGAGTCGGTGCACTCCTGAGGAGAA | | | | |
| S11 | GTCTGC | | | | |
| HBB8_corr | GTAACGGCAGACTTCTCCACGTTTTAGAGCTAGAAATAGCAAGTTAAAATAAGGC | 21425 | 9 | 10 | 115 |
| WT_RT9_PB | TAGTCCGTTATCAACTTGAAAAAGTGGCACCGAGTCGGTGCACTCCTGAGGAGAA | | | | |
| S10 | GTCTG | | | | |
| HBB8_corr | GTAACGGCAGACTTCTCCACGTTTTAGAGCTAGAAATAGCAAGTTAAAATAAGGC | 21426 | 9 | 9 | 114 |
| WT_RT9_PB | TAGTCCGTTATCAACTTGAAAAAGTGGCACCGAGTCGGTGCACTCCTGAGGAGAA | | | | |
| S9 | GTCT | | | | |
| HBB8_corr | GTAACGGCAGACTTCTCCACGTTTTAGAGCTAGAAATAGCAAGTTAAAATAAGGC | 21427 | 9 | 8 | 113 |
| WT_RT9_PB | TAGTCCGTTATCAACTTGAAAAAGTGGCACCGAGTCGGTGCACTCCTGAGGAGAA | | | | |
| S8 | GTC | | | | |
| HBB8_corr | GTAACGGCAGACTTCTCCACGTTTTAGAGCTAGAAATAGCAAGTTAAAATAAGGC | 21428 | 8 | 17 | 121 |
| WT_RT8_PB | TAGTCCGTTATCAACTTGAAAAAGTGGCACCGAGTCGGTGCCTCCTGAGGAGAAG | | | | |
| S17 | TCTGCCGTTAC | | | | |
| HBB8_corr | GTAACGGCAGACTTCTCCACGTTTTAGAGCTAGAAATAGCAAGTTAAAATAAGGC | 21429 | 8 | 16 | 120 |
| WT_RT8_PB | TAGTCCGTTATCAACTTGAAAAAGTGGCACCGAGTCGGTGCCTCCTGAGGAGAAG | | | | |
| S16 | TCTGCCGTTA | | | | |
| HBB8_corr | GTAACGGCAGACTTCTCCACGTTTTAGAGCTAGAAATAGCAAGTTAAAATAAGGC | 21430 | 8 | 15 | 119 |
| WT_RT8_PB | TAGTCCGTTATCAACTTGAAAAAGTGGCACCGAGTCGGTGCCTCCTGAGGAGAAG | | | | |
| S15 | TCTGCCGTT | | | | |
| HBB8_corr | GTAACGGCAGACTTCTCCACGTTTTAGAGCTAGAAATAGCAAGTTAAAATAAGGC | 21431 | 8 | 14 | 118 |
| WT_RT8_PB | TAGTCCGTTATCAACTTGAAAAAGTGGCACCGAGTCGGTGCCTCCTGAGGAGAAG | | | | |
| S14 | TCTGCCGT | | | | |
| HBB8_corr | GTAACGGCAGACTTCTCCACGTTTTAGAGCTAGAAATAGCAAGTTAAAATAAGGC | 21432 | 8 | 13 | 117 |
| WT_RT8_PB | TAGTCCGTTATCAACTTGAAAAAGTGGCACCGAGTCGGTGCCTCCTGAGGAGAAG | | | | |
| S13 | TCTGCCG | | | | |
| HBB8_corr | GTAACGGCAGACTTCTCCACGTTTTAGAGCTAGAAATAGCAAGTTAAAATAAGGC | 21433 | 8 | 12 | 116 |
| WT_RT8_PB | TAGTCCGTTATCAACTTGAAAAAGTGGCACCGAGTCGGTGCCTCCTGAGGAGAAG | | | | |
| S12 | TCTGCC | | | | |
| HBB8_corr | GTAACGGCAGACTTCTCCACGTTTTAGAGCTAGAAATAGCAAGTTAAAATAAGGC | 21434 | 8 | 11 | 115 |
| WT_RT8_PB | TAGTCCGTTATCAACTTGAAAAAGTGGCACCGAGTCGGTGCCTCCTGAGGAGAAG | | | | |
| S11 | TCTGC | | | | |
| HBB8_corr | GTAACGGCAGACTTCTCCACGTTTTAGAGCTAGAAATAGCAAGTTAAAATAAGGC | 21435 | 8 | 10 | 114 |
| WT_RT8_PB | TAGTCCGTTATCAACTTGAAAAAGTGGCACCGAGTCGGTGCCTCCTGAGGAGAAG | | | | |
| S10 | TCTG | | | | |
| HBB8_corr | GTAACGGCAGACTTCTCCACGTTTTAGAGCTAGAAATAGCAAGTTAAAATAAGGC | 21436 | 8 | 9 | 113 |
| WT_RT8_PB | TAGTCCGTTATCAACTTGAAAAAGTGGCACCGAGTCGGTGCCTCCTGAGGAGAAG | | | | |
| S9 | TCT | | | | |
| HBB8_corr | GTAACGGCAGACTTCTCCACGTTTTAGAGCTAGAAATAGCAAGTTAAAATAAGGC | 21437 | 8 | 8 | 112 |
| WT_RT8_PB | TAGTCCGTTATCAACTTGAAAAAGTGGCACCGAGTCGGTGCCTCCTGAGGAGAAG | | | | |
| S8 | TC | | | | |

TABLE 5D
Exemplary template RNA sequences
Table 5D provides design of exemplary DNA components of gene modifying
systems for correcting the pathogenic E6V mutation in HBB to the
Makassar form. This table details the sequence of a complete template
RNA for use in exemplary gene modifying systems comprising a gene
modifying polypeptide. Templates in this table employ the HBB8 spacer
(GTAACGGCAGACTTCTCCAC SEQ ID NO: 19971) and a gRNA scaffold sequence
of GTTTTAGAGCTAGAAATAGCAAGTTAAAATAAGGCTAGTCCGTTATCAACTTGAAAAAGTGGCAC
CGAGTCGGTGC (SEQ ID NO: 20923). For exemplification, the lengths of
the RT (heterologous object) sequences and PBS sequences were varied
at the 3′ end. The length of these respective sequences is reflected
in columns 3 and 4, respectively. The longest form of the RT sequence
is CCATGGTGCACCTGACTCCTGCG (SEQ ID NO: 21906). The longest form of
the PBS is GAGAAGTCTGCCGTTAC (SEQ ID NO: 20957).

| | | SEQ | | | |
|---|---|---|---|---|---|
| Sequence | | ID | RT | PBS | Total |
| Name | Full DNA sequence | NO | length | length | length |
| HBB8_ | GTAACGGCAGACTTCTCCACGTTTTAGAGCTAGAA | 21438 | 23 | 17 | 136 |
| corr_ | ATAGCAAGTTAAAATAAGGCTAGTCCGTTATCAAC | | | | |
| Mak_ | TTGAAAAAGTGGCACCGAGTCGGTGCCCATGGTGC | | | | |
| RT23_ | ACCTGACTCCTGCGGAGAAGTCTGCCGTTAC | | | | |
| PBS17 | | | | | |
| HBB8_ | GTAACGGCAGACTTCTCCACGTTTTAGAGCTAGAA | 21439 | 23 | 16 | 135 |
| corr_ | ATAGCAAGTTAAAATAAGGCTAGTCCGTTATCAAC | | | | |
| Mak_ | TTGAAAAAGTGGCACCGAGTCGGTGCCCATGGTGC | | | | |
| RT23_ | ACCTGACTCCTGCGGAGAAGTCTGCCGTTA | | | | |
| PBS16 | | | | | |
| HBB8_ | GTAACGGCAGACTTCTCCACGTTTTAGAGCTAGAA | 21440 | 23 | 15 | 134 |
| corr_ | ATAGCAAGTTAAAATAAGGCTAGTCCGTTATCAAC | | | | |
| Mak_ | TTGAAAAAGTGGCACCGAGTCGGTGCCCATGGTGC | | | | |
| RT23_ | ACCTGACTCCTGCGGAGAAGTCTGCCGTT | | | | |
| PBS15 | | | | | |
| HBB8_ | GTAACGGCAGACTTCTCCACGTTTTAGAGCTAGAA | 21441 | 23 | 14 | 133 |
| corr_ | ATAGCAAGTTAAAATAAGGCTAGTCCGTTATCAAC | | | | |
| Mak_ | TTGAAAAAGTGGCACCGAGTCGGTGCCCATGGTGC | | | | |
| RT23_ | ACCTGACTCCTGCGGAGAAGTCTGCCGT | | | | |
| PBS14 | | | | | |
| HBB8_ | GTAACGGCAGACTTCTCCACGTTTTAGAGCTAGAA | 21442 | 23 | 13 | 132 |
| corr_ | ATAGCAAGTTAAAATAAGGCTAGTCCGTTATCAAC | | | | |
| Mak_ | TTGAAAAAGTGGCACCGAGTCGGTGCCCATGGTGC | | | | |
| RT23_ | ACCTGACTCCTGCGGAGAAGTCTGCCG | | | | |
| PBS13 | | | | | |
| HBB8_ | GTAACGGCAGACTTCTCCACGTTTTAGAGCTAGAA | 21443 | 23 | 12 | 131 |
| corr_ | ATAGCAAGTTAAAATAAGGCTAGTCCGTTATCAAC | | | | |
| Mak_ | TTGAAAAAGTGGCACCGAGTCGGTGCCCATGGTGC | | | | |
| RT23_ | ACCTGACTCCTGCGGAGAAGTCTGCC | | | | |
| PBS12 | | | | | |
| HBB8_ | GTAACGGCAGACTTCTCCACGTTTTAGAGCTAGAA | 21444 | 23 | 11 | 130 |
| corr_ | ATAGCAAGTTAAAATAAGGCTAGTCCGTTATCAAC | | | | |
| Mak_ | TTGAAAAAGTGGCACCGAGTCGGTGCCCATGGTGC | | | | |
| RT23_ | ACCTGACTCCTGCGGAGAAGTCTGC | | | | |
| PBS11 | | | | | |
| HBB8_ | GTAACGGCAGACTTCTCCACGTTTTAGAGCTAGAA | 21445 | 23 | 10 | 129 |
| corr_ | ATAGCAAGTTAAAATAAGGCTAGTCCGTTATCAAC | | | | |
| Mak_ | TTGAAAAAGTGGCACCGAGTCGGTGCCCATGGTGC | | | | |
| RT23_ | ACCTGACTCCTGCGGAGAAGTCTG | | | | |
| PBS10 | | | | | |
| HBB8_ | GTAACGGCAGACTTCTCCACGTTTTAGAGCTAGAA | 21446 | 23 | 9 | 128 |
| corr_ | ATAGCAAGTTAAAATAAGGCTAGTCCGTTATCAAC | | | | |
| Mak_ | TTGAAAAAGTGGCACCGAGTCGGTGCCCATGGTGC | | | | |
| RT23_ | ACCTGACTCCTGCGGAGAAGTCT | | | | |
| PBS9 | | | | | |
| HBB8_ | GTAACGGCAGACTTCTCCACGTTTTAGAGCTAGAA | 21447 | 23 | 8 | 127 |
| corr_ | ATAGCAAGTTAAAATAAGGCTAGTCCGTTATCAAC | | | | |
| Mak_ | TTGAAAAAGTGGCACCGAGTCGGTGCCCATGGTGC | | | | |
| RT23_ | ACCTGACTCCTGCGGAGAAGTC | | | | |
| PBS8 | | | | | |
| HBB8_ | GTAACGGCAGACTTCTCCACGTTTTAGAGCTAGAA | 21448 | 22 | 17 | 135 |
| corr_ | ATAGCAAGTTAAAATAAGGCTAGTCCGTTATCAAC | | | | |
| Mak_ | TTGAAAAAGTGGCACCGAGTCGGTGCCATGGTGCA | | | | |
| RT22_ | CCTGACTCCTGCGGAGAAGTCTGCCGTTAC | | | | |
| PBS17 | | | | | |
| HBB8_ | GTAACGGCAGACTTCTCCACGTTTTAGAGCTAGAA | 21449 | 22 | 16 | 134 |
| corr_ | ATAGCAAGTTAAAATAAGGCTAGTCCGTTATCAAC | | | | |
| Mak_ | TTGAAAAAGTGGCACCGAGTCGGTGCCATGGTGCA | | | | |
| RT22_ | CCTGACTCCTGCGGAGAAGTCTGCCGTTA | | | | |
| PBS16 | | | | | |
| HBB8_ | GTAACGGCAGACTTCTCCACGTTTTAGAGCTAGAA | 21450 | 22 | 15 | 133 |
| corr_ | ATAGCAAGTTAAAATAAGGCTAGTCCGTTATCAAC | | | | |
| Mak_ | TTGAAAAAGTGGCACCGAGTCGGTGCCATGGTGCA | | | | |
| RT22_ | CCTGACTCCTGCGGAGAAGTCTGCCGTT | | | | |
| PBS15 | | | | | |
| HBB8_ | GTAACGGCAGACTTCTCCACGTTTTAGAGCTAGAA | 21451 | 22 | 14 | 132 |
| corr_ | ATAGCAAGTTAAAATAAGGCTAGTCCGTTATCAAC | | | | |
| Mak_ | TTGAAAAAGTGGCACCGAGTCGGTGCCATGGTGCA | | | | |
| RT22_ | CCTGACTCCTGCGGAGAAGTCTGCCGT | | | | |
| PBS14 | | | | | |
| HBB8_ | GTAACGGCAGACTTCTCCACGTTTTAGAGCTAGAA | 21452 | 22 | 13 | 131 |
| corr_ | ATAGCAAGTTAAAATAAGGCTAGTCCGTTATCAAC | | | | |
| Mak_ | TTGAAAAAGTGGCACCGAGTCGGTGCCATGGTGCA | | | | |
| RT22_ | CCTGACTCCTGCGGAGAAGTCTGCCG | | | | |
| PBS13 | | | | | |
| HBB8_ | GTAACGGCAGACTTCTCCACGTTTTAGAGCTAGAA | 21453 | 22 | 12 | 130 |
| corr_ | ATAGCAAGTTAAAATAAGGCTAGTCCGTTATCAAC | | | | |
| Mak_ | TTGAAAAAGTGGCACCGAGTCGGTGCCATGGTGCA | | | | |
| RT22_ | CCTGACTCCTGCGGAGAAGTCTGCC | | | | |
| PBS12 | | | | | |
| HBB8_ | GTAACGGCAGACTTCTCCACGTTTTAGAGCTAGAA | 21454 | 22 | 11 | 129 |
| corr_ | ATAGCAAGTTAAAATAAGGCTAGTCCGTTATCAAC | | | | |
| Mak_ | TTGAAAAAGTGGCACCGAGTCGGTGCCATGGTGCA | | | | |
| RT22_ | CCTGACTCCTGCGGAGAAGTCTGC | | | | |
| PBS11 | | | | | |
| HBB8_ | GTAACGGCAGACTTCTCCACGTTTTAGAGCTAGAA | 21455 | 22 | 10 | 128 |
| corr_ | ATAGCAAGTTAAAATAAGGCTAGTCCGTTATCAAC | | | | |
| Mak_ | TTGAAAAAGTGGCACCGAGTCGGTGCCATGGTGCA | | | | |
| RT22_ | CCTGACTCCTGCGGAGAAGTCTG | | | | |
| PBS10 | | | | | |
| HBB8_ | GTAACGGCAGACTTCTCCACGTTTTAGAGCTAGAA | 21456 | 22 | 9 | 127 |
| corr_ | ATAGCAAGTTAAAATAAGGCTAGTCCGTTATCAAC | | | | |
| Mak_ | TTGAAAAAGTGGCACCGAGTCGGTGCCATGGTGCA | | | | |
| RT22_ | CCTGACTCCTGCGGAGAAGTCT | | | | |
| PBS9 | | | | | |
| HBB8_ | GTAACGGCAGACTTCTCCACGTTTTAGAGCTAGAA | 21457 | 22 | 8 | 126 |
| corr_ | ATAGCAAGTTAAAATAAGGCTAGTCCGTTATCAAC | | | | |
| Mak_ | TTGAAAAAGTGGCACCGAGTCGGTGCCATGGTGCA | | | | |
| RT22_ | CCTGACTCCTGCGGAGAAGTC | | | | |
| PBS8 | | | | | |
| HBB8_ | GTAACGGCAGACTTCTCCACGTTTTAGAGCTAGAA | 21458 | 21 | 17 | 134 |
| corr_ | ATAGCAAGTTAAAATAAGGCTAGTCCGTTATCAAC | | | | |
| Mak_ | TTGAAAAAGTGGCACCGAGTCGGTGCATGGTGCAC | | | | |
| RT21_ | CTGACTCCTGCGGAGAAGTCTGCCGTTAC | | | | |
| PBS17 | | | | | |
| HBB8_ | GTAACGGCAGACTTCTCCACGTTTTAGAGCTAGAA | 21459 | 21 | 16 | 133 |
| corr_ | ATAGCAAGTTAAAATAAGGCTAGTCCGTTATCAAC | | | | |
| Mak_ | TTGAAAAAGTGGCACCGAGTCGGTGCATGGTGCAC | | | | |
| RT21_ | CTGACTCCTGCGGAGAAGTCTGCCGTTA | | | | |
| PBS16 | | | | | |
| HBB8_ | GTAACGGCAGACTTCTCCACGTTTTAGAGCTAGAA | 21460 | 21 | 15 | 132 |
| corr_ | ATAGCAAGTTAAAATAAGGCTAGTCCGTTATCAAC | | | | |
| Mak_ | TTGAAAAAGTGGCACCGAGTCGGTGCATGGTGCAC | | | | |
| RT21_ | CTGACTCCTGCGGAGAAGTCTGCCGTT | | | | |
| PBS15 | | | | | |
| HBB8_ | GTAACGGCAGACTTCTCCACGTTTTAGAGCTAGAA | 21461 | 21 | 14 | 131 |
| corr_ | ATAGCAAGTTAAAATAAGGCTAGTCCGTTATCAAC | | | | |
| Mak_ | TTGAAAAAGTGGCACCGAGTCGGTGCATGGTGCAC | | | | |
| RT21_ | CTGACTCCTGCGGAGAAGTCTGCCGT | | | | |
| PBS14 | | | | | |
| HBB8_ | GTAACGGCAGACTTCTCCACGTTTTAGAGCTAGAA | 21462 | 21 | 13 | 130 |
| corr_ | ATAGCAAGTTAAAATAAGGCTAGTCCGTTATCAAC | | | | |
| Mak_ | TTGAAAAAGTGGCACCGAGTCGGTGCATGGTGCAC | | | | |
| RT21_ | CTGACTCCTGCGGAGAAGTCTGCCG | | | | |
| PBS13 | | | | | |
| HBB8_ | GTAACGGCAGACTTCTCCACGTTTTAGAGCTAGAA | 21463 | 21 | 12 | 129 |
| corr_ | ATAGCAAGTTAAAATAAGGCTAGTCCGTTATCAAC | | | | |
| Mak_ | TTGAAAAAGTGGCACCGAGTCGGTGCATGGTGCAC | | | | |
| RT21_ | CTGACTCCTGCGGAGAAGTCTGCC | | | | |
| PBS12 | | | | | |
| HBB8_ | GTAACGGCAGACTTCTCCACGTTTTAGAGCTAGAA | 21464 | 21 | 11 | 128 |
| corr_ | ATAGCAAGTTAAAATAAGGCTAGTCCGTTATCAAC | | | | |
| Mak_ | TTGAAAAAGTGGCACCGAGTCGGTGCATGGTGCAC | | | | |
| RT21_ | CTGACTCCTGCGGAGAAGTCTGC | | | | |
| PBS11 | | | | | |
| HBB8_ | GTAACGGCAGACTTCTCCACGTTTTAGAGCTAGAA | 21465 | 21 | 10 | 127 |
| corr_ | ATAGCAAGTTAAAATAAGGCTAGTCCGTTATCAAC | | | | |
| Mak_ | TTGAAAAAGTGGCACCGAGTCGGTGCATGGTGCAC | | | | |
| RT21_ | CTGACTCCTGCGGAGAAGTCTG | | | | |
| PBS10 | | | | | |
| HBB8_ | GTAACGGCAGACTTCTCCACGTTTTAGAGCTAGAA | 21466 | 21 | 9 | 126 |
| corr_ | ATAGCAAGTTAAAATAAGGCTAGTCCGTTATCAAC | | | | |
| Mak_ | TTGAAAAAGTGGCACCGAGTCGGTGCATGGTGCAC | | | | |
| RT21_ | CTGACTCCTGCGGAGAAGTCT | | | | |
| PBS9 | | | | | |
| HBB8_ | GTAACGGCAGACTTCTCCACGTTTTAGAGCTAGAA | 21467 | 21 | 8 | 125 |
| corr_ | ATAGCAAGTTAAAATAAGGCTAGTCCGTTATCAAC | | | | |
| Mak_ | TTGAAAAAGTGGCACCGAGTCGGTGCATGGTGCAC | | | | |
| RT21_ | CTGACTCCTGCGGAGAAGTC | | | | |
| PBS8 | | | | | |
| HBB8_ | GTAACGGCAGACTTCTCCACGTTTTAGAGCTAGAA | 21468 | 20 | 17 | 133 |
| corr_ | ATAGCAAGTTAAAATAAGGCTAGTCCGTTATCAAC | | | | |
| Mak_ | TTGAAAAAGTGGCACCGAGTCGGTGCTGGTGCACC | | | | |
| RT20_ | TGACTCCTGCGGAGAAGTCTGCCGTTAC | | | | |
| PBS17 | | | | | |
| HBB8_ | GTAACGGCAGACTTCTCCACGTTTTAGAGCTAGAA | 21469 | 20 | 16 | 132 |
| corr_ | ATAGCAAGTTAAAATAAGGCTAGTCCGTTATCAAC | | | | |
| Mak_ | TTGAAAAAGTGGCACCGAGTCGGTGCTGGTGCACC | | | | |
| RT20_ | TGACTCCTGCGGAGAAGTCTGCCGTTA | | | | |
| PBS16 | | | | | |
| HBB8_ | GTAACGGCAGACTTCTCCACGTTTTAGAGCTAGAA | 21470 | 20 | 15 | 131 |
| corr_ | ATAGCAAGTTAAAATAAGGCTAGTCCGTTATCAAC | | | | |
| Mak_ | TTGAAAAAGTGGCACCGAGTCGGTGCTGGTGCACC | | | | |
| RT20_ | TGACTCCTGCGGAGAAGTCTGCCGTT | | | | |
| PBS15 | | | | | |
| HBB8_ | GTAACGGCAGACTTCTCCACGTTTTAGAGCTAGAA | 21471 | 20 | 14 | 130 |
| corr_ | ATAGCAAGTTAAAATAAGGCTAGTCCGTTATCAAC | | | | |
| Mak_ | TTGAAAAAGTGGCACCGAGTCGGTGCTGGTGCACC | | | | |
| RT20_ | TGACTCCTGCGGAGAAGTCTGCCGT | | | | |
| PBS14 | | | | | |
| HBB8_ | GTAACGGCAGACTTCTCCACGTTTTAGAGCTAGAA | 21472 | 20 | 13 | 129 |
| corr_ | ATAGCAAGTTAAAATAAGGCTAGTCCGTTATCAAC | | | | |
| Mak_ | TTGAAAAAGTGGCACCGAGTCGGTGCTGGTGCACC | | | | |
| RT20_ | TGACTCCTGCGGAGAAGTCTGCCG | | | | |
| PBS13 | | | | | |
| HBB8_ | GTAACGGCAGACTTCTCCACGTTTTAGAGCTAGAA | 21473 | 20 | 12 | 128 |
| corr_ | ATAGCAAGTTAAAATAAGGCTAGTCCGTTATCAAC | | | | |
| Mak_ | TTGAAAAAGTGGCACCGAGTCGGTGCTGGTGCACC | | | | |
| RT20_ | TGACTCCTGCGGAGAAGTCTGCC | | | | |
| PBS12 | | | | | |
| HBB8_ | GTAACGGCAGACTTCTCCACGTTTTAGAGCTAGAA | 21474 | 20 | 11 | 127 |
| corr_ | ATAGCAAGTTAAAATAAGGCTAGTCCGTTATCAAC | | | | |
| Mak_ | TTGAAAAAGTGGCACCGAGTCGGTGCTGGTGCACC | | | | |
| RT20_ | TGACTCCTGCGGAGAAGTCTGC | | | | |
| PBS11 | | | | | |
| HBB8_ | GTAACGGCAGACTTCTCCACGTTTTAGAGCTAGAA | 21475 | 20 | 10 | 126 |
| corr_ | ATAGCAAGTTAAAATAAGGCTAGTCCGTTATCAAC | | | | |
| Mak_ | TTGAAAAAGTGGCACCGAGTCGGTGCTGGTGCACC | | | | |
| RT20_ | TGACTCCTGCGGAGAAGTCTG | | | | |
| PBS10 | | | | | |
| HBB8_ | GTAACGGCAGACTTCTCCACGTTTTAGAGCTAGAA | 21476 | 20 | 9 | 125 |
| corr_ | ATAGCAAGTTAAAATAAGGCTAGTCCGTTATCAAC | | | | |
| Mak_ | TTGAAAAAGTGGCACCGAGTCGGTGCTGGTGCACC | | | | |
| RT20_ | TGACTCCTGCGGAGAAGTCT | | | | |
| PBS9 | | | | | |
| HBB8_ | GTAACGGCAGACTTCTCCACGTTTTAGAGCTAGAA | 21477 | 20 | 8 | 124 |
| corr_ | ATAGCAAGTTAAAATAAGGCTAGTCCGTTATCAAC | | | | |
| Mak_ | TTGAAAAAGTGGCACCGAGTCGGTGCTGGTGCACC | | | | |
| RT20_ | TGACTCCTGCGGAGAAGTC | | | | |
| PBS8 | | | | | |
| HBB8_ | GTAACGGCAGACTTCTCCACGTTTTAGAGCTAGAA | 21478 | 19 | 17 | 132 |
| corr_ | ATAGCAAGTTAAAATAAGGCTAGTCCGTTATCAAC | | | | |
| Mak_ | TTGAAAAAGTGGCACCGAGTCGGTGCGGTGCACCT | | | | |
| RT19_ | GACTCCTGCGGAGAAGTCTGCCGTTAC | | | | |
| PBS17 | | | | | |
| HBB8_ | GTAACGGCAGACTTCTCCACGTTTTAGAGCTAGAA | 21479 | 19 | 16 | 131 |
| corr_ | ATAGCAAGTTAAAATAAGGCTAGTCCGTTATCAAC | | | | |
| Mak_ | TTGAAAAAGTGGCACCGAGTCGGTGCGGTGCACCT | | | | |
| RT19_ | GACTCCTGCGGAGAAGTCTGCCGTTA | | | | |
| PBS16 | | | | | |
| HBB8_ | GTAACGGCAGACTTCTCCACGTTTTAGAGCTAGAA | 21480 | 19 | 15 | 130 |
| corr_ | ATAGCAAGTTAAAATAAGGCTAGTCCGTTATCAAC | | | | |
| Mak_ | TTGAAAAAGTGGCACCGAGTCGGTGCGGTGCACCT | | | | |
| RT19_ | GACTCCTGCGGAGAAGTCTGCCGTT | | | | |
| PBS15 | | | | | |
| HBB8_ | GTAACGGCAGACTTCTCCACGTTTTAGAGCTAGAA | 21481 | 19 | 14 | 129 |
| corr_ | ATAGCAAGTTAAAATAAGGCTAGTCCGTTATCAAC | | | | |
| Mak_ | TTGAAAAAGTGGCACCGAGTCGGTGCGGTGCACCT | | | | |
| RT19_ | GACTCCTGCGGAGAAGTCTGCCGT | | | | |
| PBS14 | | | | | |
| HBB8_ | GTAACGGCAGACTTCTCCACGTTTTAGAGCTAGAA | 21482 | 19 | 13 | 128 |
| corr_ | ATAGCAAGTTAAAATAAGGCTAGTCCGTTATCAAC | | | | |
| Mak_ | TTGAAAAAGTGGCACCGAGTCGGTGCGGTGCACCT | | | | |
| RT19_ | GACTCCTGCGGAGAAGTCTGCCG | | | | |
| PBS13 | | | | | |
| HBB8_ | GTAACGGCAGACTTCTCCACGTTTTAGAGCTAGAA | 21483 | 19 | 12 | 127 |
| corr_ | ATAGCAAGTTAAAATAAGGCTAGTCCGTTATCAAC | | | | |
| Mak_ | TTGAAAAAGTGGCACCGAGTCGGTGCGGTGCACCT | | | | |
| RT19_ | GACTCCTGCGGAGAAGTCTGCC | | | | |
| PBS12 | | | | | |
| HBB8_ | GTAACGGCAGACTTCTCCACGTTTTAGAGCTAGAA | 21484 | 19 | 11 | 126 |
| corr_ | ATAGCAAGTTAAAATAAGGCTAGTCCGTTATCAAC | | | | |
| Mak_ | TTGAAAAAGTGGCACCGAGTCGGTGCGGTGCACCT | | | | |
| RT19_ | GACTCCTGCGGAGAAGTCTGC | | | | |
| PBS11 | | | | | |
| HBB8_ | GTAACGGCAGACTTCTCCACGTTTTAGAGCTAGAA | 21485 | 19 | 10 | 125 |
| corr_ | ATAGCAAGTTAAAATAAGGCTAGTCCGTTATCAAC | | | | |
| Mak_ | TTGAAAAAGTGGCACCGAGTCGGTGCGGTGCACCT | | | | |
| RT19_ | GACTCCTGCGGAGAAGTCTG | | | | |
| PBS10 | | | | | |
| HBB8_ | GTAACGGCAGACTTCTCCACGTTTTAGAGCTAGAA | 21486 | 19 | 9 | 124 |
| corr_ | ATAGCAAGTTAAAATAAGGCTAGTCCGTTATCAAC | | | | |
| Mak_ | TTGAAAAAGTGGCACCGAGTCGGTGCGGTGCACCT | | | | |
| RT19_ | GACTCCTGCGGAGAAGTCT | | | | |
| PBS9 | | | | | |
| HBB8_ | GTAACGGCAGACTTCTCCACGTTTTAGAGCTAGAA | 21487 | 19 | 8 | 123 |
| corr_ | ATAGCAAGTTAAAATAAGGCTAGTCCGTTATCAAC | | | | |
| Mak_ | TTGAAAAAGTGGCACCGAGTCGGTGCGGTGCACCT | | | | |
| RT19_ | GACTCCTGCGGAGAAGTC | | | | |
| PBS8 | | | | | |
| HBB8_ | GTAACGGCAGACTTCTCCACGTTTTAGAGCTAGAA | 21488 | 18 | 17 | 131 |
| corr_ | ATAGCAAGTTAAAATAAGGCTAGTCCGTTATCAAC | | | | |
| Mak_ | TTGAAAAAGTGGCACCGAGTCGGTGCGTGCACCTG | | | | |
| RT18_ | ACTCCTGCGGAGAAGTCTGCCGTTAC | | | | |
| PBS17 | | | | | |
| HBB8_ | GTAACGGCAGACTTCTCCACGTTTTAGAGCTAGAA | 21489 | 18 | 16 | 130 |
| corr_ | ATAGCAAGTTAAAATAAGGCTAGTCCGTTATCAAC | | | | |
| Mak_ | TTGAAAAAGTGGCACCGAGTCGGTGCGTGCACCTG | | | | |
| RT18_ | ACTCCTGCGGAGAAGTCTGCCGTTA | | | | |
| PBS16 | | | | | |
| HBB8_ | GTAACGGCAGACTTCTCCACGTTTTAGAGCTAGAA | 21490 | 18 | 15 | 129 |
| corr_ | ATAGCAAGTTAAAATAAGGCTAGTCCGTTATCAAC | | | | |
| Mak_ | TTGAAAAAGTGGCACCGAGTCGGTGCGTGCACCTG | | | | |
| RT18_ | ACTCCTGCGGAGAAGTCTGCCGTT | | | | |
| PBS15 | | | | | |
| HBB8_ | GTAACGGCAGACTTCTCCACGTTTTAGAGCTAGAA | 21491 | 18 | 14 | 128 |
| corr_ | ATAGCAAGTTAAAATAAGGCTAGTCCGTTATCAAC | | | | |
| Mak_ | TTGAAAAAGTGGCACCGAGTCGGTGCGTGCACCTG | | | | |
| RT18_ | ACTCCTGCGGAGAAGTCTGCCGT | | | | |
| PBS14 | | | | | |
| HBB8_ | GTAACGGCAGACTTCTCCACGTTTTAGAGCTAGAA | 21492 | 18 | 13 | 127 |
| corr_ | ATAGCAAGTTAAAATAAGGCTAGTCCGTTATCAAC | | | | |
| Mak_ | TTGAAAAAGTGGCACCGAGTCGGTGCGTGCACCTG | | | | |
| RT18_ | ACTCCTGCGGAGAAGTCTGCCG | | | | |
| PBS13 | | | | | |
| HBB8_ | GTAACGGCAGACTTCTCCACGTTTTAGAGCTAGAA | 21493 | 18 | 12 | 126 |
| corr_ | ATAGCAAGTTAAAATAAGGCTAGTCCGTTATCAAC | | | | |
| Mak_ | TTGAAAAAGTGGCACCGAGTCGGTGCGTGCACCTG | | | | |
| RT18_ | ACTCCTGCGGAGAAGTCTGCC | | | | |
| PBS12 | | | | | |
| HBB8_ | GTAACGGCAGACTTCTCCACGTTTTAGAGCTAGAA | 21494 | 18 | 11 | 125 |
| corr_ | ATAGCAAGTTAAAATAAGGCTAGTCCGTTATCAAC | | | | |
| Mak_ | TTGAAAAAGTGGCACCGAGTCGGTGCGTGCACCTG | | | | |
| RT18_ | ACTCCTGCGGAGAAGTCTGC | | | | |
| PBS11 | | | | | |
| HBB8_ | GTAACGGCAGACTTCTCCACGTTTTAGAGCTAGAA | 21495 | 18 | 10 | 124 |
| corr_ | ATAGCAAGTTAAAATAAGGCTAGTCCGTTATCAAC | | | | |
| Mak_ | TTGAAAAAGTGGCACCGAGTCGGTGCGTGCACCTG | | | | |
| RT18_ | ACTCCTGCGGAGAAGTCTG | | | | |
| PBS10 | | | | | |
| HBB8_ | GTAACGGCAGACTTCTCCACGTTTTAGAGCTAGAA | 21496 | 18 | 9 | 123 |
| corr_ | ATAGCAAGTTAAAATAAGGCTAGTCCGTTATCAAC | | | | |
| Mak_ | TTGAAAAAGTGGCACCGAGTCGGTGCGTGCACCTG | | | | |
| RT18_ | ACTCCTGCGGAGAAGTCT | | | | |
| PBS9 | | | | | |
| HBB8_ | GTAACGGCAGACTTCTCCACGTTTTAGAGCTAGAA | 21497 | 18 | 8 | 122 |
| corr_ | ATAGCAAGTTAAAATAAGGCTAGTCCGTTATCAAC | | | | |
| Mak_ | TTGAAAAAGTGGCACCGAGTCGGTGCGTGCACCTG | | | | |
| RT18_ | ACTCCTGCGGAGAAGTC | | | | |
| PBS8 | | | | | |
| HBB8_ | GTAACGGCAGACTTCTCCACGTTTTAGAGCTAGAA | 21498 | 17 | 17 | 130 |
| corr_ | ATAGCAAGTTAAAATAAGGCTAGTCCGTTATCAAC | | | | |
| Mak_ | TTGAAAAAGTGGCACCGAGTCGGTGCTGCACCTGA | | | | |
| RT17_ | CTCCTGCGGAGAAGTCTGCCGTTAC | | | | |
| PBS17 | | | | | |
| HBB8_ | GTAACGGCAGACTTCTCCACGTTTTAGAGCTAGAA | 21499 | 17 | 16 | 129 |
| corr_ | ATAGCAAGTTAAAATAAGGCTAGTCCGTTATCAAC | | | | |
| Mak_ | TTGAAAAAGTGGCACCGAGTCGGTGCTGCACCTGA | | | | |
| RT17_ | CTCCTGCGGAGAAGTCTGCCGTTA | | | | |
| PBS16 | | | | | |
| HBB8_ | GTAACGGCAGACTTCTCCACGTTTTAGAGCTAGAA | 21500 | 17 | 15 | 128 |
| corr_ | ATAGCAAGTTAAAATAAGGCTAGTCCGTTATCAAC | | | | |
| Mak_ | TTGAAAAAGTGGCACCGAGTCGGTGCTGCACCTGA | | | | |
| RT17_ | CTCCTGCGGAGAAGTCTGCCGTT | | | | |
| PBS15 | | | | | |
| HBB8_ | GTAACGGCAGACTTCTCCACGTTTTAGAGCTAGAA | 21501 | 17 | 14 | 127 |
| corr_ | ATAGCAAGTTAAAATAAGGCTAGTCCGTTATCAAC | | | | |
| Mak_ | TTGAAAAAGTGGCACCGAGTCGGTGCTGCACCTGA | | | | |
| RT17_ | CTCCTGCGGAGAAGTCTGCCGT | | | | |
| PBS14 | | | | | |
| HBB8_ | GTAACGGCAGACTTCTCCACGTTTTAGAGCTAGAA | 21502 | 17 | 13 | 126 |
| corr_ | ATAGCAAGTTAAAATAAGGCTAGTCCGTTATCAAC | | | | |
| Mak_ | TTGAAAAAGTGGCACCGAGTCGGTGCTGCACCTGA | | | | |
| RT17_ | CTCCTGCGGAGAAGTCTGCCG | | | | |
| PBS13 | | | | | |
| HBB8_ | GTAACGGCAGACTTCTCCACGTTTTAGAGCTAGAA | 21503 | 17 | 12 | 125 |
| corr_ | ATAGCAAGTTAAAATAAGGCTAGTCCGTTATCAAC | | | | |
| Mak_ | TTGAAAAAGTGGCACCGAGTCGGTGCTGCACCTGA | | | | |
| RT17_ | CTCCTGCGGAGAAGTCTGCC | | | | |
| PBS12 | | | | | |
| HBB8_ | GTAACGGCAGACTTCTCCACGTTTTAGAGCTAGAA | 21504 | 17 | 11 | 124 |
| corr_ | ATAGCAAGTTAAAATAAGGCTAGTCCGTTATCAAC | | | | |
| Mak_ | TTGAAAAAGTGGCACCGAGTCGGTGCTGCACCTGA | | | | |
| RT17_ | CTCCTGCGGAGAAGTCTGC | | | | |
| PBS11 | | | | | |
| HBB8_ | GTAACGGCAGACTTCTCCACGTTTTAGAGCTAGAA | 21505 | 17 | 10 | 123 |
| corr_ | ATAGCAAGTTAAAATAAGGCTAGTCCGTTATCAAC | | | | |
| Mak_ | TTGAAAAAGTGGCACCGAGTCGGTGCTGCACCTGA | | | | |
| RT17_ | CTCCTGCGGAGAAGTCTG | | | | |
| PBS10 | | | | | |
| HBB8_ | GTAACGGCAGACTTCTCCACGTTTTAGAGCTAGAA | 21506 | 17 | 9 | 122 |
| corr_ | ATAGCAAGTTAAAATAAGGCTAGTCCGTTATCAAC | | | | |
| Mak_ | TTGAAAAAGTGGCACCGAGTCGGTGCTGCACCTGA | | | | |
| RT17_ | CTCCTGCGGAGAAGTCT | | | | |
| PBS9 | | | | | |
| HBB8_ | GTAACGGCAGACTTCTCCACGTTTTAGAGCTAGAA | 21507 | 17 | 8 | 121 |
| corr_ | ATAGCAAGTTAAAATAAGGCTAGTCCGTTATCAAC | | | | |
| Mak_ | TTGAAAAAGTGGCACCGAGTCGGTGCTGCACCTGA | | | | |
| RT17_ | CTCCTGCGGAGAAGTC | | | | |
| PBS8 | | | | | |
| HBB8_ | GTAACGGCAGACTTCTCCACGTTTTAGAGCTAGAA | 21508 | 16 | 17 | 129 |
| corr_ | ATAGCAAGTTAAAATAAGGCTAGTCCGTTATCAAC | | | | |
| Mak_ | TTGAAAAAGTGGCACCGAGTCGGTGCGCACCTGAC | | | | |
| RT16_ | TCCTGCGGAGAAGTCTGCCGTTAC | | | | |
| PBS17 | | | | | |
| HBB8_ | GTAACGGCAGACTTCTCCACGTTTTAGAGCTAGAA | 21509 | 16 | 16 | 128 |
| corr_ | ATAGCAAGTTAAAATAAGGCTAGTCCGTTATCAAC | | | | |
| Mak_ | TTGAAAAAGTGGCACCGAGTCGGTGCGCACCTGAC | | | | |
| RT16_ | TCCTGCGGAGAAGTCTGCCGTTA | | | | |
| PBS16 | | | | | |
| HBB8_ | GTAACGGCAGACTTCTCCACGTTTTAGAGCTAGAA | 21510 | 16 | 15 | 127 |
| corr_ | ATAGCAAGTTAAAATAAGGCTAGTCCGTTATCAAC | | | | |
| Mak_ | TTGAAAAAGTGGCACCGAGTCGGTGCGCACCTGAC | | | | |
| RT16_ | TCCTGCGGAGAAGTCTGCCGTT | | | | |
| PBS15 | | | | | |
| HBB8_ | GTAACGGCAGACTTCTCCACGTTTTAGAGCTAGAA | 21511 | 16 | 14 | 126 |
| corr_ | ATAGCAAGTTAAAATAAGGCTAGTCCGTTATCAAC | | | | |
| Mak_ | TTGAAAAAGTGGCACCGAGTCGGTGCGCACCTGAC | | | | |
| RT16_ | TCCTGCGGAGAAGTCTGCCGT | | | | |
| PBS14 | | | | | |
| HBB8_ | GTAACGGCAGACTTCTCCACGTTTTAGAGCTAGAA | 21512 | 16 | 13 | 125 |
| corr_ | ATAGCAAGTTAAAATAAGGCTAGTCCGTTATCAAC | | | | |
| Mak_ | TTGAAAAAGTGGCACCGAGTCGGTGCGCACCTGAC | | | | |
| RT16_ | TCCTGCGGAGAAGTCTGCCG | | | | |
| PBS13 | | | | | |
| HBB8_ | GTAACGGCAGACTTCTCCACGTTTTAGAGCTAGAA | 21513 | 16 | 12 | 124 |
| corr_ | ATAGCAAGTTAAAATAAGGCTAGTCCGTTATCAAC | | | | |
| Mak_ | TTGAAAAAGTGGCACCGAGTCGGTGCGCACCTGAC | | | | |
| RT16_ | TCCTGCGGAGAAGTCTGCC | | | | |
| PBS12 | | | | | |
| HBB8_ | GTAACGGCAGACTTCTCCACGTTTTAGAGCTAGAA | 21514 | 16 | 11 | 123 |
| corr_ | ATAGCAAGTTAAAATAAGGCTAGTCCGTTATCAAC | | | | |
| Mak_ | TTGAAAAAGTGGCACCGAGTCGGTGCGCACCTGAC | | | | |
| RT16_ | TCCTGCGGAGAAGTCTGC | | | | |
| PBS11 | | | | | |
| HBB8_ | GTAACGGCAGACTTCTCCACGTTTTAGAGCTAGAA | 21515 | 16 | 10 | 122 |
| corr_ | ATAGCAAGTTAAAATAAGGCTAGTCCGTTATCAAC | | | | |
| Mak_ | TTGAAAAAGTGGCACCGAGTCGGTGCGCACCTGAC | | | | |
| RT16_ | TCCTGCGGAGAAGTCTG | | | | |
| PBS10 | | | | | |
| HBB8_ | GTAACGGCAGACTTCTCCACGTTTTAGAGCTAGAA | 21516 | 16 | 9 | 121 |
| corr_ | ATAGCAAGTTAAAATAAGGCTAGTCCGTTATCAAC | | | | |
| Mak_ | TTGAAAAAGTGGCACCGAGTCGGTGCGCACCTGAC | | | | |
| RT16_ | TCCTGCGGAGAAGTCT | | | | |
| PBS9 | | | | | |
| HBB8_ | GTAACGGCAGACTTCTCCACGTTTTAGAGCTAGAA | 21517 | 16 | 8 | 120 |
| corr_ | ATAGCAAGTTAAAATAAGGCTAGTCCGTTATCAAC | | | | |
| Mak_ | TTGAAAAAGTGGCACCGAGTCGGTGCGCACCTGAC | | | | |
| RT16_ | TCCTGCGGAGAAGTC | | | | |
| PBS8 | | | | | |
| HBB8_ | GTAACGGCAGACTTCTCCACGTTTTAGAGCTAGAA | 21518 | 15 | 17 | 128 |
| corr_ | ATAGCAAGTTAAAATAAGGCTAGTCCGTTATCAAC | | | | |
| Mak_ | TTGAAAAAGTGGCACCGAGTCGGTGCCACCTGACT | | | | |
| RT15_ | CCTGCGGAGAAGTCTGCCGTTAC | | | | |
| PBS17 | | | | | |
| HBB8_ | GTAACGGCAGACTTCTCCACGTTTTAGAGCTAGAA | 21519 | 15 | 16 | 127 |
| corr_ | ATAGCAAGTTAAAATAAGGCTAGTCCGTTATCAAC | | | | |
| Mak_ | TTGAAAAAGTGGCACCGAGTCGGTGCCACCTGACT | | | | |
| RT15_ | CCTGCGGAGAAGTCTGCCGTTA | | | | |
| PBS16 | | | | | |
| HBB8_ | GTAACGGCAGACTTCTCCACGTTTTAGAGCTAGAA | 21520 | 15 | 15 | 126 |
| corr_ | ATAGCAAGTTAAAATAAGGCTAGTCCGTTATCAAC | | | | |
| Mak_ | TTGAAAAAGTGGCACCGAGTCGGTGCCACCTGACT | | | | |
| RT15_ | CCTGCGGAGAAGTCTGCCGTT | | | | |
| PBS15 | | | | | |
| HBB8_ | GTAACGGCAGACTTCTCCACGTTTTAGAGCTAGAA | 21521 | 15 | 14 | 125 |
| corr_ | ATAGCAAGTTAAAATAAGGCTAGTCCGTTATCAAC | | | | |
| Mak_ | TTGAAAAAGTGGCACCGAGTCGGTGCCACCTGACT | | | | |
| RT15_ | CCTGCGGAGAAGTCTGCCGT | | | | |
| PBS14 | | | | | |
| HBB8_ | GTAACGGCAGACTTCTCCACGTTTTAGAGCTAGAA | 21522 | 15 | 13 | 124 |
| corr_ | ATAGCAAGTTAAAATAAGGCTAGTCCGTTATCAAC | | | | |
| Mak_ | TTGAAAAAGTGGCACCGAGTCGGTGCCACCTGACT | | | | |
| RT15_ | CCTGCGGAGAAGTCTGCCG | | | | |
| PBS13 | | | | | |
| HBB8_ | GTAACGGCAGACTTCTCCACGTTTTAGAGCTAGAA | 21523 | 15 | 12 | 123 |
| corr_ | ATAGCAAGTTAAAATAAGGCTAGTCCGTTATCAAC | | | | |
| Mak_ | TTGAAAAAGTGGCACCGAGTCGGTGCCACCTGACT | | | | |
| RT15_ | CCTGCGGAGAAGTCTGCC | | | | |
| PBS12 | | | | | |
| HBB8_ | GTAACGGCAGACTTCTCCACGTTTTAGAGCTAGAA | 21524 | 15 | 11 | 122 |
| corr_ | ATAGCAAGTTAAAATAAGGCTAGTCCGTTATCAAC | | | | |
| Mak_ | TTGAAAAAGTGGCACCGAGTCGGTGCCACCTGACT | | | | |
| RT15_ | CCTGCGGAGAAGTCTGC | | | | |
| PBS11 | | | | | |
| HBB8_ | GTAACGGCAGACTTCTCCACGTTTTAGAGCTAGAA | 21525 | 15 | 10 | 121 |
| corr_ | ATAGCAAGTTAAAATAAGGCTAGTCCGTTATCAAC | | | | |
| Mak_ | TTGAAAAAGTGGCACCGAGTCGGTGCCACCTGACT | | | | |
| RT15_ | CCTGCGGAGAAGTCTG | | | | |
| PBS10 | | | | | |
| HBB8_ | GTAACGGCAGACTTCTCCACGTTTTAGAGCTAGAA | 21526 | 15 | 9 | 120 |
| corr_ | ATAGCAAGTTAAAATAAGGCTAGTCCGTTATCAAC | | | | |
| Mak_ | TTGAAAAAGTGGCACCGAGTCGGTGCCACCTGACT | | | | |
| RT15_ | CCTGCGGAGAAGTCT | | | | |
| PBS9 | | | | | |
| HBB8_ | GTAACGGCAGACTTCTCCACGTTTTAGAGCTAGAA | 21527 | 15 | 8 | 119 |
| corr_ | ATAGCAAGTTAAAATAAGGCTAGTCCGTTATCAAC | | | | |
| Mak_ | TTGAAAAAGTGGCACCGAGTCGGTGCCACCTGACT | | | | |
| RT15_ | CCTGCGGAGAAGTC | | | | |
| PBS8 | | | | | |
| HBB8_ | GTAACGGCAGACTTCTCCACGTTTTAGAGCTAGAA | 21528 | 14 | 17 | 127 |
| corr_ | ATAGCAAGTTAAAATAAGGCTAGTCCGTTATCAAC | | | | |
| Mak_ | TTGAAAAAGTGGCACCGAGTCGGTGCACCTGACTC | | | | |
| RT14_ | CTGCGGAGAAGTCTGCCGTTAC | | | | |
| PBS17 | | | | | |
| HBB8_ | GTAACGGCAGACTTCTCCACGTTTTAGAGCTAGAA | 21529 | 14 | 16 | 126 |
| corr_ | ATAGCAAGTTAAAATAAGGCTAGTCCGTTATCAAC | | | | |
| Mak_ | TTGAAAAAGTGGCACCGAGTCGGTGCACCTGACTC | | | | |
| RT14_ | CTGCGGAGAAGTCTGCCGTTA | | | | |
| PBS16 | | | | | |
| HBB8_ | GTAACGGCAGACTTCTCCACGTTTTAGAGCTAGAA | 21530 | 14 | 15 | 125 |
| corr_ | ATAGCAAGTTAAAATAAGGCTAGTCCGTTATCAAC | | | | |
| Mak_ | TTGAAAAAGTGGCACCGAGTCGGTGCACCTGACTC | | | | |
| RT14_ | CTGCGGAGAAGTCTGCCGTT | | | | |
| PBS15 | | | | | |
| HBB8_ | GTAACGGCAGACTTCTCCACGTTTTAGAGCTAGAA | 21531 | 14 | 14 | 124 |
| corr_ | ATAGCAAGTTAAAATAAGGCTAGTCCGTTATCAAC | | | | |
| Mak_ | TTGAAAAAGTGGCACCGAGTCGGTGCACCTGACTC | | | | |
| RT14_ | CTGCGGAGAAGTCTGCCGT | | | | |
| PBS14 | | | | | |
| HBB8_ | GTAACGGCAGACTTCTCCACGTTTTAGAGCTAGAA | 21532 | 14 | 13 | 123 |
| corr_ | ATAGCAAGTTAAAATAAGGCTAGTCCGTTATCAAC | | | | |
| Mak_ | TTGAAAAAGTGGCACCGAGTCGGTGCACCTGACTC | | | | |
| RT14_ | CTGCGGAGAAGTCTGCCG | | | | |
| PBS13 | | | | | |
| HBB8_ | GTAACGGCAGACTTCTCCACGTTTTAGAGCTAGAA | 21533 | 14 | 12 | 122 |
| corr_ | ATAGCAAGTTAAAATAAGGCTAGTCCGTTATCAAC | | | | |
| Mak_ | TTGAAAAAGTGGCACCGAGTCGGTGCACCTGACTC | | | | |
| RT14_ | CTGCGGAGAAGTCTGCC | | | | |
| PBS12 | | | | | |
| HBB8_ | GTAACGGCAGACTTCTCCACGTTTTAGAGCTAGAA | 21534 | 14 | 11 | 121 |
| corr_ | ATAGCAAGTTAAAATAAGGCTAGTCCGTTATCAAC | | | | |
| Mak_ | TTGAAAAAGTGGCACCGAGTCGGTGCACCTGACTC | | | | |
| RT14_ | CTGCGGAGAAGTCTGC | | | | |
| PBS11 | | | | | |
| HBB8_ | GTAACGGCAGACTTCTCCACGTTTTAGAGCTAGAA | 21535 | 14 | 10 | 120 |
| corr_ | ATAGCAAGTTAAAATAAGGCTAGTCCGTTATCAAC | | | | |
| Mak_ | TTGAAAAAGTGGCACCGAGTCGGTGCACCTGACTC | | | | |
| RT14_ | CTGCGGAGAAGTCTG | | | | |
| PBS10 | | | | | |
| HBB8_ | GTAACGGCAGACTTCTCCACGTTTTAGAGCTAGAA | 21536 | 14 | 9 | 119 |
| corr_ | ATAGCAAGTTAAAATAAGGCTAGTCCGTTATCAAC | | | | |
| Mak_ | TTGAAAAAGTGGCACCGAGTCGGTGCACCTGACTC | | | | |
| RT14_ | CTGCGGAGAAGTCT | | | | |
| PBS9 | | | | | |
| HBB8_ | GTAACGGCAGACTTCTCCACGTTTTAGAGCTAGAA | 21537 | 14 | 8 | 118 |
| corr_ | ATAGCAAGTTAAAATAAGGCTAGTCCGTTATCAAC | | | | |
| Mak_ | TTGAAAAAGTGGCACCGAGTCGGTGCACCTGACTC | | | | |
| RT14_ | CTGCGGAGAAGTC | | | | |
| PBS8 | | | | | |
| HBB8_ | GTAACGGCAGACTTCTCCACGTTTTAGAGCTAGAA | 21538 | 13 | 17 | 126 |
| corr_ | ATAGCAAGTTAAAATAAGGCTAGTCCGTTATCAAC | | | | |
| Mak_ | TTGAAAAAGTGGCACCGAGTCGGTGCCCTGACTCC | | | | |
| RT13_ | TGCGGAGAAGTCTGCCGTTAC | | | | |
| PBS17 | | | | | |
| HBB8_ | GTAACGGCAGACTTCTCCACGTTTTAGAGCTAGAA | 21539 | 13 | 16 | 125 |
| corr_ | ATAGCAAGTTAAAATAAGGCTAGTCCGTTATCAAC | | | | |
| Mak_ | TTGAAAAAGTGGCACCGAGTCGGTGCCCTGACTCC | | | | |
| RT13_ | TGCGGAGAAGTCTGCCGTTA | | | | |
| PBS16 | | | | | |
| HBB8_ | GTAACGGCAGACTTCTCCACGTTTTAGAGCTAGAA | 21540 | 13 | 15 | 124 |
| corr_ | ATAGCAAGTTAAAATAAGGCTAGTCCGTTATCAAC | | | | |
| Mak_ | TTGAAAAAGTGGCACCGAGTCGGTGCCCTGACTCC | | | | |
| RT13_ | TGCGGAGAAGTCTGCCGTT | | | | |
| PBS15 | | | | | |
| HBB8_ | GTAACGGCAGACTTCTCCACGTTTTAGAGCTAGAA | 21541 | 13 | 14 | 123 |
| corr_ | ATAGCAAGTTAAAATAAGGCTAGTCCGTTATCAAC | | | | |
| Mak_ | TTGAAAAAGTGGCACCGAGTCGGTGCCCTGACTCC | | | | |
| RT13_ | TGCGGAGAAGTCTGCCGT | | | | |
| PBS14 | | | | | |
| HBB8_ | GTAACGGCAGACTTCTCCACGTTTTAGAGCTAGAA | 21542 | 13 | 13 | 122 |
| corr_ | ATAGCAAGTTAAAATAAGGCTAGTCCGTTATCAAC | | | | |
| Mak_ | TTGAAAAAGTGGCACCGAGTCGGTGCCCTGACTCC | | | | |
| RT13_ | TGCGGAGAAGTCTGCCG | | | | |
| PBS13 | | | | | |
| HBB8_ | GTAACGGCAGACTTCTCCACGTTTTAGAGCTAGAA | 21543 | 13 | 12 | 121 |
| corr_ | ATAGCAAGTTAAAATAAGGCTAGTCCGTTATCAAC | | | | |
| Mak_ | TTGAAAAAGTGGCACCGAGTCGGTGCCCTGACTCC | | | | |
| RT13_ | TGCGGAGAAGTCTGCC | | | | |
| PBS12 | | | | | |
| HBB8_ | GTAACGGCAGACTTCTCCACGTTTTAGAGCTAGAA | 21544 | 13 | 11 | 120 |
| corr_ | ATAGCAAGTTAAAATAAGGCTAGTCCGTTATCAAC | | | | |
| Mak_ | TTGAAAAAGTGGCACCGAGTCGGTGCCCTGACTCC | | | | |
| RT13_ | TGCGGAGAAGTCTGC | | | | |
| PBS11 | | | | | |
| HBB8_ | GTAACGGCAGACTTCTCCACGTTTTAGAGCTAGAA | 21545 | 13 | 10 | 119 |
| corr_ | ATAGCAAGTTAAAATAAGGCTAGTCCGTTATCAAC | | | | |
| Mak_ | TTGAAAAAGTGGCACCGAGTCGGTGCCCTGACTCC | | | | |
| RT13_ | TGCGGAGAAGTCTG | | | | |
| PBS10 | | | | | |
| HBB8_ | GTAACGGCAGACTTCTCCACGTTTTAGAGCTAGAA | 21546 | 13 | 9 | 118 |
| corr_ | ATAGCAAGTTAAAATAAGGCTAGTCCGTTATCAAC | | | | |
| Mak_ | TTGAAAAAGTGGCACCGAGTCGGTGCCCTGACTCC | | | | |
| RT13_ | TGCGGAGAAGTCT | | | | |
| PBS9 | | | | | |
| HBB8_ | GTAACGGCAGACTTCTCCACGTTTTAGAGCTAGAA | 21547 | 13 | 8 | 117 |
| corr_ | ATAGCAAGTTAAAATAAGGCTAGTCCGTTATCAAC | | | | |
| Mak_ | TTGAAAAAGTGGCACCGAGTCGGTGCCCTGACTCC | | | | |
| RT13_ | TGCGGAGAAGTC | | | | |
| PBS8 | | | | | |
| HBB8_ | GTAACGGCAGACTTCTCCACGTTTTAGAGCTAGAA | 21548 | 12 | 17 | 125 |
| corr_ | ATAGCAAGTTAAAATAAGGCTAGTCCGTTATCAAC | | | | |
| Mak_ | TTGAAAAAGTGGCACCGAGTCGGTGCCTGACTCCT | | | | |
| RT12_ | GCGGAGAAGTCTGCCGTTAC | | | | |
| PBS17 | | | | | |
| HBB8_ | GTAACGGCAGACTTCTCCACGTTTTAGAGCTAGAA | 21549 | 12 | 16 | 124 |
| corr_ | ATAGCAAGTTAAAATAAGGCTAGTCCGTTATCAAC | | | | |
| Mak_ | TTGAAAAAGTGGCACCGAGTCGGTGCCTGACTCCT | | | | |
| RT12_ | GCGGAGAAGTCTGCCGTTA | | | | |
| PBS16 | | | | | |
| HBB8_ | GTAACGGCAGACTTCTCCACGTTTTAGAGCTAGAA | 21550 | 12 | 15 | 123 |
| corr_ | ATAGCAAGTTAAAATAAGGCTAGTCCGTTATCAAC | | | | |
| Mak_ | TTGAAAAAGTGGCACCGAGTCGGTGCCTGACTCCT | | | | |
| RT12_ | GCGGAGAAGTCTGCCGTT | | | | |
| PBS15 | | | | | |
| HBB8_ | GTAACGGCAGACTTCTCCACGTTTTAGAGCTAGAA | 21551 | 12 | 14 | 122 |
| corr_ | ATAGCAAGTTAAAATAAGGCTAGTCCGTTATCAAC | | | | |
| Mak_ | TTGAAAAAGTGGCACCGAGTCGGTGCCTGACTCCT | | | | |
| RT12_ | GCGGAGAAGTCTGCCGT | | | | |
| PBS14 | | | | | |
| HBB8_ | GTAACGGCAGACTTCTCCACGTTTTAGAGCTAGAA | 21552 | 12 | 13 | 121 |
| corr_ | ATAGCAAGTTAAAATAAGGCTAGTCCGTTATCAAC | | | | |
| Mak_ | TTGAAAAAGTGGCACCGAGTCGGTGCCTGACTCCT | | | | |
| RT12_ | GCGGAGAAGTCTGCCG | | | | |
| PBS13 | | | | | |
| HBB8_ | GTAACGGCAGACTTCTCCACGTTTTAGAGCTAGAA | 21553 | 12 | 12 | 120 |
| corr_ | ATAGCAAGTTAAAATAAGGCTAGTCCGTTATCAAC | | | | |
| Mak_ | TTGAAAAAGTGGCACCGAGTCGGTGCCTGACTCCT | | | | |
| RT12_ | GCGGAGAAGTCTGCC | | | | |
| PBS12 | | | | | |
| HBB8_ | GTAACGGCAGACTTCTCCACGTTTTAGAGCTAGAA | 21554 | 12 | 11 | 119 |
| corr_ | ATAGCAAGTTAAAATAAGGCTAGTCCGTTATCAAC | | | | |
| Mak_ | TTGAAAAAGTGGCACCGAGTCGGTGCCTGACTCCT | | | | |
| RT12_ | GCGGAGAAGTCTGC | | | | |
| PBS11 | | | | | |
| HBB8_ | GTAACGGCAGACTTCTCCACGTTTTAGAGCTAGAA | 21555 | 12 | 10 | 118 |
| corr_ | ATAGCAAGTTAAAATAAGGCTAGTCCGTTATCAAC | | | | |
| Mak_ | TTGAAAAAGTGGCACCGAGTCGGTGCCTGACTCCT | | | | |
| RT12_ | GCGGAGAAGTCTG | | | | |
| PBS10 | | | | | |
| HBB8_ | GTAACGGCAGACTTCTCCACGTTTTAGAGCTAGAA | 21556 | 12 | 9 | 117 |
| corr_ | ATAGCAAGTTAAAATAAGGCTAGTCCGTTATCAAC | | | | |
| Mak_ | TTGAAAAAGTGGCACCGAGTCGGTGCCTGACTCCT | | | | |
| RT12_ | GCGGAGAAGTCT | | | | |
| PBS9 | | | | | |
| HBB8_ | GTAACGGCAGACTTCTCCACGTTTTAGAGCTAGAA | 21557 | 12 | 8 | 116 |
| corr_ | ATAGCAAGTTAAAATAAGGCTAGTCCGTTATCAAC | | | | |
| Mak_ | TTGAAAAAGTGGCACCGAGTCGGTGCCTGACTCCT | | | | |
| RT12_ | GCGGAGAAGTC | | | | |
| PBS8 | | | | | |
| HBB8_ | GTAACGGCAGACTTCTCCACGTTTTAGAGCTAGAA | 21558 | 11 | 17 | 124 |
| corr_ | ATAGCAAGTTAAAATAAGGCTAGTCCGTTATCAAC | | | | |
| Mak_ | TTGAAAAAGTGGCACCGAGTCGGTGCTGACTCCTG | | | | |
| RT11_ | CGGAGAAGTCTGCCGTTAC | | | | |
| PBS17 | | | | | |
| HBB8_ | GTAACGGCAGACTTCTCCACGTTTTAGAGCTAGAA | 21559 | 11 | 16 | 123 |
| corr_ | ATAGCAAGTTAAAATAAGGCTAGTCCGTTATCAAC | | | | |
| Mak_ | TTGAAAAAGTGGCACCGAGTCGGTGCTGACTCCTG | | | | |
| RT11_ | CGGAGAAGTCTGCCGTTA | | | | |
| PBS16 | | | | | |
| HBB8_ | GTAACGGCAGACTTCTCCACGTTTTAGAGCTAGAA | 21560 | 11 | 15 | 122 |
| corr_ | ATAGCAAGTTAAAATAAGGCTAGTCCGTTATCAAC | | | | |
| Mak_ | TTGAAAAAGTGGCACCGAGTCGGTGCTGACTCCTG | | | | |
| RT11_ | CGGAGAAGTCTGCCGTT | | | | |
| PBS15 | | | | | |
| HBB8_ | GTAACGGCAGACTTCTCCACGTTTTAGAGCTAGAA | 21561 | 11 | 14 | 121 |
| corr_ | ATAGCAAGTTAAAATAAGGCTAGTCCGTTATCAAC | | | | |
| Mak_ | TTGAAAAAGTGGCACCGAGTCGGTGCTGACTCCTG | | | | |
| RT11_ | CGGAGAAGTCTGCCGT | | | | |
| PBS14 | | | | | |
| HBB8_ | GTAACGGCAGACTTCTCCACGTTTTAGAGCTAGAA | 21562 | 11 | 13 | 120 |
| corr_ | ATAGCAAGTTAAAATAAGGCTAGTCCGTTATCAAC | | | | |
| Mak_ | TTGAAAAAGTGGCACCGAGTCGGTGCTGACTCCTG | | | | |
| RT11_ | CGGAGAAGTCTGCCG | | | | |
| PBS13 | | | | | |
| HBB8_ | GTAACGGCAGACTTCTCCACGTTTTAGAGCTAGAA | 21563 | 11 | 12 | 119 |
| corr_ | ATAGCAAGTTAAAATAAGGCTAGTCCGTTATCAAC | | | | |
| Mak_ | TTGAAAAAGTGGCACCGAGTCGGTGCTGACTCCTG | | | | |
| RT11_ | CGGAGAAGTCTGCC | | | | |
| PBS12 | | | | | |
| HBB8_ | GTAACGGCAGACTTCTCCACGTTTTAGAGCTAGAA | 21564 | 11 | 11 | 118 |
| corr_ | ATAGCAAGTTAAAATAAGGCTAGTCCGTTATCAAC | | | | |
| Mak_ | TTGAAAAAGTGGCACCGAGTCGGTGCTGACTCCTG | | | | |
| RT11_ | CGGAGAAGTCTGC | | | | |
| PBS11 | | | | | |
| HBB8_ | GTAACGGCAGACTTCTCCACGTTTTAGAGCTAGAA | 21565 | 11 | 10 | 117 |
| corr_ | ATAGCAAGTTAAAATAAGGCTAGTCCGTTATCAAC | | | | |
| Mak_ | TTGAAAAAGTGGCACCGAGTCGGTGCTGACTCCTG | | | | |
| RT11_ | CGGAGAAGTCTG | | | | |
| PBS10 | | | | | |
| HBB8_ | GTAACGGCAGACTTCTCCACGTTTTAGAGCTAGAA | 21566 | 11 | 9 | 116 |
| corr_ | ATAGCAAGTTAAAATAAGGCTAGTCCGTTATCAAC | | | | |
| Mak_ | TTGAAAAAGTGGCACCGAGTCGGTGCTGACTCCTG | | | | |
| RT11_ | CGGAGAAGTCT | | | | |
| PBS9 | | | | | |
| HBB8_ | GTAACGGCAGACTTCTCCACGTTTTAGAGCTAGAA | 21567 | 11 | 8 | 115 |
| corr_ | ATAGCAAGTTAAAATAAGGCTAGTCCGTTATCAAC | | | | |
| Mak_ | TTGAAAAAGTGGCACCGAGTCGGTGCTGACTCCTG | | | | |
| RT11_ | CGGAGAAGTC | | | | |
| PBS8 | | | | | |
| HBB8_ | GTAACGGCAGACTTCTCCACGTTTTAGAGCTAGAA | 21568 | 10 | 17 | 123 |
| corr_ | ATAGCAAGTTAAAATAAGGCTAGTCCGTTATCAAC | | | | |
| Mak_ | TTGAAAAAGTGGCACCGAGTCGGTGCGACTCCTGC | | | | |
| RT10_ | GGAGAAGTCTGCCGTTAC | | | | |
| PBS17 | | | | | |
| HBB8_ | GTAACGGCAGACTTCTCCACGTTTTAGAGCTAGAA | 21569 | 10 | 16 | 122 |
| corr_ | ATAGCAAGTTAAAATAAGGCTAGTCCGTTATCAAC | | | | |
| Mak_ | TTGAAAAAGTGGCACCGAGTCGGTGCGACTCCTGC | | | | |
| RT10_ | GGAGAAGTCTGCCGTTA | | | | |
| PBS16 | | | | | |
| HBB8_ | GTAACGGCAGACTTCTCCACGTTTTAGAGCTAGAA | 21570 | 10 | 15 | 121 |
| corr_ | ATAGCAAGTTAAAATAAGGCTAGTCCGTTATCAAC | | | | |
| Mak_ | TTGAAAAAGTGGCACCGAGTCGGTGCGACTCCTGC | | | | |
| RT10_ | GGAGAAGTCTGCCGTT | | | | |
| PBS15 | | | | | |
| HBB8_ | GTAACGGCAGACTTCTCCACGTTTTAGAGCTAGAA | 21571 | 10 | 14 | 120 |
| corr_ | ATAGCAAGTTAAAATAAGGCTAGTCCGTTATCAAC | | | | |
| Mak_ | TTGAAAAAGTGGCACCGAGTCGGTGCGACTCCTGC | | | | |
| RT10_ | GGAGAAGTCTGCCGT | | | | |
| PBS14 | | | | | |
| HBB8_ | GTAACGGCAGACTTCTCCACGTTTTAGAGCTAGAA | 21572 | 10 | 13 | 119 |
| corr_ | ATAGCAAGTTAAAATAAGGCTAGTCCGTTATCAAC | | | | |
| Mak_ | TTGAAAAAGTGGCACCGAGTCGGTGCGACTCCTGC | | | | |
| RT10_ | GGAGAAGTCTGCCG | | | | |
| PBS13 | | | | | |
| HBB8_ | GTAACGGCAGACTTCTCCACGTTTTAGAGCTAGAA | 21573 | 10 | 12 | 118 |
| corr_ | ATAGCAAGTTAAAATAAGGCTAGTCCGTTATCAAC | | | | |
| Mak_ | TTGAAAAAGTGGCACCGAGTCGGTGCGACTCCTGC | | | | |
| RT10_ | GGAGAAGTCTGCC | | | | |
| PBS12 | | | | | |
| HBB8_ | GTAACGGCAGACTTCTCCACGTTTTAGAGCTAGAA | 21574 | 10 | 11 | 117 |
| corr_ | ATAGCAAGTTAAAATAAGGCTAGTCCGTTATCAAC | | | | |
| Mak_ | TTGAAAAAGTGGCACCGAGTCGGTGCGACTCCTGC | | | | |
| RT10_ | GGAGAAGTCTGC | | | | |
| PBS11 | | | | | |
| HBB8_ | GTAACGGCAGACTTCTCCACGTTTTAGAGCTAGAA | 21575 | 10 | 10 | 116 |
| corr_ | ATAGCAAGTTAAAATAAGGCTAGTCCGTTATCAAC | | | | |
| Mak_ | TTGAAAAAGTGGCACCGAGTCGGTGCGACTCCTGC | | | | |
| RT10_ | GGAGAAGTCTG | | | | |
| PBS10 | | | | | |
| HBB8_ | GTAACGGCAGACTTCTCCACGTTTTAGAGCTAGAA | 21576 | 10 | 9 | 115 |
| corr_ | ATAGCAAGTTAAAATAAGGCTAGTCCGTTATCAAC | | | | |
| Mak_ | TTGAAAAAGTGGCACCGAGTCGGTGCGACTCCTGC | | | | |
| RT10_ | GGAGAAGTCT | | | | |
| PBS9 | | | | | |
| HBB8_ | GTAACGGCAGACTTCTCCACGTTTTAGAGCTAGAA | 21577 | 10 | 8 | 114 |
| corr_ | ATAGCAAGTTAAAATAAGGCTAGTCCGTTATCAAC | | | | |
| Mak_ | TTGAAAAAGTGGCACCGAGTCGGTGCGACTCCTGC | | | | |
| RT10_ | GGAGAAGTC | | | | |
| PBS8 | | | | | |
| HBB8_ | GTAACGGCAGACTTCTCCACGTTTTAGAGCTAGAA | 21578 | 9 | 17 | 122 |
| corr_ | ATAGCAAGTTAAAATAAGGCTAGTCCGTTATCAAC | | | | |
| Mak_ | TTGAAAAAGTGGCACCGAGTCGGTGCACTCCTGCG | | | | |
| RT9_ | GAGAAGTCTGCCGTTAC | | | | |
| PBS17 | | | | | |
| HBB8_ | GTAACGGCAGACTTCTCCACGTTTTAGAGCTAGAA | 21579 | 9 | 16 | 121 |
| corr_ | ATAGCAAGTTAAAATAAGGCTAGTCCGTTATCAAC | | | | |
| Mak_ | TTGAAAAAGTGGCACCGAGTCGGTGCACTCCTGCG | | | | |
| RT9_ | GAGAAGTCTGCCGTTA | | | | |
| PBS16 | | | | | |
| HBB8_ | GTAACGGCAGACTTCTCCACGTTTTAGAGCTAGAA | 21580 | 9 | 15 | 120 |
| corr_ | ATAGCAAGTTAAAATAAGGCTAGTCCGTTATCAAC | | | | |
| Mak_ | TTGAAAAAGTGGCACCGAGTCGGTGCACTCCTGCG | | | | |
| RT9_ | GAGAAGTCTGCCGTT | | | | |
| PBS15 | | | | | |
| HBB8_ | GTAACGGCAGACTTCTCCACGTTTTAGAGCTAGAA | 21581 | 9 | 14 | 119 |
| corr_ | ATAGCAAGTTAAAATAAGGCTAGTCCGTTATCAAC | | | | |
| Mak_ | TTGAAAAAGTGGCACCGAGTCGGTGCACTCCTGCG | | | | |
| RT9_ | GAGAAGTCTGCCGT | | | | |
| PBS14 | | | | | |
| HBB8_ | GTAACGGCAGACTTCTCCACGTTTTAGAGCTAGAA | 21582 | 9 | 13 | 118 |
| corr_ | ATAGCAAGTTAAAATAAGGCTAGTCCGTTATCAAC | | | | |
| Mak_ | TTGAAAAAGTGGCACCGAGTCGGTGCACTCCTGCG | | | | |
| RT9_ | GAGAAGTCTGCCG | | | | |
| PBS13 | | | | | |
| HBB8_ | GTAACGGCAGACTTCTCCACGTTTTAGAGCTAGAA | 21583 | 9 | 12 | 117 |
| corr_ | ATAGCAAGTTAAAATAAGGCTAGTCCGTTATCAAC | | | | |
| Mak_ | TTGAAAAAGTGGCACCGAGTCGGTGCACTCCTGCG | | | | |
| RT9_ | GAGAAGTCTGCC | | | | |
| PBS12 | | | | | |
| HBB8_ | GTAACGGCAGACTTCTCCACGTTTTAGAGCTAGAA | 21584 | 9 | 11 | 116 |
| corr_ | ATAGCAAGTTAAAATAAGGCTAGTCCGTTATCAAC | | | | |
| Mak_ | TTGAAAAAGTGGCACCGAGTCGGTGCACTCCTGCG | | | | |
| RT9_ | GAGAAGTCTGC | | | | |
| PBS11 | | | | | |
| HBB8_ | GTAACGGCAGACTTCTCCACGTTTTAGAGCTAGAA | 21585 | 9 | 10 | 115 |
| corr_ | ATAGCAAGTTAAAATAAGGCTAGTCCGTTATCAAC | | | | |
| Mak_ | TTGAAAAAGTGGCACCGAGTCGGTGCACTCCTGCG | | | | |
| RT9_ | GAGAAGTCTG | | | | |
| PBS10 | | | | | |
| HBB8_ | GTAACGGCAGACTTCTCCACGTTTTAGAGCTAGAA | 21586 | 9 | 9 | 114 |
| corr_ | ATAGCAAGTTAAAATAAGGCTAGTCCGTTATCAAC | | | | |
| Mak_ | TTGAAAAAGTGGCACCGAGTCGGTGCACTCCTGCG | | | | |
| RT9_ | GAGAAGTCT | | | | |
| PBS9 | | | | | |
| HBB8_ | GTAACGGCAGACTTCTCCACGTTTTAGAGCTAGAA | 21587 | 9 | 8 | 113 |
| corr_ | ATAGCAAGTTAAAATAAGGCTAGTCCGTTATCAAC | | | | |
| Mak_ | TTGAAAAAGTGGCACCGAGTCGGTGCACTCCTGCG | | | | |
| RT9_ | GAGAAGTC | | | | |
| PBS8 | | | | | |
| HBB8_ | GTAACGGCAGACTTCTCCACGTTTTAGAGCTAGAA | 21588 | 8 | 17 | 121 |
| corr_ | ATAGCAAGTTAAAATAAGGCTAGTCCGTTATCAAC | | | | |
| Mak_ | TTGAAAAAGTGGCACCGAGTCGGTGCCTCCTGCGG | | | | |
| RT8_ | AGAAGTCTGCCGTTAC | | | | |
| PBS17 | | | | | |
| HBB8_ | GTAACGGCAGACTTCTCCACGTTTTAGAGCTAGAA | 21589 | 8 | 16 | 120 |
| corr_ | ATAGCAAGTTAAAATAAGGCTAGTCCGTTATCAAC | | | | |
| Mak_ | TTGAAAAAGTGGCACCGAGTCGGTGCCTCCTGCGG | | | | |
| RT8_ | AGAAGTCTGCCGTTA | | | | |
| PBS16 | | | | | |
| HBB8_ | GTAACGGCAGACTTCTCCACGTTTTAGAGCTAGAA | 21590 | 8 | 15 | 119 |
| corr_ | ATAGCAAGTTAAAATAAGGCTAGTCCGTTATCAAC | | | | |
| Mak_ | TTGAAAAAGTGGCACCGAGTCGGTGCCTCCTGCGG | | | | |
| RT8_ | AGAAGTCTGCCGTT | | | | |
| PBS15 | | | | | |
| HBB8_ | GTAACGGCAGACTTCTCCACGTTTTAGAGCTAGAA | 21591 | 8 | 14 | 118 |
| corr_ | ATAGCAAGTTAAAATAAGGCTAGTCCGTTATCAAC | | | | |
| Mak_ | TTGAAAAAGTGGCACCGAGTCGGTGCCTCCTGCGG | | | | |
| RT8_ | AGAAGTCTGCCGT | | | | |
| PBS14 | | | | | |
| HBB8_ | GTAACGGCAGACTTCTCCACGTTTTAGAGCTAGAA | 21592 | 8 | 13 | 117 |
| corr_ | ATAGCAAGTTAAAATAAGGCTAGTCCGTTATCAAC | | | | |
| Mak_ | TTGAAAAAGTGGCACCGAGTCGGTGCCTCCTGCGG | | | | |
| RT8_ | AGAAGTCTGCCG | | | | |
| PBS13 | | | | | |
| HBB8_ | GTAACGGCAGACTTCTCCACGTTTTAGAGCTAGAA | 21593 | 8 | 12 | 116 |
| corr_ | ATAGCAAGTTAAAATAAGGCTAGTCCGTTATCAAC | | | | |
| Mak_ | TTGAAAAAGTGGCACCGAGTCGGTGCCTCCTGCGG | | | | |
| RT8_ | AGAAGTCTGCC | | | | |
| PBS12 | | | | | |
| HBB8_ | GTAACGGCAGACTTCTCCACGTTTTAGAGCTAGAA | 21594 | 8 | 11 | 115 |
| corr_ | ATAGCAAGTTAAAATAAGGCTAGTCCGTTATCAAC | | | | |
| Mak_ | TTGAAAAAGTGGCACCGAGTCGGTGCCTCCTGCGG | | | | |
| RT8_ | AGAAGTCTGC | | | | |
| PBS11 | | | | | |
| HBB8_ | GTAACGGCAGACTTCTCCACGTTTTAGAGCTAGAA | 21595 | 8 | 10 | 114 |
| corr_ | ATAGCAAGTTAAAATAAGGCTAGTCCGTTATCAAC | | | | |
| Mak_ | TTGAAAAAGTGGCACCGAGTCGGTGCCTCCTGCGG | | | | |
| RT8_ | AGAAGTCTG | | | | |
| PBS10 | | | | | |
| HBB8_ | GTAACGGCAGACTTCTCCACGTTTTAGAGCTAGAA | 21596 | 8 | 9 | 113 |
| corr_ | ATAGCAAGTTAAAATAAGGCTAGTCCGTTATCAAC | | | | |
| Mak_ | TTGAAAAAGTGGCACCGAGTCGGTGCCTCCTGCGG | | | | |
| RT8_ | AGAAGTCT | | | | |
| PBS9 | | | | | |
| HBB8_ | GTAACGGCAGACTTCTCCACGTTTTAGAGCTAGAA | 21597 | 8 | 8 | 112 |
| corr_ | ATAGCAAGTTAAAATAAGGCTAGTCCGTTATCAAC | | | | |
| Mak_ | TTGAAAAAGTGGCACCGAGTCGGTGCCTCCTGCGG | | | | |
| RT8_ | AGAAGTC | | | | |
| PBS8 | | | | | |

[0605] In some embodiments, the systems and methods provided herein may comprise second strand-targeting gRNAs comprising a spacer sequence listed in Table 6A. Table 6A provides exemplary second strand-targeting gRNA spacer sequences (Column 2) designed to be paired with a gene modifying polypeptide and a template RNA to correct a mutation in the HBB gene.

[0606] In some embodiments, the second strand-targeting gRNA targets a sequence overlapping the target mutation of the template RNA. In some embodiments, such an overlapping second strand-targeting gRNA comprises a sequence (e.g., spacer sequence) complementary to the sickle cell mutation. In some embodiments, such an overlapping second strand-targeting gRNA comprises a sequence (e.g., spacer sequence) complementary to the wild-type sequence at the sickle cell locus. In some embodiments, such an overlapping second strand-targeting gRNA comprises a sequence (e.g., spacer sequence) complementary to the Makassar sequence at the sickle cell locus. In some embodiments, such an overlapping second strand-targeting gRNA comprises a sequence (e.g., spacer sequence) complementary to a SNP proximal to the sickle cell locus, e.g., a SNP contained in the genomic DNA of a subject (e.g., a patient). In some embodiments, such an overlapping second strand-targeting gRNA comprises a sequence (e.g., spacer sequence) complementary to or comprising one or more silent substitutions proximal to the sickle cell locus. Examples of such second strand-targeting gRNAs can be found in Table 6A.

TABLE 6A
Exemplary second-strand targeting (second-nick) gRNA sequences
Table 6A provides spacer sequences for second strand-targeting
gRNAs and relevant characteristics. Second-nick gRNAs in this
table are designed to be used in combination with template RNAs
comprising either the HBB5 (SEQ ID NO: 19249) or HBB8
(SEQ ID NO: 19971) spacers, as noted in Column 5. PAM
orientation is included in Column 4. In some embodiments,
second-nick gRNA is selected with preference for a distance
of less than or equal to 100 nt from the first nick (i.e.,
the nick specified by the template RNA). In some embodiments,
a second-nick gRNA is selected with a preference for a PAM-in
orientation with the template RNA of the gene modifying system,
as described elsewhere in this application.

| | Second-strand- | SEQ ID | PAM | |
|---|---|---|---|---|
| Name | targeting gRNA | NO | orientation | Spacer |
| HBB5_27_rev | GGGTGTGGCTCCACAGGGTG | 21598 | PAM out | HBB5 |
| HBB5_32_rev | CCCTAGGGTGTGGCTCCACA | 21599 | PAM out | HBB5 |
| HBB5_33_rev | ACCCTAGGGTGTGGCTCCAC | 21600 | PAM out | HBB5 |
| HBB5_42_rev | GATTGGCCAACCCTAGGGTG | 21601 | PAM out | HBB5 |
| HBB5_47_rev | GAGTAGATTGGCCAACCCTA | 21602 | PAM out | HBB5 |
| HBB5_48_rev | GGAGTAGATTGGCCAACCCT | 21603 | PAM out | HBB5 |
| HBB5_59_rev | CCCTGCTCCTGGGAGTAGAT | 21604 | PAM out | HBB5 |
| HBB5_69_rev | CTCCTGCCCTCCCTGCTCCT | 21605 | PAM out | HBB5 |
| HBB5_70_rev | GCTCCTGCCCTCCCTGCTCC | 21606 | PAM out | HBB5 |
| HBB5_92_rev | CTGACTTTTATGCCCAGCCC | 21607 | PAM out | HBB5 |
| HBB5_122_rev | AAGCAAATGTAAGCAATAGA | 21608 | PAM out | HBB5 |
| HBB5_170_rev | TGCACCATGGTGTCTGTTTG | 21609 | PAM out | HBB5 |
| HBB5_g24 | CTCAGGAGTCAGATGCACCA | 21610 | PAM out | HBB5 |
| HBB5_g34 | CAGACTTCTCCTCAGGAGTC | 21611 | PAM out | HBB5 |
| HBB5_g34_mut | CAGACTTCTCtgCAGGAGTC | 21612 | PAM out | HBB5 |
| HBB5_g34_mut2 | CAGACTTCTCtgccGGAGTC | 21613 | PAM out | HBB5 |
| HBB5_g34_mut3 | CAGACTTCTCttccGGAGTC | 21614 | PAM out | HBB5 |
| HBB5_g34_mut4 | CAGACTTCTCgtccGGAGTC | 21615 | PAM out | HBB5 |
| HBB5_g34_mut5 | CAGACTTCTCatccGGAGTC | 21616 | PAM out | HBB5 |
| HBB5_g41 | GTAACGGCAGACTTCTCCTC | 21617 | PAM in | HBB5 |
| HBB5_g41_mut | GTAACGGCAGACTTCTCtgC | 21618 | PAM in | HBB5 |
| HBB5_g41_mut2 | GTAACGGCAGACTTCTCttc | 21619 | PAM in | HBB5 |
| HBB5_g41_mut3 | GTAACGGCAGACTTCTCgtc | 21620 | PAM in | HBB5 |
| HBB5_g41_mut4 | GTAACGGCAGACTTCTCatc | 21621 | PAM in | HBB5 |
| HBB5_216_rev | CTTGCCCCACAGGGCAGTAA | 21622 | PAM in | HBB5 |
| HBB5_g37 | CACGTTCACCTTGCCCCACA | 21623 | PAM in | HBB5 |
| HBB5_g38 | CCACGTTCACCTTGCCCCAC | 21624 | PAM in | HBB5 |
| HBB5_g27 | CCTTGATACCAACCTGCCCA | 21625 | PAM in | HBB5 |
| HBB5_g39 | ACCTTGATACCAACCTGCCC | 21626 | PAM in | HBB5 |
| HBB5_g40 | TCCACATGCCCAGTTTCTAT | 21627 | PAM in | HBB5 |
| HBB8_37_fw | ATCACTTAGACCTCACCCTG | 21628 | PAM in | HBB8 |
| HBB8_51_fw | ACCCTGTGGAGCCACACCCT | 21629 | PAM in | HBB8 |
| HBB8_52_fw | CCCTGTGGAGCCACACCCTA | 21630 | PAM in | HBB8 |
| HBB8_56_fw | GTGGAGCCACACCCTAGGGT | 21631 | PAM in | HBB8 |
| HBB8_72_fw | GGGTTGGCCAATCTACTCCC | 21632 | PAM in | HBB8 |
| HBB8_78_fw | GCCAATCTACTCCCAGGAGC | 21633 | PAM in | HBB8 |
| HBB8_79_fw | CCAATCTACTCCCAGGAGCA | 21634 | PAM in | HBB8 |
| HBB8_82_fw | ATCTACTCCCAGGAGCAGGG | 21635 | PAM in | HBB8 |
| HBB8_83_fw | TCTACTCCCAGGAGCAGGGA | 21636 | PAM in | HBB8 |
| HBB8_87_fw | CTCCCAGGAGCAGGGAGGGC | 21637 | PAM in | HBB8 |
| HBB8_94_fw | GAGCAGGGAGGGCAGGAGCC | 21638 | PAM in | HBB8 |
| HBB8_95_fw | AGCAGGGAGGGCAGGAGCCA | 21639 | PAM in | HBB8 |
| HBB8_99_fw | GGGAGGGCAGGAGCCAGGGC | 21640 | PAM in | HBB8 |
| HBB8_g4 | GGAGGGCAGGAGCCAGGGCT | 21641 | PAM in | HBB8 |
| HBB8_g1 | CAGGGCTGGGCATAAAAGTC | 21642 | PAM in | HBB8 |
| HBB8_g2 | AGGGCTGGGCATAAAAGTCA | 21643 | PAM in | HBB8 |
| HBB8_g3 | GCAACCTCAAACAGACACCA | 21644 | PAM in | HBB8 |
| HBB8_204_fw | CATGGTGCATCTGACTCCTG | 21645 | PAM in | HBB8 |
| HBB8_204_fw_mut | CATGGTGCACCTGACTCCTG | 21646 | PAM in | HBB8 |
| HBB8_230_fw | AGTCTGCCGTTACTGCCCTG | 21647 | PAM out | HBB8 |
| HBB8_231_fw | GTCTGCCGTTACTGCCCTGT | 21648 | PAM out | HBB8 |
| HBB8_232_fw | TCTGCCGTTACTGCCCTGTG | 21649 | PAM out | HBB8 |
| HBB8_237_fw | CGTTACTGCCCTGTGGGGCA | 21650 | PAM out | HBB8 |
| HBB8_246_fw | CCTGTGGGGCAAGGTGAACG | 21651 | PAM out | HBB8 |
| HBB8_256_fw | AAGGTGAACGTGGATGAAGT | 21652 | PAM out | HBB8 |
| HBB8_259_fw | GTGAACGTGGATGAAGTTGG | 21653 | PAM out | HBB8 |
| HBB8_264_fw | CGTGGATGAAGTTGGTGGTG | 21654 | PAM out | HBB8 |
| HBB8_270_fw | TGAAGTTGGTGGTGAGGCCC | 21655 | PAM out | HBB8 |
| HBB8_271_fw | GAAGTTGGTGGTGAGGCCCT | 21656 | PAM out | HBB8 |
| HBB8_275_fw | TTGGTGGTGAGGCCCTGGGC | 21657 | PAM out | HBB8 |
| HBB8_279_fw | TGGTGAGGCCCTGGGCAGGT | 21658 | PAM out | HBB8 |
| HBB8_287_fw | CCCTGGGCAGGTTGGTATCA | 21659 | PAM out | HBB8 |
| HBB8_299_fw | TGGTATCAAGGTTACAAGAC | 21660 | PAM out | HBB8 |
| HBB8_306_fw | AAGGTTACAAGACAGGTTTA | 21661 | PAM out | HBB8 |
| HBB8_323_fw | TTAAGGAGACCAATAGAAAC | 21662 | PAM out | HBB8 |
| HBB8_324_fw | TAAGGAGACCAATAGAAACT | 21663 | PAM out | HBB8 |
| HBB8_331_fw | ACCAATAGAAACTGGGCATG | 21664 | PAM out | HBB8 |
| HBB8_350_fw | GTGGAGACAGAGAAGACTCT | 21665 | PAM out | HBB8 |
| HBB8_351_fw | TGGAGACAGAGAAGACTCTT | 21666 | PAM out | HBB8 |
| HBB8_362_fw | AAGACTCTTGGGTTTCTGAT | 21667 | PAM out | HBB8 |

[0607] The template RNA sequences shown in Tables 1-4, 5A-5D, and 6A may be customized depending on the cell being targeted. For example, in some embodiments it is desired to inactivate a PAM sequence upon editing (e.g., using a “PAM-kill” modification) to decrease the potential for further gene editing (e.g., by Cas retargeting) following the initial edit. Consequently, certain template RNAs described herein are designed to write a mutation (e.g., a substitution) into the PAM of the target site, such that upon editing, the PAM site will be mutated to a sequence no longer recognized by the gene modifying polypeptide. Thus, a mutation region within the heterologous object sequence of the template RNA may comprise a PAM-kill sequence. Without wishing to be bound by theory, in some embodiments, a PAM-kill sequence prevents re-engagement of the gene modifying polypeptide upon completion of a genetic modification, or decreases re-engagement relative to a template RNA lacking a PAM-kill sequence. In some embodiments, a PAM-kill sequence does not alter the amino acid sequence encoded by a gene, e.g., the PAM-kill sequence results in a silent mutation. In other embodiments, it is desired to leave the PAM sequence intact (no PAM-kill).

[0608] Similarly, in some embodiments, to decrease the potential for further gene editing (e.g., by Cas retargeting) following the initial edit, it may be desirable to alter the first three nucleotides of the RT template sequence via a “seed-kill” motif. Consequently, certain template RNAs described herein are designed to write a mutation (e.g., a substitution) into the portion of the target site corresponding to the first three nucleotides of the RT template sequence, such that upon editing, the target site will be mutated to a sequence with lower homology to the RT template sequence. Thus, a mutation region within the heterologous object sequence of the template RNA may comprise a seed-kill sequence. Without wishing to be bound by theory, in some embodiments, a seed-kill sequence prevents re-engagement of the gene modifying polypeptide upon completion of genetic modification, or decreases re-engagement relative to an otherwise similar template RNA lacking a seed-kill sequence. In some embodiments, a seed-kill sequence does not alter the amino acid sequence encoded by a gene, e.g., the seed-kill sequence results in a silent mutation. In other embodiments, it is desired to leave the seed region intact, and a seed-kill sequence is not used.

[0609] In further embodiments, to optimize or improve gene editing efficiency, it may be desirable to evade the target cell's mismatch repair or nucleotide repair pathways or to bias the target cell's repair pathways toward preservation of the edited strand. In some embodiments, multiple silent mutations (for example, silent substitutions) may be introduced within the RT template sequence to evade the target cell's mismatch repair or nucleotide repair pathways or to bias the target cell's repair pathways toward preservation of the edited strand.

[0610] Table 7A provides exemplary silent mutations for various positions within the HBB gene.

TABLE 7A
Exemplary Silent Mutation Codons for the HBB Gene

| Amino | | | | | | | | |
|---|---|---|---|---|---|---|---|---|
| Acid | | | | | | | | |
| Position | | | | | | | | |
| (counting | WT | | | | | | | |
| initial | Amino | WT | | | | | | |
| Met) | Acid | CODON | ALL CODONS | | | | | |
| 2 | V | GTG | GTT | GTC | GTA | GTG | | |
| 3 | H | CAT | CAT | CAC | | | | |
| 4 | L | CTG | TTA | TTG | CTT | CTC | CTA | CTG |
| 5 | T | ACT | ACT | ACC | ACA | ACG | | |
| 6 | P | CCT | CCT | CCC | CCA | CCG | | |
| 8 | E | GAG | GAA | GAG | | | | |
| 9 | K | AAG | AAA | AAG | | | | |
| 10 | S | TCT | TCT | TCC | TCA | TCG | AGT | AGC |
| 11 | A | GCC | GCT | GCC | GCA | GCG | | |
| 12 | V | GTT | GTT | GTC | GTA | GTG | | |
| 13 | T | ACT | ACT | ACC | ACA | ACG | | |
| 14 | A | GCC | GCT | GCC | GCA | GCG | | |
| 15 | L | CTG | TTA | TTG | CTT | CTC | CTA | CTG |
| 16 | W | TGG | TGG | | | | | |
| 17 | G | GGC | GGT | GGC | GGA | GGG | | |
| 18 | K | AAG | AAA | AAG | | | | |
| 19 | V | GTG | GTT | GTC | GTA | GTG | | |
| 20 | N | AAC | AAT | AAC | | | | |
| 21 | V | GTG | GTT | GTC | GTA | GTG | | |
| 22 | D | GAT | GAT | GAC | | | | |
| 23 | E | GAA | GAA | GAG | | | | |
| 24 | V | GTT | GTT | GTC | GTA | GTG | | |
| 25 | G | GGT | GGT | GGC | GGA | GGG | | |
| 26 | G | GGT | GGT | GGC | GGA | GGG | | |
| 27 | E | GAG | GAA | GAG | | | | |
| 28 | A | GCC | GCT | GCC | GCA | GCG | | |
| 29 | L | CTG | TTA | TTG | CTT | CTC | CTA | CTG |
| 30 | G | GGC | GGT | GGC | GGA | GGG | | |

[0611] In some embodiments, the template RNA comprises one or more silent mutations.

[0612] In some embodiments, the silent mutation comprises a mutation of the codon encoding the 6th amino acid, counting the initial methionine, of the HBB gene (proline), e.g., to CCC or CCG.

[0613] In some embodiments, the template RNA comprises one or more silent substitions as illustrated in Tables X1-X4 herein.

[0614] It should be understood that the silent mutations illustrated in Table 7A may be used individually or combined in any manner in a template RNA sequence described herein.

gRNAs with Inducible Activity

[0615] In some embodiments, a gRNA described herein (e.g., a gRNA that is part of a template RNA or a gRNA used for second strand nicking) has inducible activity. Inducible activity may be achieved by the template nucleic acid, e.g., template RNA, further comprising (in addition to the gRNA) a blocking domain, wherein the sequence of a portion of or all of the blocking domain is at least partially complementary to a portion or all of the gRNA. The blocking domain is thus capable of hybridizing or substantially hybridizing to a portion of or all of the gRNA. In some embodiments, the blocking domain and inducibly active gRNA are disposed on the template nucleic acid, e.g., template RNA, such that the gRNA can adopt a first conformation where the blocking domain is hybridized or substantially hybridized to the gRNA, and a second conformation where the blocking domain is not hybridized or not substantially hybridized to the gRNA. In some embodiments, in the first conformation the gRNA is unable to bind to the gene modifying polypeptide (e.g., the template nucleic acid binding domain, DNA binding domain, or endonuclease domain (e.g., a CRISPR/Cas protein)) or binds with substantially decreased affinity compared to an otherwise similar template RNA lacking the blocking domain. In some embodiments, in the second conformation the gRNA is able to bind to the gene modifying polypeptide (e.g., the template nucleic acid binding domain, DNA binding domain, or endonuclease domain (e.g., a CRISPR/Cas protein)). In some embodiments, whether the gRNA is in the first or second conformation can influence whether the DNA binding or endonuclease activities of the gene modifying polypeptide (e.g., of the CRISPR/Cas protein the gene modifying polypeptide comprises) are active.

[0616] In some embodiments, the gRNA that coordinates the second nick has inducible activity. In some embodiments, the gRNA that coordinates the second nick is induced after the template is reverse transcribed. In some embodiments, hybridization of the gRNA to the blocking domain can be disrupted using an opener molecule. In some embodiments, an opener molecule comprises an agent that binds to a portion or all of the gRNA or blocking domain and inhibits hybridization of the gRNA to the blocking domain. In some embodiments, the opener molecule comprises a nucleic acid, e.g., comprising a sequence that is partially or wholly complementary to the gRNA, blocking domain, or both. By choosing or designing an appropriate opener molecule, providing the opener molecule can promote a change in the conformation of the gRNA such that it can associate with a CRISPR/Cas protein and provide the associated functions of the CRISPR/Cas protein (e.g., DNA binding and/or endonuclease activity). Without wishing to be bound by theory, providing the opener molecule at a selected time and/or location may allow for spatial and temporal control of the activity of the gRNA, CRISPR/Cas protein, or gene modifying system comprising the same. In some embodiments, the opener molecule is exogenous to the cell comprising the gene modifying polypeptide and or template nucleic acid. In some embodiments, the opener molecule comprises an endogenous agent (e.g., endogenous to the cell comprising the gene modifying polypeptide and or template nucleic acid comprising the gRNA and blocking domain). For example, an inducible gRNA, blocking domain, and opener molecule may be chosen such that the opener molecule is an endogenous agent expressed in a target cell or tissue, e.g., thereby ensuring activity of a gene modifying system in the target cell or tissue. As a further example, an inducible gRNA, blocking domain, and opener molecule may be chosen such that the opener molecule is absent or not substantially expressed in one or more non-target cells or tissues, e.g., thereby ensuring that activity of a gene modifying system does not occur or substantially occur in the one or more non-target cells or tissues, or occurs at a reduced level compared to a target cell or tissue. Exemplary blocking domains, opener molecules, and uses thereof are described in PCT App. Publication WO2020044039A1, which is incorporated herein by reference in its entirety. In some embodiments, the template nucleic acid, e.g., template RNA, may comprise one or more sequences or structures for binding by one or more components of a gene modifying polypeptide, e.g., by a reverse transcriptase or RNA binding domain, and a gRNA. In some embodiments, the gRNA facilitates interaction with the template nucleic acid binding domain (e.g., RNA binding domain) of the gene modifying polypeptide. In some embodiments, the gRNA directs the gene modifying polypeptide to the matching target sequence, e.g., in a target cell genome.

### Circular RNAs and Ribozymes in Gene Modifying Systems

[0617] It is contemplated that it may be useful to employ circular and/or linear RNA states during the formulation, delivery, or gene modifying reaction within the target cell. Thus, in some embodiments of any of the aspects described herein, a gene modifying system comprises one or more circular RNAs (circRNAs). In some embodiments of any of the aspects described herein, a gene modifying system comprises one or more linear RNAs. In some embodiments, a nucleic acid as described herein (e.g., a template nucleic acid, a nucleic acid molecule encoding a gene modifying polypeptide, or both) is a circRNA. In some embodiments, a circular RNA molecule encodes the gene modifying polypeptide. In some embodiments, the circRNA molecule encoding the gene modifying polypeptide is delivered to a host cell. In some embodiments, a circular RNA molecule encodes a recombinase, e.g., as described herein. In some embodiments, the circRNA molecule encoding the recombinase is delivered to a host cell. In some embodiments, the circRNA molecule encoding the gene modifying polypeptide is linearized (e.g., in the host cell, e.g., in the nucleus of the host cell) prior to translation.

[0618] Circular RNAs (circRNAs) have been found to occur naturally in cells and have been found to have diverse functions, including both non-coding and protein coding roles in human cells. It has been shown that a circRNA can be engineered by incorporating a self-splicing intron into an RNA molecule (or DNA encoding the RNA molecule) that results in circularization of the RNA, and that an engineered circRNA can have enhanced protein production and stability (Wesselhoeft et al. Nature Communications 2018). In some embodiments, the gene modifying polypeptide is encoded as circRNA. In certain embodiments, the template nucleic acid is a DNA, such as a dsDNA or ssDNA. In certain embodiments, the circDNA comprises a template RNA.

[0619] In some embodiments, the circRNA comprises one or more ribozyme sequences. In some embodiments, the ribozyme sequence is activated for autocleavage, e.g., in a host cell, e.g., thereby resulting in linearization of the circRNA. In some embodiments, the ribozyme is activated when the concentration of magnesium reaches a sufficient level for cleavage, e.g., in a host cell. In some embodiments the circRNA is maintained in a low magnesium environment prior to delivery to the host cell. In some embodiments, the ribozyme is a protein-responsive ribozyme. In some embodiments, the ribozyme is a nucleic acid-responsive ribozyme. In some embodiments, the circRNA comprises a cleavage site. In some embodiments, the circRNA comprises a second cleavage site.

[0620] In some embodiments, the circRNA is linearized in the nucleus of a target cell. In some embodiments, linearization of a circRNA in the nucleus of a cell involves components present in the nucleus of the cell, e.g., to activate a cleavage event. In some embodiments, a ribozyme, e.g., a ribozyme from a B2 or ALU element, that is responsive to a nuclear element, e.g., a nuclear protein, e.g., a genome-interacting protein, e.g., an epigenetic modifier, e.g., EZH2, is incorporated into a circRNA, e.g., of a gene modifying system. In some embodiments, nuclear localization of the circRNA results in an increase in autocatalytic activity of the ribozyme and linearization of the circRNA.

[0621] In some embodiments, the ribozyme is heterologous to one or more of the other components of the gene modifying system. In some embodiments, an inducible ribozyme (e.g., in a circRNA as described herein) is created synthetically, for example, by utilizing a protein ligand-responsive aptamer design. A system for utilizing the satellite RNA of tobacco ringspot virus hammerhead ribozyme with an MS2 coat protein aptamer has been described (Kennedy et al. Nucleic Acids Res 42(19): 12306-12321 (2014), incorporated herein by reference in its entirety) that results in activation of the ribozyme activity in the presence of the MS2 coat protein. In embodiments, such a system responds to protein ligand localized to the cytoplasm or the nucleus. In some embodiments the protein ligand is not MS2. Methods for generating RNA aptamers to target ligands have been described, for example, based on the systematic evolution of ligands by exponential enrichment (SELEX) (Tuerk and Gold, Science 249(4968):505-510 (1990); Ellington and Szostak, Nature 346(6287):818-822 (1990); the methods of each of which are incorporated herein by reference) and have, in some instances, been aided by in silico design (Bell et al. PNAS 117(15):8486-8493, the methods of which are incorporated herein by reference). Thus, in some embodiments, an aptamer for a target ligand is generated and incorporated into a synthetic ribozyme system, e.g., to trigger ribozyme-mediated cleavage and circRNA linearization, e.g., in the presence of the protein ligand. In some embodiments, circRNA linearization is triggered in the cytoplasm, e.g., using an aptamer that associates with a ligand in the cytoplasm. In some embodiments, circRNA linearization is triggered in the nucleus, e.g., using an aptamer that associates with a ligand in the nucleus. In embodiments, the ligand in the nucleus comprises an epigenetic modifier or a transcription factor. In some embodiments the ligand that triggers linearization is present at higher levels in on-target cells than off-target cells.

[0622] It is further contemplated that a nucleic acid-responsive ribozyme system can be employed for circRNA linearization. For example, biosensors that sense defined target nucleic acid molecules to trigger ribozyme activation are described, e.g., in Penchovsky (Biotechnology Advances 32(5): 1015-1027 (2014), incorporated herein by reference). By these methods, a ribozyme naturally folds into an inactive state and is only activated in the presence of a defined target nucleic acid molecule (e.g., an RNA molecule). In some embodiments, a circRNA of a gene modifying system comprises a nucleic acid-responsive ribozyme that is activated in the presence of a defined target nucleic acid, e.g., an RNA, e.g., an mRNA, miRNA, guide RNA, gRNA, sgRNA, ncRNA, lncRNA, tRNA, snRNA, or mtRNA. In some embodiments the nucleic acid that triggers linearization is present at higher levels in on-target cells than off-target cells.

[0623] In some embodiments of any of the aspects herein, a gene modifying system incorporates one or more ribozymes with inducible specificity to a target tissue or target cell of interest, e.g., a ribozyme that is activated by a ligand or nucleic acid present at higher levels in a target tissue or target cell of interest. In some embodiments, the gene modifying system incorporates a ribozyme with inducible specificity to a subcellular compartment, e.g., the nucleus, nucleolus, cytoplasm, or mitochondria. In some embodiments, the ribozyme that is activated by a ligand or nucleic acid present at higher levels in the target subcellular compartment. In some embodiments, an RNA component of a gene modifying system is provided as circRNA, e.g., that is activated by linearization. In some embodiments, linearization of a circRNA encoding a gene modifying polypeptide activates the molecule for translation. In some embodiments, a signal that activates a circRNA component of a gene modifying system is present at higher levels in on-target cells or tissues, e.g., such that the system is specifically activated in these cells.

[0624] In some embodiments, an RNA component of a gene modifying system is provided as a circRNA that is inactivated by linearization. In some embodiments, a circRNA encoding the gene modifying polypeptide is inactivated by cleavage and degradation. In some embodiments, a circRNA encoding the gene modifying polypeptide is inactivated by cleavage that separates a translation signal from the coding sequence of the polypeptide. In some embodiments, a signal that inactivates a circRNA component of a gene modifying system is present at higher levels in off-target cells or tissues, such that the system is specifically inactivated in these cells.

### Target Nucleic Acid Site

[0625] In some embodiments, after gene modification, the target site surrounding the edited sequence contains a limited number of insertions or deletions, for example, in less than about 50% or 10% of editing events, e.g., as determined by long-read amplicon sequencing of the target site, e.g., as described in Karst et al. (2020) bioRxiv doi.org/10.1101/645903 (incorporated by reference herein in its entirety). In some embodiments, the target site does not show multiple consecutive editing events, e.g., head-to-tail or head-to-head duplications, e.g., as determined by long-read amplicon sequencing of the target site, e.g., as described in Karst et al. bioRxiv doi.org/10.1101/645903 (2020) (incorporated herein by reference in its entirety). In some embodiments, the target site contains an integrated sequence corresponding to the template RNA. In some embodiments, the target site does not contain insertions resulting from endogenous RNA in more than about 1% or 10% of events, e.g., as determined by long-read amplicon sequencing of the target site, e.g., as described in Karst et al. bioRxiv doi.org/10.1101/645903 (2020) (incorporated herein by reference in its entirety). In some embodiments, the target site contains the integrated sequence corresponding to the template RNA.

[0626] In certain aspects of the present invention, the host DNA-binding site integrated into by the gene modifying system can be in a gene, in an intron, in an exon, an ORF, outside of a coding region of any gene, in a regulatory region of a gene, or outside of a regulatory region of a gene. In other aspects, the polypeptide may bind to one or more than one host DNA sequence.

[0627] In some embodiments, a gene modifying system is used to edit a target locus in multiple alleles. In some embodiments, a gene modifying system is designed to edit a specific allele. For example, a gene modifying polypeptide may be directed to a specific sequence that is only present on one allele, e.g., comprises a template RNA with homology to a target allele, e.g., a gRNA or annealing domain, but not to a second cognate allele. In some embodiments, a gene modifying system can alter a haplotype-specific allele. In some embodiments, a gene modifying system that targets a specific allele preferentially targets that allele, e.g., has at least a 2, 4, 6, 8, or 10-fold preference for a target allele.

### Second Strand Nicking

[0628] In some embodiments, a gene modifying system described herein comprises a nickase activity (e.g., in the gene modifying polypeptide) that nicks the first strand, and a nickase activity (e.g., in a polypeptide separate from the gene modifying polypeptide) that nicks the second strand of target DNA. As discussed herein, without wishing to be bound by theory, nicking of the first strand of the target site DNA is thought to provide a 3′ OH that can be used by an RT domain to reverse transcribe a sequence of a template RNA, e.g., a heterologous object sequence. Without wishing to be bound by theory, it is thought that introducing an additional nick to the second strand may bias the cellular DNA repair machinery to adopt the heterologous object sequence-based sequence more frequently than the original genomic sequence. In some embodiments, the additional nick to the second strand is made by the same endonuclease domain (e.g., nickase domain) as the nick to the first strand. In some embodiments, the same gene modifying polypeptide performs both the nick to the first strand and the nick to the second strand. In some embodiments, the gene modifying polypeptide comprises a CRISPR/Cas domain and the additional nick to the second strand is directed by an additional nucleic acid, e.g., comprising a second gRNA directing the CRISPR/Cas domain to nick the second strand. In other embodiments, the additional second strand nick is made by a different endonuclease domain (e.g., nickase domain) than the nick to the first strand. In some embodiments, that different endonuclease domain is situated in an additional polypeptide (e.g., a system of the invention further comprises the additional polypeptide), separate from the gene modifying polypeptide. In some embodiments, the additional polypeptide comprises an endonuclease domain (e.g., nickase domain) described herein. In some embodiments, the additional polypeptide comprises a DNA binding domain, e.g., described herein.

[0629] It is contemplated herein that the position at which the second strand nick occurs relative to the first strand nick may influence the extent to which one or more of: desired gene modifying DNA modifications are obtained, undesired double-strand breaks (DSBs) occur, undesired insertions occur, or undesired deletions occur. Without wishing to be bound by theory, second strand nicking may occur in two general orientations: inward nicks and outward nicks.

[0630] In some embodiments, in the inward nick orientation, the RT domain polymerizes (e.g., using the template RNA (e.g., the heterologous object sequence)) away from the second strand nick. In some embodiments, in the inward nick orientation, the location of the nick to the first strand and the location of the nick to the second strand are positioned between the first PAM site and second PAM site (e.g., in a scenario wherein both nicks are made by a polypeptide (e.g., a gene modifying polypeptide) comprising a CRISPR/Cas domain). When there are two PAMs on the outside and two nicks on the inside, this inward nick orientation can also be referred to as “PAM-out”. In some embodiments, in the inward nick orientation, the location of the nick to the first strand and the location of the nick to the second strand are between the sites where the polypeptide and the additional polypeptide bind to the target DNA. In some embodiments, in the inward nick orientation, the location of the nick to the second strand is positioned between the binding sites of the polypeptide and additional polypeptide, and the nick to the first strand is also located between the binding sites of the polypeptide and additional polypeptide. In some embodiments, in the inward nick orientation, the location of the nick to the first strand and the location of the nick to the second strand are positioned between the PAM site and the binding site of the second polypeptide which is at a distance from the target site.

[0631] An example of a gene modifying system that provides an inward nick orientation comprises a gene modifying polypeptide comprising a CRISPR/Cas domain, a template RNA comprising a gRNA that directs nicking of the target site DNA on the first strand, and an additional nucleic acid comprising an additional gRNA that directs nicking at a site a distance from the location of the first nick, wherein the location of the first nick and the location of the second nick are between the PAM sites of the sites to which the two gRNAs direct the gene modifying polypeptide. As a further example, another gene modifying system that provides an inward nick orientation comprises a gene modifying polypeptide comprising a zinc finger molecule and a first nickase domain wherein the zinc finger molecule binds to the target DNA in a manner that directs the first nickase domain to nick the first strand of the target site; an additional polypeptide comprising a CRISPR/Cas domain, and an additional nucleic acid comprising a gRNA that directs the additional polypeptide to nick a site a distance from the target site DNA on the second strand, wherein the location of the first nick and the location of the second nick are between the PAM site and the site to which the zinc finger molecule binds. As a further example, another gene modifying system that provides an inward nick orientation comprises a gene modifying polypeptide comprising a zinc finger molecule and a first nickase domain wherein the zinc finger molecule binds to the target DNA in a manner that directs the first nickase domain to nick the first strand of the target site; an additional polypeptide comprising a TAL effector molecule and a second nickase domain wherein the TAL effector molecule binds to a site a distance from the target site in a manner that directs the additional polypeptide to nick the second strand, wherein the location of the first nick and the location of the second nick are between the site to which the TAL effector molecule binds and the site to which the zinc finger molecule binds.

[0632] In some embodiments, in the outward nick orientation, the RT domain polymerizes (e.g., using the template RNA (e.g., the heterologous object sequence)) toward the second strand nick. In some embodiments, in the outward nick orientation when both the first and second nicks are made by a polypeptide comprising a CRISPR/Cas domain (e.g., a gene modifying polypeptide), the first PAM site and second PAM site are positioned between the location of the nick to the first strand and the location of the nick to the second strand. When there are two PAMs on the inside and two nicks on the outside, this outward nick orientation also can be referred to as “PAM-in”. In some embodiments, in the outward nick orientation, the polypeptide (e.g., the gene modifying polypeptide) and the additional polypeptide bind to sites on the target DNA between the location of the nick to the first strand and the location of the nick to the second. In some embodiments, in the outward nick orientation, the location of the nick to the second strand is positioned on the opposite side of the binding sites of the polypeptide and additional polypeptide relative to the location of the nick to the first strand. In some embodiments, in the outward orientation, the PAM site and the binding site of the second polypeptide which is at a distance from the target site are positioned between the location of the nick to the first strand and the location of the nick to the second strand.

[0633] An example of a gene modifying system that provides an outward nick orientation comprises a gene modifying polypeptide comprising a CRISPR/Cas domain, a template RNA comprising a gRNA that directs nicking of the target site DNA on the first strand, and an additional nucleic acid comprising an additional gRNA that directs nicking at a site a distance from the location of the first nick, wherein the location of the first nick and the location of the second nick are outside of the PAM sites of the sites to which the two gRNAs direct the gene modifying polypeptide (i.e., the PAM sites are between the location of the first nick and the location of the second nick). As a further example, another gene modifying system that provides an outward nick orientation comprises a gene modifying polypeptide comprising a zinc finger molecule and a first nickase domain wherein the zinc finger molecule binds to the target DNA in a manner that directs the first nickase domain to nick the first strand of the target site; an additional polypeptide comprising a CRISPR/Cas domain, and an additional nucleic acid comprising a gRNA that directs the additional polypeptide to nick a site a distance from the target site DNA on the second strand, wherein the location of the first nick and the location of the second nick are outside the PAM site and the site to which the zinc finger molecule binds (i.e., the PAM site and the site to which the zinc finger molecule binds are between the location of the first nick and the location of the second nick). As a further example, another gene modifying system that provides an outward nick orientation comprises a gene modifying polypeptide comprising a zinc finger molecule and a first nickase domain wherein the zinc finger molecule binds to the target DNA in a manner that directs the first nickase domain to nick the first strand of the target site; an additional polypeptide comprising a TAL effector molecule and a second nickase domain wherein the TAL effector molecule binds to a site a distance from the target site in a manner that directs the additional polypeptide to nick the second strand, wherein the location of the first nick and the location of the second nick are outside the site to which the TAL effector molecule binds and the site to which the zinc finger molecule binds (i.e., the site to which the TAL effector molecule binds and the site to which the zinc finger molecule binds are between the location of the first nick and the location of the second nick).

[0634] Without wishing to be bound by theory, it is thought that, for gene modifying systems where a second strand nick is provided, an outward nick orientation is preferred in some embodiments. As is described herein, an inward nick may produce a higher number of double-strand breaks (DSBs) than an outward nick orientation. DSBs may be recognized by the DSB repair pathways in the nucleus of a cell, which can result in undesired insertions and deletions. An outward nick orientation may provide a decreased risk of DSB formation, and a corresponding lower amount of undesired insertions and deletions. In some embodiments, undesired insertions and deletions are insertions and deletions not encoded by the heterologous object sequence, e.g., an insertion or deletion produced by the double-strand break repair pathway unrelated to the modification encoded by the heterologous object sequence. In some embodiments, a desired gene modification comprises a change to the target DNA (e.g., a substitution, insertion, or deletion) encoded by the heterologous object sequence (e.g., and achieved by the gene modifying writing the heterologous object sequence into the target site). In some embodiments, the first strand nick and the second strand nick are in an outward orientation.

[0635] In addition, the distance between the first strand nick and second strand nick may influence the extent to which one or more of: desired gene modifying system DNA modifications are obtained, undesired double-strand breaks (DSBs) occur, undesired insertions occur, or undesired deletions occur. Without wishing to be bound by theory, it is thought the second strand nick benefit, the biasing of DNA repair toward incorporation of the heterologous object sequence into the target DNA, increases as the distance between the first strand nick and second strand nick decreases. However, it is thought that the risk of DSB formation also increases as the distance between the first strand nick and second strand nick decreases. Correspondingly, it is thought that the number of undesired insertions and/or deletions may increase as the distance between the first strand nick and second strand nick decreases. In some embodiments, the distance between the first strand nick and second strand nick is chosen to balance the benefit of biasing DNA repair toward incorporation of the heterologous object sequence into the target DNA and the risk of DSB formation and of undesired deletions and/or insertions. In some embodiments, a system where the first strand nick and the second strand nick are at least a threshold distance apart has an increased level of desired gene modifying system modification outcomes, a decreased level of undesired deletions, and/or a decreased level of undesired insertions relative to an otherwise similar inward nick orientation system where the first nick and the second nick are less than the a threshold distance apart. In some embodiments the threshold distance(s) is given below.

[0636] In some embodiments, the first nick and the second nick are at least 20, 25, 30, 35, 40, 45, 50, 55, 60, 65, 70, 75, 80, 85, 90, 95, 100, 110, 120, 130, 140, 150, 160, 170, 180, 190, or 200 nucleotides apart. In some embodiments, the first nick and the second nick are no more than 25, 30, 35, 40, 45, 50, 55, 60, 65, 70, 75, 80, 85, 90, 95, 100, 110, 120, 130, 140, 150, 160, 170, 180, 190, 200, or 250 nucleotides apart. In some embodiments, the first nick and the second nick are 20-200, 30-200, 40-200, 50-200, 60-200, 70-200, 80-200, 90-200, 100-200, 110-200, 120-200, 130-200, 140-200, 150-200, 160-200, 170-200, 180-200, 190-200, 20-190, 30-190, 40-190, 50-190, 60-190, 70-190, 80-190, 90-190, 100-190, 110-190, 120-190, 130-190, 140-190, 150-190, 160-190, 170-190, 180-190, 20-180, 30-180, 40-180, 50-180, 60-180, 70-180, 80-180, 90-180, 100-180, 110-180, 120-180, 130-180, 140-180, 150-180, 160-180, 170-180, 20-170, 30-170, 40-170, 50-170, 60-170, 70-170, 80-170, 90-170, 100-170, 110-170, 120-170, 130-170, 140-170, 150-170, 160-170, 20-160, 30-160, 40-160, 50-160, 60-160, 70-160, 80-160, 90-160, 100-160, 110-160, 120-160, 130-160, 140-160, 150-160, 20-150, 30-150, 40-150, 50-150, 60-150, 70-150, 80-150, 90-150, 100-150, 110-150, 120-150, 130-150, 140-150, 20-140, 30-140, 40-140, 50-140, 60-140, 70-140, 80-140, 90-140, 100-140, 110-140, 120-140, 130-140, 20-130, 30-130, 40-130, 50-130, 60-130, 70-130, 80-130, 90-130, 100-130, 110-130, 120-130, 20-120, 30-120, 40-120, 50-120, 60-120, 70-120, 80-120, 90-120, 100-120, 110-120, 20-110, 30-110, 40-110, 50-110, 60-110, 70-110, 80-110, 90-110, 100-110, 20-100, 30-100, 40-100, 50-100, 60-100, 70-100, 80-100, 90-100, 20-90, 30-90, 40-90, 50-90, 60-90, 70-90, 80-90, 20-80, 30-80, 40-80, 50-80, 60-80, 70-80, 20-70, 30-70, 40-70, 50-70, 60-70, 20-60, 30-60, 40-60, 50-60, 20-50, 30-50, 40-50, 20-40, 30-40, or 20-30 nucleotides apart. In some embodiments, the first nick and the second nick are 40-100 nucleotides apart.

[0637] Without wishing to be bound by theory, it is thought that, for gene modifying systems where a second strand nick is provided and an inward nick orientation is selected, increasing the distance between the first strand nick and second strand nick may be preferred. As is described herein, an inward nick orientation may produce a higher number of DSBs than an outward nick orientation, and may result in a higher amount of undesired insertions and deletions than an outward nick orientation, but increasing the distance between the nicks may mitigate that increase in DSBs, undesired deletions, and/or undesired insertions. In some embodiments, an inward nick orientation wherein the first nick and the second nick are at least a threshold distance apart has an increased level of desired gene modifying system modification outcomes, a decreased level of undesired deletions, and/or a decreased level of undesired insertions relative to an otherwise similar inward nick orientation system where the first nick and the second nick are less than the a threshold distance apart. In some embodiments the threshold distance is given below.

[0638] In some embodiments, the first strand nick and the second strand nick are in an inward orientation. In some embodiments, the first strand nick and the second strand nick are in an inward orientation and the first strand nick and second strand nick are at least 100, 110, 120, 130, 140, 150, 160, 170, 180, 190, 200, 220, 240, 260, 280, 300, 350, 400, 450, or 500 nucleotides apart, e.g., at least 100 nucleotides apart, (and optionally no more than 500, 400, 300, 200, 190, 180, 170, 160, 150, 140, 130, or 120 nucleotides apart). In some embodiments, the first strand nick and the second strand nick are in an inward orientation and the first strand nick and second strand nick are 100-200, 110-200, 120-200, 130-200, 140-200, 150-200, 160-200, 170-200, 180-200, 190-200, 100-190, 110-190, 120-190, 130-190, 140-190, 150-190, 160-190, 170-190, 180-190, 100-180, 110-180, 120-180, 130-180, 140-180, 150-180, 160-180, 170-180, 100-170, 110-170, 120-170, 130-170, 140-170, 150-170, 160-170, 100-160, 110-160, 120-160, 130-160, 140-160, 150-160, 100-150, 110-150, 120-150, 130-150, 140-150, 100-140, 110-140, 120-140, 130-140, 100-130, 110-130, 120-130, 100-120, 110-120, or 100-110 nucleotides apart.

### Chemically Modified Nucleic Acids and Nucleic Acid End Features

[0639] A nucleic acid described herein (e.g., a template nucleic acid, e.g., a template RNA; or a nucleic acid (e.g., mRNA) encoding a gene modifying polypeptide; or a gRNA) can comprise unmodified or modified nucleobases. Naturally occurring RNAs are synthesized from four basic ribonucleotides: ATP, CTP, UTP and GTP, but may contain post-transcriptionally modified nucleotides. Further, approximately one hundred different nucleoside modifications have been identified in RNA (Rozenski, J, Crain, P, and McCloskey, J. (1999). The RNA Modification Database: 1999 update. Nucl Acids Res 27: 196-197). An RNA can also comprise wholly synthetic nucleotides that do not occur in nature.

[0640] In some embodiments, the chemical modification is one provided in WO/2016/183482, US Pat. Pub. No. 20090286852, of International Application No. WO/2012/019168, WO/2012/045075, WO/2012/135805, WO/2012/158736, WO/2013/039857, WO/2013/039861, WO/2013/052523, WO/2013/090648, WO/2013/096709, WO/2013/101690, WO/2013/106496, WO/2013/130161, WO/2013/151669, WO/2013/151736, WO/2013/151672, WO/2013/151664, WO/2013/151665, WO/2013/151668, WO/2013/151671, WO/2013/151667, WO/2013/151670, WO/2013/151666, WO/2013/151663, WO/2014/028429, WO/2014/081507, WO/2014/093924, WO/2014/093574, WO/2014/113089, WO/2014/144711, WO/2014/144767, WO/2014/144039, WO/2014/152540, WO/2014/152030, WO/2014/152031, WO/2014/152027, WO/2014/152211, WO/2014/158795, WO/2014/159813, WO/2014/164253, WO/2015/006747, WO/2015/034928, WO/2015/034925, WO/2015/038892, WO/2015/048744, WO/2015/051214, WO/2015/051173, WO/2015/051169, WO/2015/058069, WO/2015/085318, WO/2015/089511, WO/2015/105926, WO/2015/164674, WO/2015/196130, WO/2015/196128, WO/2015/196118, WO/2016/011226, WO/2016/011222, WO/2016/011306, WO/2016/014846, WO/2016/022914, WO/2016/036902, WO/2016/077125, or WO/2016/077123, each of which is herein incorporated by reference in its entirety. It is understood that incorporation of a chemically modified nucleotide into a polynucleotide can result in the modification being incorporated into a nucleobase, the backbone, or both, depending on the location of the modification in the nucleotide. In some embodiments, the backbone modification is one provided in EP 2813570, which is herein incorporated by reference in its entirety. In some embodiments, the modified cap is one provided in US Pat. Pub. No. 20050287539, which is herein incorporated by reference in its entirety.

[0641] In some embodiments, the chemically modified nucleic acid (e.g., RNA, e.g., mRNA) comprises one or more of ARCA: anti-reverse cap analog (m27.3′-OGP3G), GP3G (Unmethylated Cap Analog), m7GP3G (Monomethylated Cap Analog), m32.2.7GP3G (Trimethylated Cap Analog), m5CTP (5′-methyl-cytidine triphosphate), m6ATP (N6-methyl-adenosine-5′-triphosphate), s2UTP (2-thio-uridine triphosphate), and Y (pseudouridine triphosphate).

[0642] In some embodiments, the chemically modified nucleic acid comprises a 5′ cap, e.g.: a 7-methylguanosine cap (e.g., a O-Me-m7G cap); a hypermethylated cap analog; an NAD+-derived cap analog (e.g., as described in Kiledjian, Trends in Cell Biology 28, 454-464 (2018)); or a modified, e.g., biotinylated, cap analog (e.g., as described in Bednarek et al., Phil Trans R Soc B 373, 20180167 (2018)).

[0643] In some embodiments, the chemically modified nucleic acid comprises a 3′ feature selected from one or more of: a polyA tail; a 16-nucleotide long stem-loop structure flanked by unpaired 5 nucleotides (e.g., as described by Mannironi et al., Nucleic Acid Research 17, 9113-9126 (1989)); a triple-helical structure (e.g., as described by Brown et al., PNAS 109, 19202-19207 (2012)); a tRNA, Y RNA, or vault RNA structure (e.g., as described by Labno et al., Biochemica et Biophysica Acta 1863, 3125-3147 (2016)); incorporation of one or more deoxyribonucleotide triphosphates (dNTPs), 2′O-Methylated NTPs, or phosphorothioate-NTPs; a single nucleotide chemical modification (e.g., oxidation of the 3′ terminal ribose to a reactive aldehyde followed by conjugation of the aldehyde-reactive modified nucleotide); or chemical ligation to another nucleic acid molecule.

[0644] In some embodiments, the nucleic acid (e.g., template nucleic acid) comprises one or more modified nucleotides, e.g., selected from dihydrouridine, inosine, 7-methylguanosine, 5-methylcytidine (5mC), 5′ Phosphate ribothymidine, 2′-O-methyl ribothymidine, 2′-O-ethyl ribothymidine, 2′-fluoro ribothymidine, C-5 propynyl-deoxycytidine (pdC), C-5 propynyl-deoxyuridine (pdU), C-5 propynyl-cytidine (pC), C-5 propynyl-uridine (pU), 5-methyl cytidine, 5-methyl uridine, 5-methyl deoxycytidine, 5-methyl deoxyuridine methoxy, 2,6-diaminopurine, 5′-Dimethoxytrityl-N4-ethyl-2′-deoxycytidine, C-5 propynyl-f-cytidine (pfC), C-5 propynyl-f-uridine (pfU), 5-methyl f-cytidine, 5-methyl f-uridine, C-5 propynyl-m-cytidine (pmC), C-5 propynyl-f-uridine (pmU), 5-methyl m-cytidine, 5-methyl m-uridine, LNA (locked nucleic acid), MGB (minor groove binder) pseudouridine (Y), 1-N-methylpseudouridine (1-Me-Y′), or 5-methoxyuridine (5-MO-U).

[0645] In some embodiments, the nucleic acid comprises a backbone modification, e.g., a modification to a sugar or phosphate group in the backbone. In some embodiments, the nucleic acid comprises a nucleobase modification.

[0646] In some embodiments, the nucleic acid comprises one or more chemically modified nucleotides of Table 13, one or more chemical backbone modifications of Table 14, one or more chemically modified caps of Table 15. For instance, in some embodiments, the nucleic acid comprises two or more (e.g., 3, 4, 5, 6, 7, 8, 9, or 10 or more) different types of chemical modifications. As an example, the nucleic acid may comprise two or more (e.g., 3, 4, 5, 6, 7, 8, 9, or 10 or more) different types of modified nucleobases, e.g., as described herein, e.g., in Table 13. Alternatively or in combination, the nucleic acid may comprise two or more (e.g., 3, 4, 5, 6, 7, 8, 9, or 10 or more) different types of backbone modifications, e.g., as described herein, e.g., in Table 14. Alternatively or in combination, the nucleic acid may comprise one or more modified cap, e.g., as described herein, e.g., in Table 15. For instance, in some embodiments, the nucleic acid comprises one or more type of modified nucleobase and one or more type of backbone modification; one or more type of modified nucleobase and one or more modified cap; one or more type of modified cap and one or more type of backbone modification; or one or more type of modified nucleobase, one or more type of backbone modification, and one or more type of modified cap.

[0647] In some embodiments, the nucleic acid comprises one or more (e.g., 2, 3, 4, 5, 6, 7, 8, 9, 10, 20, 30, 40, 50, 60, 70, 80, 90, 100, 150, 200, 250, 300, 350, 400, 450, 500, 600, 700, 800, 900, 1000, or more) modified nucleobases. In some embodiments, all nucleobases of the nucleic acid are modified. In some embodiments, the nucleic acid is modified at one or more (e.g., 2, 3, 4, 5, 6, 7, 8, 9, 10, 20, 30, 40, 50, 60, 70, 80, 90, 100, 150, 200, 250, 300, 350, 400, 450, 500, 600, 700, 800, 900, 1000, or more) positions in the backbone. In some embodiments, all backbone positions of the nucleic acid are modified.

TABLE 13
Modified nucleotides

| | |
|---|---|
| 5-aza-uridine | N2-methyl-6-thio-guanosine |
| 2-thio-5-aza-midine | N2,N2-dimethyl-6-thio-guanosine |
| 2-thiouridine | pyridin-4-one ribonucleoside |
| 4-thio-pseudouridine | 2-thio-5-aza-uridine |
| 2-thio-pseudouridine | 2-thiomidine |
| 5-hydroxyuridine | 4-thio-pseudomidine |
| 3-methyluridine | 2-thio-pseudowidine |
| 5-carboxymethyl-uridine | 3-methylmidine |
| 1-carboxymethyl-pseudouridine | 1-propynyl-pseudomidine |
| 5-propynyl-uridine | 1-methyl-1-deaza-pseudomidine |
| 1-propynyl-pseudouridine | 2-thio-1-methyl-1-deaza-pseudouridine |
| 5-taurinomethyluridine | 4-methoxy-pseudomidine |
| 1-taurinomethyl-pseudouridine | 5′-O-(1-Thiophosphate)-Adenosine |
| 5-taurinomethyl-2-thio-uridine | 5′-O-(1-Thiophosphate)-Cytidine |
| 1-taurinomethyl-4-thio-uridine | 5′-O-(1-thiophosphate)-Guanosine |
| 5-methyl-uridine | 5′-O-(1-Thiophophate)-Uridine |
| 1-methyl-pseudouridine | 5′-O-(1-Thiophosphate)-Pseudouridine |
| 4-thio-1-methyl-pseudouridine | 2′-O-methyl-Adenosine |
| 2-thio-1-methyl-pseudouridine | 2′-O-methyl-Cytidine |
| 1-methyl-1-deaza-pseudouridine | 2′-O-methyl-Guanosine |
| 2-thio-1-methyl-1-deaza-pseudomidine | 2′-O-methyl-Uridine |
| dihydrouridine | 2′-O-methyl-Pseudouridine |
| dihydropseudouridine | 2′-O-methyl-Inosine |
| 2-thio-dihydromidine | 2-methyladenosine |
| 2-thio-dihydropseudouridine | 2-methylthio-N6-methyladenosine |
| 2-methoxyuridine | 2-methylthio-N6 isopentenyladenosine |
| 2-methoxy-4-thio-uridine | 2-methylthio-N6-(cis- |
| 4-methoxy-pseudouridine | hydroxyisopentenyl)adenosine |
| 4-methoxy-2-thio-pseudouridine | N6-methyl-N6-threonylcarbamoyladenosine |
| 5-aza-cytidine | N6-hydroxynorvalylcarbamoyladenosine |
| pseudoisocytidine | 2-methylthio-N6-hydroxynorvalyl |
| 3-methyl-cytidine | carbamoyladenosine |
| N4-acetylcytidine | 2′-O-ribosyladenosine (phosphate) |
| 5-formylcytidine | 1,2′-O-dimethylinosine |
| N4-methylcytidine | 5,2′-O-dimethylcytidine |
| 5-hydroxymethylcytidine | N4-acetyl-2′-O-methylcytidine |
| 1-methyl-pseudoisocytidine | Lysidine |
| pyrrolo-cytidine | 7-methylguanosine |
| pyrrolo-pseudoisocytidine | N2,2′-O-dimethylguanosine |
| 2-thio-cytidine | N2,N2,2′-O-trimethylguanosine |
| 2-thio-5-methyl-cytidine | 2′-O-ribosylguanosine (phosphate) |
| 4-thio-pseudoisocytidine | Wybutosine |
| 4-thio-1-methyl-pseudoisocytidine | Peroxywybutosine |
| 4-thio-1-methyl-1-deaza-pseudoisocytidine | Hydroxywybutosine |
| 1-methyl-1-deaza-pseudoisocytidine | undermodified hydroxywybutosine |
| zebularine | methylwyosine |
| 5-aza-zebularine | queuosine |
| 5-methyl-zebularine | epoxyqueuosine |
| 5-aza-2-thio-zebularine | galactosyl-queuosine |
| 2-thio-zebularine | mannosyl-queuosine |
| 2-methoxy-cytidine | 7-cyano-7-deazaguanosine |
| 2-methoxy-5-methyl-cytidine | 7-aminomethyl-7-deazaguanosine |
| 4-methoxy-pseudoisocytidine | archaeosine |
| 4-methoxy-1-methyl-pseudoisocytidine | 5,2′-O-dimethyluridine |
| 2-aminopurine | 4-thiouridine |
| 2,6-diaminopurine | 5-methyl-2-thiouridine |
| 7-deaza-adenine | 2-thio-2′-O-methyluridine |
| 7-deaza-8-aza-adenine | 3-(3-amino-3-carboxypropyl)uridine |
| 7-deaza-2-aminopurine | 5-methoxyuridine |
| 7-deaza-8-aza-2-aminopurine | uridine 5-oxyacetic acid |
| 7-deaza-2,6- diaminopurine | uridine 5-oxyacetic acid methyl ester |
| 7-deaza-8-aza-2,6-diarninopurine | 5-(carboxyhydroxymethyl)uridine) |
| 1-methyladenosine | 5-(carboxyhydroxymethyl)uridine methyl ester |
| N6-isopentenyladenosine | 5-methoxycarbonylmethyluridine |
| N6-(cis-hydroxyisopentenyl)adenosine | 5-methoxycarbonylmethyl-2′-O-methyluridine |
| 2-methylthio-N6-(cis-hydroxyisopentenyl) | 5-methoxycarbonylmethyl-2-thiouridine |
| adenosine | 5-aminomethyl-2-thiouridine |
| N6-glycinylcarbamoyladenosine | 5-methylaminomethyluridine |
| N6-threonylcarbamoyladenosine | 5-methylaminomethyl-2-thiouridine |
| 2-methylthio-N6-threonyl | 5-methylaminomethyl-2-selenouridine |
| carbamoyladenosine | 5-carbamoylmethyluridine |
| N6,N6-dimethyladenosine | 5-carbamoylmethyl-2′-O-methyluridine |
| 7-methyladenine | 5-carboxymethylaminomethyluridine |
| 2-methylthio-adenine | 5-carboxymethylaminomethyl-2′-O- |
| 2-methoxy-adenine | methyluridine |
| inosine | 5-carboxymethylaminomethyl-2-thiouridine |
| 1-methyl-inosine | N4,2′-O-dimethylcytidine |
| wyosine | 5-carboxymethyluridine |
| wybutosine | N6,2′-O-dimethyladenosine |
| 7-deaza-guanosine | N,N6,O-2′-trimethyladenosine |
| 7-deaza-8-aza-guanosine | N2,7-dimethylguanosine |
| 6-thio-guanosine | N2,N2,7-trimethylguanosine |
| 6-thio-7-deaza-guanosine | 3,2′-O-dimethyluridine |
| 6-thio-7-deaza-8-aza-guanosine | 5-methyldihydrouridine |
| 7-methyl-guanosine | 5-formyl-2′-O-methylcytidine |
| 6-thio-7-methyl-guanosine | 1,2′-O-dimethylguanosine |
| 7-methylinosine | 4-demethylwyosine |
| 6-methoxy-guanosine | Isowyosine |
| 1-methylguanosine | N6-acetyladenosine |
| N2-methylguanosine | |
| N2,N2-dimethylguanosine | |
| 8-oxo-guanosine | |
| 7-methyl-8-oxo-guanosine | |
| 1-methyl-6-thio-guanosine | |

TABLE 14
Backbone modifications

2′-O-Methyl backbone
Peptide Nucleic Acid (PNA) backbone
phosphorothioate backbone
morpholino backbone
carbamate backbone
siloxane backbone
sulfide backbone
sulfoxide backbone
sulfone backbone
formacetyl backbone
thioformacetyl backbone
methyleneformacetyl backbone
riboacetyl backbone
alkene containing backbone
sulfamate backbone
sulfonate backbone
sulfonamide backbone
methyleneimino backbone
methylenehydrazino backbone
amide backbone

TABLE 15
Modified caps

m7GpppA
m7GpppC
m2,7GpppG
m2,2,7GpppG
m7Gpppm7G
m7,2′OmeGpppG
m72′dGpppG
m7,3′OmeGpppG
m7,3′dGpppG
GppppG
m7GppppG
m7GppppA
m7GppppC
m2,7GppppG
m2,2,7GppppG
m7Gppppm7G
m7,2′OmeGppppG
m72′dGppppG
m7,3′OmeGppppG
m7,3′dGppppG

[0648] The nucleotides comprising the template of the gene modifying system can be natural or modified bases, or a combination thereof. For example, the template may contain pseudouridine, dihydrouridine, inosine, 7-methylguanosine, or other modified bases. In some embodiments, the template may contain locked nucleic acid nucleotides. In some embodiments, the modified bases used in the template do not inhibit the reverse transcription of the template. In some embodiments, the modified bases used in the template may improve reverse transcription, e.g., specificity or fidelity.

[0649] In some embodiments, an RNA component of the system (e.g., a template RNA or a gRNA) comprises one or more nucleotide modifications. In some embodiments, the modification pattern of a gRNA can significantly affect in vivo activity compared to unmodified or end-modified guides (e.g., as shown in FIG. 1D from Finn et al. Cell Rep 22(9):2227-2235 (2018); incorporated herein by reference in its entirety). Without wishing to be bound by theory, this process may be due, at least in part, to a stabilization of the RNA conferred by the modifications. Non-limiting examples of such modifications may include 2′-O-methyl (2′-O-Me), 2′-O-(2-methoxyethyl) (2′-O-MOE), 2′-fluoro (2′-F), phosphorothioate (PS) bond between nucleotides, G-C substitutions, and inverted abasic linkages between nucleotides and equivalents thereof.

[0650] In some embodiments, the template RNA (e.g., at the portion thereof that binds a target site) or the guide RNA comprises a 5′ terminus region. In some embodiments, the template RNA or the guide RNA does not comprise a 5′ terminus region. In some embodiments, the 5′ terminus region comprises a gRNA spacer region, e.g., as described with respect to sgRNA in Briner AE et al, Molecular Cell 56: 333-339 (2014) (incorporated herein by reference in its entirety; applicable herein, e.g., to all guide RNAs). In some embodiments, the 5′ terminus region comprises a 5′ end modification. In some embodiments, a 5′ terminus region with or without a spacer region may be associated with a crRNA, trRNA, sgRNA and/or dgRNA. The gRNA spacer region can, in some instances, comprise a guide region, guide domain, or targeting domain.

[0651] In some embodiments, the template RNAs (e.g., at the portion thereof that binds a target site) or guide RNAs described herein comprises any of the sequences shown in Table 4 of WO2018107028A1, incorporated herein by reference in its entirety. In some embodiments, where a sequence shows a guide and/or spacer region, the composition may comprise this region or not. In some embodiments, a guide RNA comprises one or more of the modifications of any of the sequences shown in Table 4 of WO2018107028A1, e.g., as identified therein by a SEQ ID NO. In embodiments, the nucleotides may be the same or different, and/or the modification pattern shown may be the same or similar to a modification pattern of a guide sequence as shown in Table 4 of WO2018107028A1. In some embodiments, a modification pattern includes the relative position and identity of modifications of the gRNA or a region of the gRNA (e.g. 5′ terminus region, lower stem region, bulge region, upper stem region, nexus region, hairpin 1 region, hairpin 2 region, 3′ terminus region). In some embodiments, the modification pattern contains at least 50%, 55%, 60%, 70%, 75%, 80%, 85%, 90%, 95%, 96%, 97%, 98%, 99%, or 100% of the modifications of any one of the sequences shown in the sequence column of Table 4 of WO2018107028A1, and/or over one or more regions of the sequence. In some embodiments, the modification pattern is at least 50%, 55%, 60%, 70%, 75%, 80%, 85%, 90%, 95%, 96%, 97%, 98%, 99%, or 100% identical to the modification pattern of any one of the sequences shown in the sequence column of Table 4 of WO2018107028A1. In some embodiments, the modification pattern is at least 50%, 55%, 60%, 70%, 75%, 80%, 85%, 90%, 95%, 96%, 97%, 98%, 99%, or 100% identical over one or more regions of the sequence shown in Table 4 of WO2018107028A1, e.g., in a 5 ‘ terminus region, lower stem region, bulge region, upper stem region, nexus region, hairpin 1 region, hairpin 2 region, and/or 3’ terminus region. In some embodiments, the modification pattern is least 50%, 55%, 60%, 70%, 75%, 80%, 85%, 90%, 95%, 96%, 97%, 98%, 99%, or 100% identical to the modification pattern of a sequence over the 5′ terminus region. In some embodiments, the modification pattern is least 50%, 55%, 60%, 70%, 75%, 80%, 85%, 90%, 95%, 96%, 97%, 98%, 99%, or 100% identical over the lower stem. In some embodiments, the modification pattern is least 50%, 55%, 60%, 70%, 75%, 80%, 85%, 90%, 95%, 96%, 97%, 98%, 99%, or 100% identical over the bulge. In some embodiments, the modification pattern is least 50%, 55%, 60%, 70%, 75%, 80%, 85%, 90%, 95%, 96%, 97%, 98%, 99%, or 100% identical over the upper stem. In some embodiments, the modification pattern is least 50%, 55%, 60%, 70%, 75%, 80%, 85%, 90%, 95%, 96%, 97%, 98%, 99%, or 100% identical over the nexus. In some embodiments, the modification pattern is least 50%, 55%, 60%, 70%, 75%, 80%, 85%, 90%, 95%, 96%, 97%, 98%, 99%, or 100% identical over the hairpin 1. In some embodiments, the modification pattern is least 50%, 55%, 60%, 70%, 75%, 80%, 85%, 90%, 95%, 96%, 97%, 98%, 99%, or 100% identical over the hairpin 2. In some embodiments, the modification pattern is least 50%, 55%, 60%, 70%, 75%, 80%, 85%, 90%, 95%, 96%, 97%, 98%, 99%, or 100% identical over the 3′ terminus. In some embodiments, the modification pattern differs from the modification pattern of a sequence of Table 4 of WO2018107028A1, or a region (e.g. 5′ terminus, lower stem, bulge, upper stem, nexus, hairpin 1, hairpin 2, 3′ terminus) of such a sequence, e.g., at 0, 1, 2, 3, 4, 5, 6, or more nucleotides. In some embodiments, the gRNA comprises modifications that differ from the modifications of a sequence of Table 4 of WO2018107028A1, e.g., at 0, 1, 2, 3, 4, 5, 6, or more nucleotides. In some embodiments, the gRNA comprises modifications that differ from modifications of a region (e.g. 5 ‘ terminus, lower stem, bulge, upper stem, nexus, hairpin 1, hairpin 2, 3’ terminus) of a sequence of Table 4 of WO2018107028A1, e.g., at 0, 1, 2, 3, 4, 5, 6, or more nucleotides.

[0652] In some embodiments, the template RNAs (e.g., at the portion thereof that binds a target site) or the gRNA comprises a 2′-O-methyl (2′-O-Me) modified nucleotide. In some embodiments, the gRNA comprises a 2′-O-(2-methoxy ethyl) (2′-O-moe) modified nucleotide. In some embodiments, the gRNA comprises a 2′-fluoro (2′-F) modified nucleotide. In some embodiments, the gRNA comprises a phosphorothioate (PS) bond between nucleotides. In some embodiments, the gRNA comprises a 5′ end modification, a 3′ end modification, or 5′ and 3′ end modifications. In some embodiments, the 5′ end modification comprises a phosphorothioate (PS) bond between nucleotides. In some embodiments, the 5′ end modification comprises a 2′-O-methyl (2′-O-Me), 2′-O-(2-methoxy ethyl) (2′-O-MOE), and/or 2′-fluoro (2′-F) modified nucleotide. In some embodiments, the 5′ end modification comprises at least one phosphorothioate (PS) bond and one or more of a 2′-O-methyl (2′-O-Me), 2′-O-(2-methoxyethyl) (2′-O-MOE), and/or 2′-fluoro (2′-F) modified nucleotide. The end modification may comprise a phosphorothioate (PS), 2′-O-methyl (2′-O-Me), 2′-O-(2-methoxyethyl) (2′-O-MOE), and/or 2′-fluoro (2′-F) modification. Equivalent end modifications are also encompassed by embodiments described herein. In some embodiments, the template RNA or gRNA comprises an end modification in combination with a modification of one or more regions of the template RNA or gRNA. Additional exemplary modifications and methods for protecting RNA, e.g., gRNA, and formulae thereof, are described in WO2018126176A1, which is incorporated herein by reference in its entirety.

[0653] In some embodiments, a template RNA described herein comprises three phosphorothioate linkages at the 5′ end and three phosphorothioate linkages at the 3′ end. In some embodiments, a template RNA described herein comprises three 2′-O-methyl ribonucleotides at the 5′ end and three 2′-O-methyl ribonucleotides at the 3′ end. In some embodiments, the 5′ most three nucleotides of the template RNA are 2′-O-methyl ribonucleotides, the 5′ most three internucleotide linkages of the template RNA are phosphorothioate linkages, the 3′ most three nucleotides of the template RNA are 2′-O-methyl ribonucleotides, and the 3′ most three internucleotide linkages of the template RNA are phosphorothioate linkages. In some embodiments, the template RNA comprises alternating blocks of ribonucleotides and 2′-O-methyl ribonucleotides, for instance, blocks of between 12 and 28 nucleotides in length. In some embodiments, the central portion of the template RNA comprises the alternating blocks and the 5′ and 3′ ends each comprise three 2′-O-methyl ribonucleotides and three phosphorothioate linkages.

[0654] In some embodiments, structure-guided and systematic approaches are used to introduce modifications (e.g., 2′-OMe-RNA, 2′-F-RNA, and PS modifications) to a template RNA or guide RNA, for example, as described in Mir et al. Nat Commun 9:2641 (2018) (incorporated by reference herein in its entirety). In some embodiments, the incorporation of 2′-F-RNAs increases thermal and nuclease stability of RNA:RNA or RNA:DNA duplexes, e.g., while minimally interfering with C3′-endo sugar puckering. In some embodiments, 2′-F may be better tolerated than 2′-OMe at positions where the 2′-OH is important for RNA:DNA duplex stability. In some embodiments, a crRNA comprises one or more modifications that do not reduce Cas9 activity, e.g., C10, C20, or C21 (fully modified), e.g., as described in Supplementary Table 1 of Mir et al. Nat Commun 9:2641 (2018), incorporated herein by reference in its entirety. In some embodiments, a tracrRNA comprises one or more modifications that do not reduce Cas9 activity, e.g., T2, T6, T7, or T8 (fully modified) of Supplementary Table 1 of Mir et al. Nat Commun 9:2641 (2018). In some embodiments, a crRNA comprises one or more modifications (e.g., as described herein) may be paired with a tracrRNA comprising one or more modifications, e.g., C20 and T2. In some embodiments, a gRNA comprises a chimera, e.g., of a crRNA and a tracrRNA (e.g., Jinek et al. Science 337(6096):816-821 (2012)). In embodiments, modifications from the crRNA and tracrRNA are mapped onto the single-guide chimera, e.g., to produce a modified gRNA with enhanced stability.

[0655] In some embodiments, gRNA molecules may be modified by the addition or subtraction of the naturally occurring structural components, e.g., hairpins. In some embodiments, a gRNA may comprise a gRNA with one or more 3′ hairpin elements deleted, e.g., as described in WO2018106727, incorporated herein by reference in its entirety. In some embodiments, a gRNA may contain an added hairpin structure, e.g., an added hairpin structure in the spacer region, which was shown to increase specificity of a CRISPR-Cas system in the teachings of Kocak et al. Nat Biotechnol 37(6):657-666 (2019). Additional modifications, including examples of shortened gRNA and specific modifications improving in vivo activity, can be found in US20190316121, incorporated herein by reference in its entirety.

[0656] In some embodiments, structure-guided and systematic approaches (e.g., as described in Mir et al. Nat Commun 9:2641 (2018); incorporated herein by reference in its entirety) are employed to find modifications for the template RNA. In embodiments, the modifications are identified with the inclusion or exclusion of a guide region of the template RNA. In some embodiments, a structure of polypeptide bound to template RNA is used to determine non-protein-contacted nucleotides of the RNA that may then be selected for modifications, e.g., with lower risk of disrupting the association of the RNA with the polypeptide. Secondary structures in a template RNA can also be predicted in silico by software tools, e.g., the RNAstructure tool available at rna.urmc.rochester.edu/RNAstructureWeb (Bellaousov et al. Nucleic Acids Res 41:W471-W474 (2013); incorporated by reference herein in its entirety), e.g., to determine secondary structures for selecting modifications, e.g., hairpins, stems, and/or bulges.

### Production of Compositions and Systems

[0657] As will be appreciated by one of skill, methods of designing and constructing nucleic acid constructs and proteins or polypeptides (such as the systems, constructs and polypeptides described herein) are routine in the art. Generally, recombinant methods may be used. See, in general, Smales & James (Eds.), Therapeutic Proteins: Methods and Protocols (Methods in Molecular Biology), Humana Press (2005); and Crommelin, Sindelar & Meibohm (Eds.), Pharmaceutical Biotechnology: Fundamentals and Applications, Springer (2013). Methods of designing, preparing, evaluating, purifying and manipulating nucleic acid compositions are described in Green and Sambrook (Eds.), Molecular Cloning: A Laboratory Manual (Fourth Edition), Cold Spring Harbor Laboratory Press (2012).

[0658] The disclosure provides, in part, a nucleic acid, e.g., vector, encoding a gene modifying polypeptide described herein, a template nucleic acid described herein, or both. In some embodiments, a vector comprises a selective marker, e.g., an antibiotic resistance marker. In some embodiments, the antibiotic resistance marker is a kanamycin resistance marker. In some embodiments, the antibiotic resistance marker does not confer resistance to beta-lactam antibiotics. In some embodiments, the vector does not comprise an ampicillin resistance marker. In some embodiments, the vector comprises a kanamycin resistance marker and does not comprise an ampicillin resistance marker. In some embodiments, a vector encoding a gene modifying polypeptide is integrated into a target cell genome (e.g., upon administration to a target cell, tissue, organ, or subject). In some embodiments, a vector encoding a gene modifying polypeptide is not integrated into a target cell genome (e.g., upon administration to a target cell, tissue, organ, or subject). In some embodiments, a vector encoding a template nucleic acid (e.g., template RNA) is not integrated into a target cell genome (e.g., upon administration to a target cell, tissue, organ, or subject). In some embodiments, if a vector is integrated into a target site in a target cell genome, the selective marker is not integrated into the genome. In some embodiments, if a vector is integrated into a target site in a target cell genome, genes or sequences involved in vector maintenance (e.g., plasmid maintenance genes) are not integrated into the genome. In some embodiments, if a vector is integrated into a target site in a target cell genome, transfer regulating sequences (e.g., inverted terminal repeats, e.g., from an AAV) are not integrated into the genome. In some embodiments, administration of a vector (e.g., encoding a gene modifying polypeptide described herein, a template nucleic acid described herein, or both) to a target cell, tissue, organ, or subject results in integration of a portion of the vector into one or more target sites in the genome(s) of said target cell, tissue, organ, or subject. In some embodiments, less than 99, 95, 90, 80, 70, 60, 50, 40, 30, 20, 10, 5, 4, 3, 2, or 1% of target sites (e.g., no target sites) comprising integrated material comprise a selective marker (e.g., an antibiotic resistance gene), a transfer regulating sequence (e.g., an inverted terminal repeat, e.g., from an AAV), or both from the vector.

[0659] Exemplary methods for producing a therapeutic pharmaceutical protein or polypeptide described herein involve expression in mammalian cells, although recombinant proteins can also be produced using insect cells, yeast, bacteria, or other cells under control of appropriate promoters. Mammalian expression vectors may comprise non-transcribed elements such as an origin of replication, a suitable promoter, and other 5′ or 3′ flanking non-transcribed sequences, and 5′ or 3′ non-translated sequences such as necessary ribosome binding sites, a polyadenylation site, splice donor and acceptor sites, and termination sequences. DNA sequences derived from the SV40 viral genome, for example, SV40 origin, early promoter, splice, and polyadenylation sites may be used to provide other genetic elements required for expression of a heterologous DNA sequence. Appropriate cloning and expression vectors for use with bacterial, fungal, yeast, and mammalian cellular hosts are described in Green & Sambrook, Molecular Cloning: A Laboratory Manual (Fourth Edition), Cold Spring Harbor Laboratory Press (2012).

[0660] Various mammalian cell culture systems can be employed to express and manufacture recombinant protein. Examples of mammalian expression systems include CHO, COS, HEK293, HeLA, and BHK cell lines. Processes of host cell culture for production of protein therapeutics are described in Zhou and Kantardjieff (Eds.), Mammalian Cell Cultures for Biologics Manufacturing (Advances in Biochemical Engineering Biotechnology), Springer (2014). Compositions described herein may include a vector, such as a viral vector, e.g., a lentiviral vector, encoding a recombinant protein. In some embodiments, a vector, e.g., a viral vector, may comprise a nucleic acid encoding a recombinant protein.

[0661] Purification of protein therapeutics is described in Franks, Protein Biotechnology: Isolation, Characterization, and Stabilization, Humana Press (2013); and in Cutler, Protein Purification Protocols (Methods in Molecular Biology), Humana Press (2010).

[0662] The disclosure also provides compositions and methods for the production of template nucleic acid molecules (e.g., template RNAs) with specificity for a gene modifying polypeptide and/or a genomic target site. In an aspect, the method comprises production of RNA segments including an upstream homology segment, a heterologous object sequence segment, a gene modifying polypeptide binding motif, and a gRNA segment.

### Therapeutic Applications

[0663] In some embodiments, a gene modifying system as described herein can be used to modify a cell (e.g., an animal cell, plant cell, or fungal cell). In some embodiments, a gene modifying system as described herein can be used to modify a mammalian cell (e.g., a human cell). In some embodiments, a gene modifying system as described herein can be used to modify a cell from a livestock animal (e.g., a cow, horse, sheep, goat, pig, llama, alpaca, camel, yak, chicken, duck, goose, or ostrich). In some embodiments, a gene modifying system as described herein can be used as a laboratory tool or a research tool, or used in a laboratory method or research method, e.g., to modify an animal cell, e.g., a mammalian cell (e.g., a human cell), a plant cell, or a fungal cell.

[0664] By integrating coding genes into a RNA sequence template, the gene modifying system can address therapeutic needs, for example, by providing expression of a therapeutic transgene in individuals with loss-of-function mutations, by replacing gain-of-function mutations with normal transgenes, by providing regulatory sequences to eliminate gain-of-function mutation expression, and/or by controlling the expression of operably linked genes, transgenes and systems thereof. In certain embodiments, the RNA sequence template encodes a promotor region specific to the therapeutic needs of the host cell, for example a tissue specific promotor or enhancer. In still other embodiments, a promotor can be operably linked to a coding sequence.

[0665] Accordingly, provided herein are methods for treating sickle cell disease (SCD) (e.g., sickle cell anemia) in a subject in need thereof. In some embodiments, treatment results in amelioration of one or more symptoms associated with SCD.

[0666] In some embodiments, a system herein is used to treat a subject having a mutation in E6 (e.g., E6V).

[0667] In some embodiments, treatment with a system disclosed herein results in correction of the E6V mutation in between about 60-70% (e.g., about 60-65% or about 65-70%) of cells. In some embodiments, treatment with a system disclosed herein results in correction of the E6V mutation in between about 60-70% (e.g., about 60-65% or about 65-70%) of DNA isolated from the treated cells.

[0668] In some embodiments, treatment with a gene modifying system described herein results in one or more of:
[0669] (a) a reduction in the number of sickle-shaped cells;
[0670] (b) a reduction in production of an abnormal version of beta-globulin (e.g., hemoglobulin S);
[0671] (c) a reduction of pain and/or organ damage associated with sickle cell-related blood vessel blockage; and/or
[0672] (d) an increase in normal blood flow, as compared to a subject having SCD that has not been treated with a gene modifying system described herein.

### Administration and Delivery

[0673] The compositions and systems described herein may be used in vitro or in vivo. In some embodiments the system or components of the system are delivered to cells (e.g., mammalian cells, e.g., human cells), e.g., in vitro or in vivo. In some embodiments, the cells are eukaryotic cells, e.g., cells of a multicellular organism, e.g., an animal, e.g., a mammal (e.g., human, swine, bovine), a bird (e.g., poultry, such as chicken, turkey, or duck), or a fish. In some embodiments, the cells are non-human animal cells (e.g., a laboratory animal, a livestock animal, or a companion animal). In some embodiments, the cell is a stem cell (e.g., a hematopoietic stem cell), a fibroblast, or a T cell. In some embodiments, the cell is an immune cell, e.g., a T cell (e.g., a Treg, CD4, CD8, γδ, or memory T cell), B cell (e.g., memory B cell or plasma cell), or NK cell. In some embodiments, the cell is a non-dividing cell, e.g., a non-dividing fibroblast or non-dividing T cell. In some embodiments, the cell is an HSC and p53 is not upregulated or is upregulated by less than 10%, 5%, 2%, or 1%, e.g., as determined according to the method described in Example 30 of PCT/US2019/048607. The skilled artisan will understand that the components of the gene modifying system may be delivered in the form of polypeptide, nucleic acid (e.g., DNA, RNA), and combinations thereof.

[0674] In one embodiment the system and/or components of the system are delivered as nucleic acid. For example, the gene modifying polypeptide may be delivered in the form of a DNA or RNA encoding the polypeptide, and the template RNA may be delivered in the form of RNA or its complementary DNA to be transcribed into RNA. In some embodiments the system or components of the system are delivered on 1, 2, 3, 4, or more distinct nucleic acid molecules. In some embodiments the system or components of the system are delivered as a combination of DNA and RNA. In some embodiments the system or components of the system are delivered as a combination of DNA and protein. In some embodiments the system or components of the system are delivered as a combination of RNA and protein. In some embodiments the gene modifying polypeptide is delivered as a protein.

[0675] In some embodiments the system or components of the system are delivered to cells, e.g. mammalian cells or human cells, using a vector. The vector may be, e.g., a plasmid or a virus. In some embodiments, delivery is in vivo, in vitro, ex vivo, or in situ. In some embodiments the virus is an adeno associated virus (AAV), a lentivirus, or an adenovirus. In some embodiments the system or components of the system are delivered to cells with a viral-like particle or a virosome. In some embodiments the delivery uses more than one virus, viral-like particle or virosome.

[0676] In one embodiment, the compositions and systems described herein can be formulated in liposomes or other similar vesicles. Liposomes are spherical vesicle structures composed of a uni- or multilamellar lipid bilayer surrounding internal aqueous compartments and a relatively impermeable outer lipophilic phospholipid bilayer. Liposomes may be anionic, neutral or cationic. Liposomes are biocompatible, nontoxic, can deliver both hydrophilic and lipophilic drug molecules, protect their cargo from degradation by plasma enzymes, and transport their load across biological membranes and the blood brain barrier (BBB) (see, e.g., Spuch and Navarro, Journal of Drug Delivery, vol. 2011, Article ID 469679, 12 pages, 2011. doi: 10.1155/2011/469679 for review).

[0677] Vesicles can be made from several different types of lipids; however, phospholipids are most commonly used to generate liposomes as drug carriers. Methods for preparation of multilamellar vesicle lipids are known in the art (see for example U.S. Pat. No. 6,693,086, the teachings of which relating to multilamellar vesicle lipid preparation are incorporated herein by reference). Although vesicle formation can be spontaneous when a lipid film is mixed with an aqueous solution, it can also be expedited by applying force in the form of shaking by using a homogenizer, sonicator, or an extrusion apparatus (see, e.g., Spuch and Navarro, Journal of Drug Delivery, vol. 2011, Article ID 469679, 12 pages, 2011. doi: 10.1155/2011/469679 for review). Extruded lipids can be prepared by extruding through filters of decreasing size, as described in Templeton et al., Nature Biotech, 15:647-652, 1997, the teachings of which relating to extruded lipid preparation are incorporated herein by reference.

[0678] A variety of nanoparticles can be used for delivery, such as a liposome, a lipid nanoparticle, a cationic lipid nanoparticle, an ionizable lipid nanoparticle, a polymeric nanoparticle, a gold nanoparticle, a dendrimer, a cyclodextrin nanoparticle, a micelle, or a combination of the foregoing.

[0679] Lipid nanoparticles are an example of a carrier that provides a biocompatible and biodegradable delivery system for the pharmaceutical compositions described herein. Nanostructured lipid carriers (NLCs) are modified solid lipid nanoparticles (SLNs) that retain the characteristics of the SLN, improve drug stability and loading capacity, and prevent drug leakage. Polymer nanoparticles (PNPs) are an important component of drug delivery. These nanoparticles can effectively direct drug delivery to specific targets and improve drug stability and controlled drug release. Lipid-polymer nanoparticles (PLNs), a type of carrier that combines liposomes and polymers, may also be employed. These nanoparticles possess the complementary advantages of PNPs and liposomes. A PLN is composed of a core-shell structure; the polymer core provides a stable structure, and the phospholipid shell offers good biocompatibility. As such, the two components increase the drug encapsulation efficiency rate, facilitate surface modification, and prevent leakage of water-soluble drugs. For a review, see, e.g., Li et al. 2017, Nanomaterials 7, 122; doi: 10.3390/nano7060122.

[0680] Exosomes can also be used as drug delivery vehicles for the compositions and systems described herein. For a review, see Ha et al. July 2016. Acta Pharmaceutica Sinica B. Volume 6, Issue 4, Pages 287-296; doi.org/10.1016/j.apsb.2016.02.001.

[0681] Fusosomes interact and fuse with target cells, and thus can be used as delivery vehicles for a variety of molecules. They generally consist of a bilayer of amphipathic lipids enclosing a lumen or cavity and a fusogen that interacts with the amphipathic lipid bilayer. The fusogen component has been shown to be engineerable in order to confer target cell specificity for the fusion and payload delivery, allowing the creation of delivery vehicles with programmable cell specificity (see for example Patent Application WO2020014209, the teachings of which relating to fusosome design, preparation, and usage are incorporated herein by reference).

[0682] In some embodiments, the protein component(s) of the gene modifying system may be pre-associated with the template nucleic acid (e.g., template RNA). For example, in some embodiments, the gene modifying polypeptide may be first combined with the template nucleic acid (e.g., template RNA) to form a ribonucleoprotein (RNP) complex. In some embodiments, the RNP may be delivered to cells via, e.g., transfection, nucleofection, virus, vesicle, LNP, exosome, fusosome.

[0683] A gene modifying system can be introduced into cells, tissues and multicellular organisms. In some embodiments the system or components of the system are delivered to the cells via mechanical means or physical means.

[0684] Formulation of protein therapeutics is described in Meyer (Ed.), Therapeutic Protein Drug Products: Practical Approaches to formulation in the Laboratory, Manufacturing, and the Clinic, Woodhead Publishing Series (2012).

### Tissue Specific Activity/Administration

[0685] In some embodiments, a system described herein can make use of one or more feature (e.g., a promoter or microRNA binding site) to limit activity in off-target cells or tissues.

[0686] In some embodiments, a nucleic acid described herein (e.g., a template RNA or a DNA encoding a template RNA) comprises a promoter sequence, e.g., a tissue specific promoter sequence. In some embodiments, the tissue-specific promoter is used to increase the target-cell specificity of a gene modifying system. For instance, the promoter can be chosen on the basis that it is active in a target cell type but not active in (or active at a lower level in) a non-target cell type. Thus, even if the promoter integrated into the genome of a non-target cell, it would not drive expression (or only drive low level expression) of an integrated gene. A system having a tissue-specific promoter sequence in the template RNA may also be used in combination with a microRNA binding site, e.g., in the template RNA or a nucleic acid encoding a gene modifying protein, e.g., as described herein. A system having a tissue-specific promoter sequence in the template RNA may also be used in combination with a DNA encoding a gene modifying polypeptide, driven by a tissue-specific promoter, e.g., to achieve higher levels of gene modifying protein in target cells than in non-target cells. In some embodiments, e.g., for liver indications, a tissue-specific promoter is selected from Table 3 of WO2020014209, incorporated herein by reference.

[0687] In some embodiments, a nucleic acid described herein (e.g., a template RNA or a DNA encoding a template RNA) comprises a microRNA binding site. In some embodiments, the microRNA binding site is used to increase the target-cell specificity of a gene modifying system. For instance, the microRNA binding site can be chosen on the basis that is recognized by a miRNA that is present in a non-target cell type, but that is not present (or is present at a reduced level relative to the non-target cell) in a target cell type. Thus, when the template RNA is present in a non-target cell, it would be bound by the miRNA, and when the template RNA is present in a target cell, it would not be bound by the miRNA (or bound but at reduced levels relative to the non-target cell). While not wishing to be bound by theory, binding of the miRNA to the template RNA may interfere with its activity, e.g., may interfere with insertion of the heterologous object sequence into the genome. Accordingly, the system would edit the genome of target cells more efficiently than it edits the genome of non-target cells, e.g., the heterologous object sequence would be inserted into the genome of target cells more efficiently than into the genome of non-target cells, or an insertion or deletion is produced more efficiently in target cells than in non-target cells. A system having a microRNA binding site in the template RNA (or DNA encoding it) may also be used in combination with a nucleic acid encoding a gene modifying polypeptide, wherein expression of the gene modifying polypeptide is regulated by a second microRNA binding site, e.g., as described herein. In some embodiments, e.g., for liver indications, a miRNA is selected from Table 4 of WO2020014209, incorporated herein by reference.

[0688] In some embodiments, the template RNA comprises a microRNA sequence, an siRNA sequence, a guide RNA sequence, or a piwi RNA sequence.

### Promoters

[0689] In some embodiments, one or more promoter or enhancer elements are operably linked to a nucleic acid encoding a gene modifying protein or a template nucleic acid, e.g., that controls expression of the heterologous object sequence. In certain embodiments, the one or more promoter or enhancer elements comprise cell-type or tissue specific elements. In some embodiments, the promoter or enhancer is the same or derived from the promoter or enhancer that naturally controls expression of the heterologous object sequence. For example, the ornithine transcarbomylase promoter and enhancer may be used to control expression of the ornithine transcarbomylase gene in a system or method provided by the invention for correcting ornithine transcarbomylase deficiencies. In some embodiments, the promoter is a promoter of Table 16 or 17 or a functional fragment or variant thereof.

[0690] Exemplary tissue specific promoters that are commercially available can be found, for example, at a uniform resource locator (e.g., invivogen.com/tissue-specific-promoters). In some embodiments, a promoter is a native promoter or a minimal promoter, e.g., which consists of a single fragment from the S′ region of a given gene. In some embodiments, a native promoter comprises a core promoter and its natural S′ UTR. In some embodiments, the 5′ UTR comprises an intron. In other embodiments, these include composite promoters, which combine promoter elements of different origins or were generated by assembling a distal enhancer with a minimal promoter of the same origin.

[0691] Exemplary cell or tissue specific promoters are provided in the tables, below, and exemplary nucleic acid sequences encoding them are known in the art and can be readily accessed using a variety of resources, such as the NCBI database, including RefSeq, as well as the Eukaryotic Promoter Database (//epd.epfl.ch//index.php)

TABLE 16
Exemplary cell or tissue-specific promoters

| Promoter | Target cells |
|---|---|
| B29 Promoter | B cells |
| CD14 Promoter | Monocytic Cells |
| CD43 Promoter | Leukocytes and platelets |
| CD45 Promoter | Hematopoeitic cells |
| CD68 promoter | macrophages |
| Desmin promoter | muscle cells |
| Elastase-1 | pancreatic acinar cells |
| promoter | |
| Endoglin promoter | endothelial cells |
| fibronectin | differentiating cells, healing |
| promoter | tissue |
| Flt-1 promoter | endothelial cells |
| GFAP promoter | Astrocytes |
| GPIIB promoter | megakaryocytes |
| ICAM-2 Promoter | Endothelial cells |
| INF-Beta promoter | Hematopoeitic cells |
| Mb promoter | muscle cells |
| Nphs1 promoter | podocytes |
| OG-2 promoter | Osteoblasts, Odonblasts |
| SP-B promoter | Lung |
| Syn1 promoter | Neurons |
| WASP promoter | Hematopoeitic cells |
| SV40/bAlb | Liver |
| promoter | |
| SV40/bAlb | Liver |
| promoter | |
| SV40/Cd3 | Leukocytes and platelets |
| promoter | |
| SV40/CD45 | hematopoeitic cells |
| promoter | |
| NSE/RU5′ | Mature Neurons |
| promoter | |

TABLE 17

| | | |
|---|---|---|
| Promoter | Gene Description | Gene Specificity |

Additional exemplary cell or tissue-specific promoters

| | | |
|---|---|---|
| APOA2 | Apolipoprotein A-II | Hepatocytes (from hepatocyte |
| | | progenitors) |
| SERPINA | Serpin peptidase inhibitor, clade A | Hepatocytes |
| 1 (hAAT) | (alpha-1 | (from definitive endoderm |
| | antiproteinase, antitrypsin), member 1 | stage) |
| | (also named alpha 1 anti-tryps in) | |
| CYP3A | Cytochrome P450, family 3, | Mature Hepatocytes |
| | subfamily A, polypeptide | |
| MIR122 | MicroRNA 122 | Hepatocytes |
| | | (from early stage embryonic |
| | | liver cells) |
| | | and endoderm |

Pancreatic specific promoters

| | | |
|---|---|---|
| INS | Insulin | Pancreatic beta cells |
| | | (from definitive endoderm stage) |
| IRS2 | Insulin receptor substrate 2 | Pancreatic beta cells |
| Pdx1 | Pancreatic and duodenal | Pancreas |
| | homeobox 1 | (from definitive endoderm stage) |
| Alx3 | Aristaless-like homeobox 3 | Pancreatic beta cells |
| | | (from definitive endoderm stage) |
| Ppy | Pancreatic polypeptide | PP pancreatic cells |
| | | (gamma cells) |

Cardiac specific promoters

| | | |
|---|---|---|
| Myh6 | Myosin, heavy chain 6, cardiac | Late differentiation marker of cardiac |
| (aMHC) | muscle, alpha | muscle cells (atrial specificity) |
| MYL2 | Myosin, light chain 2, regulatory, | Late differentiation marker of cardiac |
| (MLC-2v) | cardiac, slow | muscle cells (ventricular specificity) |
| ITNNl3 | Troponin I type 3 (cardiac) | Cardiomyocytes |
| (cTnl) | | (from immature state) |
| ITNNl3 | Troponin I type 3 (cardiac) | Cardiomyocytes |
| (cTnl) | | (from immature state) |
| NPPA | Natriuretic peptide precursor A (also | Atrial specificity in adult cells |
| (ANF) | named Atrial Natriuretic Factor) | |
| Slc8a1 | Solute carrier family 8 | Cardiomyocytes from early |
| (Ncx1) | (sodium/calcium exchanger), member 1 | developmental stages |

CNS specific promoters

| | | |
|---|---|---|
| SYN1 | Synapsin I | Neurons |
| (hSyn) | | |
| GFAP | Glial fibrillary acidic protein | Astrocytes |
| INA | Internexin neuronal intermediate | Neuroprogenitors |
| | filament protein, alpha (a-internexin) | |
| NES | Nestin | Neuroprogenitors and ectoderm |
| MOBP | Myelin-associated oligodendrocyte | Oligodendrocytes |
| | basic protein | |
| MBP | Myelin basic protein | Oligodendrocytes |
| TH | Tyrosine hydroxylase | Dopaminergic neurons |
| FOXA2 | Forkhead box A2 | Dopaminergic neurons (also used as a |
| (HNF3 | | marker of endoderm) |
| beta) | | |

Skin specific promoters

| | | |
|---|---|---|
| FLG | Filaggrin | Keratinocytes from granular layer |
| K14 | Keratin 14 | Keratinocytes from granular |
| | | and basal layers |
| TGM3 | Transglutaminase 3 | Keratinocytes from granular layer |

Immune cell specific promoters

| | | |
|---|---|---|
| ITGAM | Integrin, alpha M (complement | Monocytes, macrophages, granulocytes, |
| (CD11B) | component 3 receptor 3 subunit) | natural killer cells |

Urogential cell specific promoters

| | | |
|---|---|---|
| Pbsn | Probasin | Prostatic epithelium |
| Upk2 | Uroplakin 2 | Bladder |
| Sbp | Spermine binding protein | Prostate |
| Fer1l4 | Fer-1-like 4 | Bladder |

Endothelial cell specific promoters

| | | |
|---|---|---|
| ENG | Endoglin | Endothelial cells |

Pluripotent and embryonic cell specific promoters

| | | |
|---|---|---|
| Oct4 | POU class 5 homeobox 1 | Pluripotent cells |
| (POU5F1) | | (germ cells, ES cells, iPS cells) |
| NANOG | Nanog homeobox | Pluripotent cells |
| | | (ES cells, iPS cells) |
| Synthetic | Synthetic promoter based on a Oct-4 | Pluripotent cells (ES cells, iPS cells) |
| Oct4 | core enhancer element | |
| T | Brachyury | Mesoderm |
| brachyury | | |
| NES | Nestin | Neuroprogenitors and Ectoderm |
| SOX17 | SRY (sex determining region Y)-box | Endoderm |
| | 17 | |
| FOXA2 | Forkhead box A2 | Endoderm (also used as a marker of |
| (HNFJ | | dopaminergic neurons) |
| beta) | | |
| MIR122 | MicroRNA 122 | Endoderm and hepatocytes |
| | | (from early stage embryonic liver cells~ |

[0692] Depending on the host/vector system utilized, any of a number of suitable transcription and translation control elements, including constitutive and inducible promoters, transcription enhancer elements, transcription terminators, etc. may be used in the expression vector (see e.g., Bitter et al. (1987) Methods in Enzymology, 153.516-544; incorporated herein by reference in its entirety).

[0693] In some embodiments, a nucleic acid encoding a gene modifying protein or template nucleic acid is operably linked to a control element, e.g., a transcriptional control element, such as a promoter The transcriptional control element may, in some embodiment, be functional in either a eukaryotic cell, e.g., a mammalian cell; or a prokaryotic cell (e.g., bacterial or archaeal cell). In some embodiments, a nucleotide sequence encoding a polypeptide is operably linked to multiple control elements, e.g, that allow expression of the nucleotide sequence encoding the polypeptide in both prokaryotic and eukaryotic cells.

[0694] For illustration purposes, examples of spatially restricted promoters include, but are not limited to, neuron-specific promoters, adipocyte-specific promoters, cardiomyocyte-specific promoters, smooth muscle-specific promoters, photoreceptor-specific promoters, etc. Neuron-specific spatially restricted promoters include, but are not limited to, a neuron-specific enolase (NSE) promoter (see, e.g., EMBL HSENO2, X51956), an aromatic amino acid decarboxylase (AADC) promoter, a neurofilament promoter (see, e.g., GenBank HUMNFL, L04147); a synapsin promoter (see, e.g., GenBank HUMSYNIB, M55301); a thy-1 promoter (see, e.g., Chen et al (1987) Cell 51:7-19; and Llewellyn, et al. (2010) Nat. Med. 16(10). 1161-1166), a serotonin receptor promoter (see, e.g., GenBank S62283); a tyrosine hydroxylase promoter (TH) (see, e.g., Oh et al. (2009) Gene Ther 16.437, Sasaoka et al. (1992) Mol. Brain Res. 16:274; Boundy et al (1998) J. Neurosci. 18:9989; and Kaneda et al. (1991) Neuron 6:583-594); a GnRH promoter (see, e.g., Radovick et al. (1991) Proc. Natl. Acad Sci USA 88.3402-3406); an L7 promoter (see, e.g., Oberdick et al. (1990) Science 248:223-226); a DNMT promoter (see, e.g., Bartge et al. (1988) Proc. Natl Acad. Sci. USA 85:3648-3652); an enkephalin promoter (sec, e.g., Comb et al. (1988) EMBO J. 17:3793-3805); a myelin basic protein (MBP) promoter; a Ca2+-calmodulin-dependent protein kinase II-alpha (CamKIIa) promoter (see, e.g., Mayford et al. (1996) Proc Natl Acad. Sci. USA 93-13250; and Casanova et al. (2001) Genesis 31.37), a CMV enhancer/platelet-derived growth factor-p promoter (see, e.g., Liu et al. (2004) Gene Therapy 11:52-60), and the like

[0695] Adipocyte-specific spatially restricted promoters include, but are not limited to, the al2 gene promoter/enhancer, e.g., a region from −5.4 kb to +21 bp of a human aP2 gene (see, e.g., Tozzo et al. (1997) Endocrinol. 138:1604; Ross et al. (1990) Proc. Natl. Acad. Sci. USA 87:9590, and Pavjani et al. (2005) Nat. Med. 11:797); a glucose transporter-4 (GLUT4) promoter (see, e.g., Knight et al. (2003) Proc. Natl. Acad. Sci. USA 100:14725); a fatty acid translocase (FAT/CD36) promoter (see, e.g., Kuriki et al (2002) Biol Pharm. Bull. 25-1476; and Sato et al. (2002) J. Biol. Chem. 277:15703); a stearoyl-CoA desaturase-1 (SCD1) promoter (Tabor et al. (1999) J. Biol. Chem. 274:20603), a leptin promoter (see, e.g, Mason et al (1998) Endocrinol 139:1013; and Chen et al. (1999) Biochem. Biophys. Res. Comm. 262:187); an adiponectin promoter (see, e.g., Kita et al. (2005) Biochem Biophys Res. Comm. 331:484; and Chakrabarti (2010) Endocrinol. 151-2408); an adipsin promoter (see, e.g., Platt et al (1989) Proc. Natl. Acad Sci. USA 86:7490); a resistin promoter (see, e.g., Seo et al. (2003) Molec. Endocrinol. 17:1522); and the like

[0696] Cardiomyocyte-specific spatially restricted promoters include, but are not limited to, control sequences derived from the following genes myosin light chain-2, o-myosin heavy chain, AE3, cardiac troponin C, cardiac actin, and the like. Franz et al. (1997) Cardiovasc. Res. 35:560-566; Robbins et al (1995) Ann N.Y. Acad. Sci. 752:492-505, Linn et al. (1995) Circ. Res. 76:584-591; Parmacek et al. (1994) Mol. Cell. Biol. 14:1870-1885; Hunter et al. (1993) Hypertension 22:608-617; and Sartorelli et al. (1992) Proc. Natl. Acad. Sci. USA 89:4047-4051.

[0697] Smooth muscle-specific spatially restricted promoters include, but are not limited to, an SM220 promoter (see, e.g., Akyürek et al. (2000) Mol. Med. 6:983; and U.S. Pat. No. 7,169,874); a smoothelin promoter (see, e.g., WO 2001/018048); an a-smooth muscle actin promoter; and the like. For example, a 0.4 kb region of the SM220 promoter, within which lie two CArG elements, has been shown to mediate vascular smooth muscle cell-specific expression (see, e.g., Kim, et al. (1997) Mol. Cell. Biol. 17, 2266-2278; Li, et al., (1996) J. Cell Biol. 132, 849-859; and Moessler, et al. (1996) Development 122, 2415-2425).

[0698] Photoreceptor-specific spatially restricted promoters include, but are not limited to, a rhodopsin promoter; a rhodopsin kinase promoter (Young et al. (2003) Ophthalmol. Vis. Sci. 44:4076); a beta phosphodiesterase gene promoter (Nicoud et al. (2007) J. Gene Med. 9-1015); a retinitis pigmentosa gene promoter (Nicoud et al. (2007) supra); an interphotoreceptor retinoid-binding protein (IRBP) gene enhancer (Nicoud et al. (2007) supra), an IRBP gene promoter (Yokoyama et al. (1992) Exp Eye Res. 55:225); and the like.

[0699] In some embodiments, a gene modifying system, e.g., DNA encoding a gene modifying polypeptide, DNA encoding a template RNA, or DNA or RNA encoding a heterologous object sequence, is designed such that one or more elements is operably linked to a tissue-specific promoter, e.g., a promoter that is active in T-cells. In further embodiments, the T-cell active promoter is inactive in other cell types, e.g., B-cells, NK cells. In some embodiments, the T-cell active promoter is derived from a promoter for a gene encoding a component of the T-cell receptor, e.g., TRAC, TRBC, TRGC, TRDC. In some embodiments, the T-cell active promoter is derived from a promoter for a gene encoding a component of a T-cell-specific cluster of differentiation protein, e.g., CD3, e.g., CD3D, CD3E, CD3G, CD3Z. In some embodiments, T-cell-specific promoters in gene modifying systems are discovered by comparing publicly available gene expression data across cell types and selecting promoters from the genes with enhanced expression in T-cells. In some embodiments, promoters may be selecting depending on the desired expression breadth, e.g., promoters that are active in T-cells only, promoters that are active in NK cells only, promoters that are active in both T-cells and NK cells.

[0700] Cell-specific promoters known in the art may be used to direct expression of a gene modifying protein, e.g., as described herein. Nonlimiting exemplary mammalian cell-specific promoters have been characterized and used in mice expressing Cre recombinase in a cell-specific manner. Certain nonlimiting exemplary mammalian cell-specific promoters are listed in Table 1 of U.S. Pat. No. 9,845,481, incorporated herein by reference

[0701] In some embodiments, a vector as described herein comprises an expression cassette. Typically, an expression cassette comprises the nucleic acid molecule of the instant invention operatively linked to a promoter sequence. For example, a promoter is operatively linked with a coding sequence when it is capable of affecting the expression of that coding sequence (e.g., the coding sequence is under the transcriptional control of the promoter). Encoding sequences can be operatively linked to regulatory sequences in sense or antisense orientation. In certain embodiments, the promoter is a heterologous promoter. In certain embodiments, an expression cassette may comprise additional elements, for example, an intron, an enhancer, a polyadenylation site, a woodchuck response element (WRE), and/or other elements known to affect expression levels of the encoding sequence. A promoter typically controls the expression of a coding sequence or functional RNA In certain embodiments, a promoter sequence comprises proximal and more distal upstream elements and can further comprise an enhancer element. An enhancer can typically stimulate promoter activity and may be an innate element of the promoter or a heterologous element inserted to enhance the level or tissue-specificity of a promoter. In certain embodiments, the promoter is derived in its entirety from a native gene. In certain embodiments, the promoter is composed of different elements derived from different naturally occurring promoters. In certain embodiments, the promoter comprises a synthetic nucleotide sequence. It will be understood by those skilled in the art that different promoters will direct the expression of a gene in different tissues or cell types, or at different stages of development, or in response to different environmental conditions or to the presence or the absence of a drug or transcriptional co-factor Ubiquitous, cell-type-specific, tissue-specific, developmental stage-specific, and conditional promoters, for example, drug-responsive promoters (e.g., tetracycline-responsive promoters) are well known to those of skill in the art. Exemplary promoters include, but are not limited to, the phosphoglycerate kinase (PKG) promoter, CAG (composite of the CMV enhancer the chicken beta actin promoter (CBA) and the rabbit beta globin intron), NSE (neuronal specific enolase), synapsin or NeuN promoters, the SV40 early promoter, mouse mammary tumor virus LTR promoter; adenovirus major late promoter (Ad MLP), a herpes simplex virus (HSV) promoter, a cytomegalovirus (CMV) promoter such as the CMV immediate early promoter region (CMVIE), SFFV promoter, rous sarcoma virus (RSV) promoter, synthetic promoters, hybrid promoters, and the like. Other promoters can be of human origin or from other species, including from mice Common promoters include, e.g., the human cytomegalovirus (CMV) immediate early gene promoter, the SV40 early promoter, the Rous sarcoma virus long terminal repeat, [beta]-actin, rat insulin promoter, the phosphoglycerate kinase promoter, the human alpha-1 antitrypsin (hAAT) promoter, the transthyretin promoter, the TBG promoter and other liver-specific promoters, the desmin promoter and similar muscle-specific promoters, the EF1-alpha promoter, hybrid promoters with multi-tissue specificity, promoters specific for neurons like synapsin and glyceraldehyde-3-phosphate dehydrogenase promoter, all of which are promoters well known and readily available to those of skill in the art, can be used to obtain high-level expression of the coding sequence of interest. In addition, sequences derived from non-viral genes, such as the murine metallothionein gene, will also find use herein. Such promoter sequences are commercially available from, e.g., Stratagene (San Diego, CA). Additional exemplary promoter sequences are described, for example, in WO2018213786A1 (incorporated by reference herein in its entirety)

[0702] In some embodiments, the apolipoprotein E enhancer (ApoE) or a functional fragment thereof is used, e.g., to drive expression in the liver. In some embodiments, two copies of the ApoE enhancer or a functional fragment thereof are used. In some embodiments, the ApoE enhancer or functional fragment thereof is used in combination with a promoter, e.g., the human alpha-1 antitrypsin (hAAT) promoter.

[0703] In some embodiments, the regulatory sequences impart tissue-specific gene expression capabilities. In some cases, the tissue-specific regulatory sequences bind tissue-specific transcription factors that induce transcription in a tissue specific manner. Various tissue-specific regulatory sequences (e.g., promoters, enhancers, etc.) are known in the art. Exemplary tissue-specific regulatory sequences include, but are not limited to, the following tissue-specific promoters: a liver-specific thyroxin binding globulin (TBG) promoter, a insulin promoter, a glucagon promoter, a somatostatin promoter, a pancreatic polypeptide (PPY) promoter, a synapsin-1 (Syn) promoter, a creatine kinase (MCK) promoter, a mammalian desmin (DES) promoter, a a-myosin heavy chain (a-MHC) promoter, or a cardiac Troponin T (cInT) promoter Other exemplary promoters include Beta-actin promoter, hepatitis B virus core promoter, Sandig et al., Gene Ther., 3:1002-9 (1996); alpha-fetoprotein (AFP) promoter, Arbuthnot et al., Hum. Gene Ther, 7.1503-14 (1996)), bone osteocalcin promoter (Stein et al., Mol. Biol. Rep, 24-185-96 (1997)); bone sialoprotein promoter (Chen et al., J. Bone Miner. Res., 11:654-64 (1996)), CD2 promoter (Hansal et al., J. Immunol., 161:1063-8 (1998); immunoglobulin heavy chain promoter; T cell receptor α-chain promoter, neuronal such as neuron-specific enolase (NSE) promoter (Andersen et al, Cell. Mol. Neurobiol., 13:503-15 (1993)), neurofilament light-chain gene promoter (Piccioli et al., Proc. Natl. Acad. Sci. USA, 88:5611-5 (1991)), and the neuron-specific vgf gene promoter (Piccioli et al, Neuron, 15:373-84 (1995)), and others. Additional exemplary promoter sequences are described, for example, in U.S. patent Ser. No. 10/300,146 (incorporated herein by reference in its entirety). In some embodiments, a tissue-specific regulatory element, e.g, a tissue-specific promoter, is selected from one known to be operably linked to a gene that is highly expressed in a given tissue, e.g., as measured by RNA-seq or protein expression data, or a combination thereof. Methods for analyzing tissue specificity by expression are taught in Fagerberg et al. Mol Cell Proteomics 13(2): 397-406 (2014), which is incorporated herein by reference in its entirety.

[0704] In some embodiments, a vector described herein is a multicistronic expression construct. Multicistronie expression constructs include, for example, constructs harboring a first expression cassette, e.g. comprising a first promoter and a first encoding nucleic acid sequence, and a second expression cassette, e.g. comprising a second promoter and a second encoding nucleic acid sequence. Such multicistronic expression constructs may, in some instances, be particularly useful in the delivery of non-translated gene products, such as hairpin RNAs, together with a polypeptide, for example, a gene modifying polypeptide and gene modifying template. In some embodiments, multicistronic expression constructs may exhibit reduced expression levels of one or more of the included transgenes, for example, because of promoter interference or the presence of incompatible nucleic acid elements in close proximity. If a multicistronic expression construct is part of a viral vector, the presence of a self-complementary nucleic acid sequence may, in some instances, interfere with the formation of structures necessary for viral reproduction or packaging.

[0705] In some embodiments, the sequence encodes an RNA with a hairpin. In some embodiments, the hairpin RNA is a guide RNA, a template RNA, a shRNA, or a microRNA. In some embodiments, the first promoter is an RNA polymerase I promoter. In some embodiments, the first promoter is an RNA polymerase Il promoter. In some embodiments, the second promoter is an RNA polymerase III promoter. In some embodiments, the second promoter is a U6 or Hl promoter

[0706] Without wishing to be bound by theory, multicistronic expression constructs may not achieve optimal expression levels as compared to expression systems containing only one cistron. One of the suggested causes of lower expression levels achieved with multicistronic expression constructs comprising two or more promoter elements is the phenomenon of promoter interference (see, e.g., Curtin J A, Dane A P, Swanson A, Alexander I E, Ginn S L. Bidirectional promoter interference between two widely used internal heterologous promoters in a late-generation lentiviral construct. Gene Ther. 2008 March; 15(5) 384-90; and Martin-Duque P. Jezzard S, Kaftansis L, Vassaux G. Direct comparison of the insulating propernes of two genene elements in an adenoviral vector containing two different expression cassettes. Hum Gene Ther. 2004 October: 15(10):995-1002; both references incorporated herein by reference for disclosure of promoter interference phenomenon). In some embodiments, the problem of promoter interference may be overcome, e.g., by producing multicistronic expression constructs comprising only one promoter driving transcription of multiple encoding nucleic acid sequences separated by internal ribosomal entry sites, or by separating cistrons comprising their own promoter with transcriptional insulator elements. In some embodiments, single-promoter driven expression of multiple cistrons may result in uneven expression levels of the cistrons. In some embodiments, a promoter cannot efficiently be isolated and isolation elements may not be compatible with some gene transfer vectors, for example, some retroviral vectors.

### MicroRNAs

[0707] MicroRNAs (miRNAs) and other small interfering nucleic acids generally regulate gene expression via target RNA transcript cleavage/degradation or translational repression of the target messenger RNA (mRNA). miRNAs may, in some instances, be natively expressed, typically as final 19-25 non-translated RNA products. miRNAs generally exhibit their activity through sequence-specific interactions with the 3′ untranslated regions (UTR) of target mRNAs. These endogenously expressed miRNAs may form hairpin precursors that are subsequently processed into an miRNA duplex, and further into a mature single stranded miRNA molecule. This mature miRNA generally guides a multiprotein complex, miRISC, which identifies target 3′ UTR regions of target mRNAs based upon their complementarity to the mature miRNA. Useful transgene products may include, for example, miRNAs or miRNA binding sites that regulate the expression of a linked polypeptide. A non-limiting list of miRNA genes; the products of these genes and their homologues are useful as transgenes or as targets for small interfering nucleic acids (e.g., miRNA sponges, antisense oligonucleotides), e.g., in methods such as those listed in U.S. Ser. No. 10/300,146, 22:25-25:48, are herein incorporated by reference. In some embodiments, one or more binding sites for one or more of the foregoing miRNAs are incorporated in a transgene. e.g., a transgene delivered by a rAAV vector, e.g., to inhibit the expression of the transgene in one or more tissues of an animal harboring the transgene. In some embodiments, a binding site may be selected to control the expression of a transgene in a tissue specific manner. For example, binding sites for the liver-specific miR-122 may be incorporated into a transgene to inhibit expression of that transgene in the liver. Additional exemplary miRNA sequences are described, for example, in U.S. Pat. No. 10,300,146 (incorporated berein by reference in its entirety).

[0708] An miR inhibitor or miRNA inhibitor is generally an agent that blocks miRNA expression and/or processing. Examples of such agents include, but are not limited to, microRNA antagonists, microRNA specific antisense, microRNA sponges, and microRNA oligonucleotides (double-stranded, hairpin, short oligonucleotides) that inhibit miRNA interaction with a Drosha complex. MicroRNA inhibitors, e.g., miRNA sponges, can be expressed in cells from transgenes (e.g., as described in Ebert, M. S. Nature Methods, Epub Aug. 12, 2007; incorporated by reference herein in its entirety). In some embodiments, microRNA sponges, or other miR inhibitors, are used with the AAVs. microRNA sponges generally specifically inhibit miRNAs through a complementary heptameric seed sequence. In some embodiments, an entire family of miRNAs can be silenced using a single sponge sequence. Other methods for silencing miRNA function (derepression of miRNA targets) in cells will be apparent to one of ordinary skill in the art.

[0709] In some embodiments, a gene modifying system, template RNA, or polypeptide described herein is administered to or is active in (e.g., is more active in) a target tissue, e.g., a first tissue. In some embodiments, the gene modifying system, template RNA, or polypeptide is not administered to or is less active in (e.g., not active in) a non-target tissue. In some embodiments, a gene modifying system, template RNA, or polypeptide described herein is useful for modifying DNA in a target tissue, e.g., a first tissue, (e.g., and not modifying DNA in a non-target tissue).

[0710] In some embodiments, a gene modifying system comprises (a) a polypeptide described herein or a nucleic acid encoding the same, (b) a template nucleic acid (e.g., template RNA) described herein, and (c) one or more first tissue-specific expression-control sequences specific to the target tissue, wherein the one or more first tissue-specific expression-control sequences specific to the target tissue are in operative association with (a), (b), or (a) and (b), wherein, when associated with (a), (a) comprises a nucleic acid encoding the polypeptide.

[0711] In some embodiments, the nucleic acid in (b) comprises RNA.

[0712] In some embodiments, the nucleic acid in (b) comprises DNA.

[0713] In some embodiments, the nucleic acid in (b): (i) is single-stranded or comprises a single-stranded segment, e.g., is single-stranded DNA or comprises a single-stranded segment and one or more double stranded segments; (ii) has inverted terminal repeats; or (iii) both (i) and (ii).

[0714] In some embodiments, the nucleic acid in (b) is double-stranded or comprises a double-stranded segment.

[0715] In some embodiments, (a) comprises a nucleic acid encoding the polypeptide.

[0716] In some embodiments, the nucleic acid in (a) comprises RNA.

[0717] In some embodiments, the nucleic acid in (a) comprises DNA.

[0718] In some embodiments, the nucleic acid in (a): (i) is single-stranded or comprises a single-stranded segment, e.g., is single-stranded DNA or comprises a single-stranded segment and one or more double stranded segments; (ii) has inverted terminal repeats; or (iii) both (i) and (ii).

[0719] In some embodiments, the nucleic acid in (a) is double-stranded or comprises a double-stranded segment.

[0720] In some embodiments, the nucleic acid in (a), (b), or (a) and (b) is linear.

[0721] In some embodiments, the nucleic acid in (a), (b), or (a) and (b) is circular, e.g., a plasmid or minicircle.

[0722] In some embodiments, the heterologous object sequence is in operative association with a first promoter.

[0723] In some embodiments, the one or more first tissue-specific expression-control sequences comprises a tissue specific promoter.

[0724] In some embodiments, the tissue-specific promoter comprises a first promoter in operative association with: (i) the heterologous object sequence, (ii) a nucleic acid encoding the retroviral RT, or (iii) (i) and (ii).

[0725] In some embodiments, the one or more first tissue-specific expression-control sequences comprises a tissue-specific microRNA recognition sequence in operative association with: (i) the heterologous object sequence, (ii) a nucleic acid encoding the retroviral RT domain, or (iii) (i) and (ii).

[0726] In some embodiments, a system comprises a tissue-specific promoter, and the system further comprises one or more tissue-specific microRNA recognition sequences, wherein: (i) the tissue specific promoter is in operative association with: (I) the heterologous object sequence, (II) a nucleic acid encoding the retroviral RT domain, or (III) (I) and (II); and/or (ii) the one or more tissue-specific microRNA recognition sequences are in operative association with: (I) the heterologous object sequence, (II) a nucleic acid encoding the retroviral RT, or (III) (I) and (II).

[0727] In some embodiments, wherein (a) comprises a nucleic acid encoding the polypeptide, the nucleic acid comprises a promoter in operative association with the nucleic acid encoding the polypeptide.

[0728] In some embodiments, the nucleic acid encoding the polypeptide comprises one or more second tissue-specific expression-control sequences specific to the target tissue in operative association with the polypeptide coding sequence.

[0729] In some embodiments, the one or more second tissue-specific expression-control sequences comprises a tissue specific promoter.

[0730] In some embodiments, the tissue-specific promoter is the promoter in operative association with the nucleic acid encoding the polypeptide.

[0731] In some embodiments, the one or more second tissue-specific expression-control sequences comprises a tissue-specific microRNA recognition sequence.

[0732] In some embodiments, the promoter in operative association with the nucleic acid encoding the polypeptide is a tissue-specific promoter, the system further comprising one or more tissue-specific microRNA recognition sequences.

[0733] In some embodiments, a nucleic acid component of a system provided by the invention is a sequence (e.g., encoding the polypeptide or comprising a heterologous object sequence) flanked by untranslated regions (UTRs) that modify protein expression levels. Various 5′ and 3′ UTRs can affect protein expression. For example, in some embodiments, the coding sequence may be preceded by a 5′ UTR that modifies RNA stability or protein translation. In some embodiments, the sequence may be followed by a 3′ UTR that modifies RNA stability or translation. In some embodiments, the sequence may be preceded by a 5′ UTR and followed by a 3′ UTR that modify RNA stability or translation. In some embodiments, the 5′ and/or 3′ UTR may be selected from the 5′ and 3′ UTRs of complement factor 3 (C3) (CACTCCTCCCCATCCTCTCCCTCTGTCCCTCTGTCCCTCTGACCCTGCACTGTCCCAG CACC; SEQ ID NO: 11,004) or orosomucoid 1 (ORM1) (CAGGACACAGCCTTGGATCAGGACAGAGACTTGGGGGCCATCCTGCCCCTCCAACC CGACATGTGTACCTCAGCTTTTTCCCTCACTTGCATCAATAAAGCTTCTGTGTTTGGA ACAGCTAA; SEQ ID NO: 11,005) (Asrani et al. RNA Biology 2018). In certain embodiments, the 5′ UTR is the 5′ UTR from C3 and the 3′ UTR is the 3′ UTR from ORM1. In certain embodiments, a 5′ UTR and 3′ UTR for protein expression, e.g., mRNA (or DNA encoding the RNA) for a gene modifying polypeptide or heterologous object sequence, comprise optimized expression sequences. In some embodiments, the 5′ UTR comprises GGGAAAUAAGAGAGAAAAGAAGAGUAAGAAGAAAUAUAAGAGCCACC (SEQ ID NO: 11,006) and/or the 3′ UTR comprising UGAUAAUAGGCUGGAGCCUCGGUGGCCAUGCUUCUUGCCCCUUGGGCCUCCCCCC AGCCCCUCCUCCCCUUCCUGCACCCGUACCCCCGUGGUCUUUGAAUAAAGUCUGA (SEQ ID NO: 11,007), e.g., as described in Richner et al. (el/168(6): P1114-1125 (2017), the sequences of which are incorporated herein by reference. In some embodiments, a 5′ and/or 3″ UTR may be selected to enhance protein expression. In some embodiments, a 5′ and/or 3′ UTR may be selected to modify protein expression such that overproduction inhibition is minimized. In some embodiments, UTRs are around a coding sequence, e.g., outside the coding sequence and in other embodiments proximal to the coding sequence. In some embodiments, additional regulatory elements (e.g., miRNA binding sites, cis-regulatory sites) are included in the UTRs.

[0734] In some embodiments, an open reading frame of a gene modifying system, e.g., an ORF of an mRNA (or DNA encoding an mRNA) encoding a gene modifying polypeptide or one or more ORFs of an mRNA (or DNA encoding an mRNA) of a heterologous object sequence, is flanked by a 5′ and/or 3′ untranslated region (UTR) that enhances the expression thereof. In some embodiments, the 5′ UTR of an mRNA component (or transcript produced from a DNA component) of the system comprises the sequence 5′-GGGAAAUAAGAGAGAAAAGAAGAGUAAGAAGAAAUAUAAGAGCCACC-3′; SEQ ID NO: 11,008). In some embodiments, the 3′ UTR of an mRNA component (or transcript produced from a DNA component) of the system comprises the sequence 5′-UGAUAAUAGGCUGGAGCCUCGGUGGCCAUGCUUCUUGCCCCUUGGGCCUCCCCCC AGCCCCUCCUCCCCUUCCUGCACCCGUACCCCCGUGGUCUUUGAAUAAAGUCUGA-3′ (SEQ ID NO: 11,009). This combination of 5′ UTR and 3′ UTR has been shown to result in desirable expression of an operably linked ORF by Richner et al. (el/168(6): P1114-1125 (2017), the teachings and sequences of which are incorporated herein by reference. In some embodiments, a system described herein comprises a DNA encoding a transcript, wherein the DNA comprises the corresponding 5′ UTR and 3′ UTR sequences, with T substituting for U in the above-listed sequence). In some embodiments, a DNA vector used to produce an RNA component of the system further comprises a promoter upstream of the 5′ UTR for initiating in vitro transcription, e.g, a T7, T3, or SP6 promoter. The 5′ UTR above begins with GGG, which is a suitable start for optimizing transcription using T7 RNA polymerase. For tuning transcription levels and altering the transcription start site nucleotides to fit alternative 5′ UTRs, the teachings of Davidson et al. Pac Symp Biocomput 433-443 (2010) describe T7 promoter variants, and the methods of discovery thereof, that fulfill both of these traits.

### Viral Vectors and Components Thereof

[0735] Viruses are a useful source of delivery vehicles for the systems described herein, in addition to a source of relevant enzymes or domains as described herein, e.g., as sources of polymerases and polymerase functions used herein, e.g., DNA-dependent DNA polymerase, RNA-dependent RNA polymerase, RNA-dependent DNA polymerase, DNA-dependent RNA polymerase, reverse transcriptase. Some enzymes, e.g., reverse transcriptases, may have multiple activities, e.g., be capable of both RNA-dependent DNA polymerization and DNA-dependent DNA polymerization, e.g., first and second strand synthesis. In some embodiments, the virus used as a gene modifying delivery system or a source of components thereof may be selected from a group as described by Baltimore Bacteriol Rev 35(3):235-241 (1971).

[0736] In some embodiments, the virus is selected from a Group I virus, e.g., is a DNA virus and packages dsDNA into virions. In some embodiments, the Group I virus is selected from, e.g., Adenoviruses, Herpesviruses, Poxviruses.

[0737] In some embodiments, the virus is selected from a Group II virus, e.g., is a DNA virus and packages ssDNA into virions. In some embodiments, the Group II virus is selected from, e.g., Parvoviruses. In some embodiments, the parvovirus is a dependoparvovirus, e.g., an adeno-associated virus (AAV).

[0738] In some embodiments, the virus is selected from a Group III virus, e.g., is an RNA virus and packages dsRNA into virions. In some embodiments, the Group III virus is selected from, e.g., Reoviruses. In some embodiments, one or both strands of the dsRNA contained in such virions is a coding molecule able to serve directly as mRNA upon transduction into a host cell, e.g., can be directly translated into protein upon transduction into a host cell without requiring any intervening nucleic acid replication or polymerization steps.

[0739] In some embodiments, the virus is selected from a Group IV virus, e.g., is an RNA virus and packages ssRNA(+) into virions. In some embodiments, the Group IV virus is selected from, e.g., Coronaviruses, Picornaviruses, Togaviruses. In some embodiments, the ssRNA(+) contained in such virions is a coding molecule able to serve directly as mRNA upon transduction into a host cell, e.g., can be directly translated into protein upon transduction into a host cell without requiring any intervening nucleic acid replication or polymerization steps.

[0740] In some embodiments, the virus is selected from a Group V virus, e.g., is an RNA virus and packages ssRNA(−) into virions. In some embodiments, the Group V virus is selected from, e.g., Orthomyxoviruses, Rhabdoviruses. In some embodiments, an RNA virus with an ssRNA(−) genome also carries an enzyme inside the virion that is transduced to host cells with the viral genome, e.g., an RNA-dependent RNA polymerase, capable of copying the ssRNA(−) into ssRNA(+) that can be translated directly by the host.

[0741] In some embodiments, the virus is selected from a Group VI virus, e.g., is a retrovirus and packages ssRNA(+) into virions. In some embodiments, the Group VI virus is selected from, e.g., retroviruses. In some embodiments, the retrovirus is a lentivirus, e.g., HIV-1, HIV-2, SIV, BIV. In some embodiments, the retrovirus is a spumavirus, e.g., a foamy virus, e.g., HFV, SFV, BFV. In some embodiments, the ssRNA(+) contained in such virions is a coding molecule able to serve directly as mRNA upon transduction into a host cell, e.g., can be directly translated into protein upon transduction into a host cell without requiring any intervening nucleic acid replication or polymerization steps. In some embodiments, the ssRNA(+) is first reverse transcribed and copied to generate a dsDNA genome intermediate from which mRNA can be transcribed in the host cell. In some embodiments, an RNA virus with an ssRNA(+) genome also carries an enzyme inside the virion that is transduced to host cells with the viral genome, e.g., an RNA-dependent DNA polymerase, capable of copying the ssRNA(+) into dsDNA that can be transcribed into mRNA and translated by the host. In some embodiments, the reverse transcriptase from a Group VI retrovirus is incorporated as the reverse transcriptase domain of a gene modifying polypeptide.

[0742] In some embodiments, the virus is selected from a Group VII virus, e.g., is a retrovirus and packages dsRNA into virions. In some embodiments, the Group VII virus is selected from, e.g., Hepadnaviruses. In some embodiments, one or both strands of the dsRNA contained in such virions is a coding molecule able to serve directly as mRNA upon transduction into a host cell, e.g., can be directly translated into protein upon transduction into a host cell without requiring any intervening nucleic acid replication or polymerization steps. In some embodiments, one or both strands of the dsRNA contained in such virions is first reverse transcribed and copied to generate a dsDNA genome intermediate from which mRNA can be transcribed in the host cell. In some embodiments, an RNA virus with a dsRNA genome also carries an enzyme inside the virion that is transduced to host cells with the viral genome, e.g., an RNA-dependent DNA polymerase, capable of copying the dsRNA into dsDNA that can be transcribed into mRNA and translated by the host. In some embodiments, the reverse transcriptase from a Group VII retrovirus is incorporated as the reverse transcriptase domain of a gene modifying polypeptide.

[0743] In some embodiments, virions used to deliver nucleic acid in this invention may also carry enzymes involved in the process of gene modification. For example, a retroviral virion may contain a reverse transcriptase domain that is delivered into a host cell along with the nucleic acid. In some embodiments, an RNA template may be associated with a gene modifying polypeptide within a virion, such that both are co-delivered to a target cell upon transduction of the nucleic acid from the viral particle. In some embodiments, the nucleic acid in a virion may comprise DNA, e.g., linear ssDNA, linear dsDNA, circular ssDNA, circular dsDNA, minicircle DNA, dbDNA, ceDNA. In some embodiments, the nucleic acid in a virion may comprise RNA, e.g., linear ssRNA, linear dsRNA, circular ssRNA, circular dsRNA. In some embodiments, a viral genome may circularize upon transduction into a host cell, e.g., a linear ssRNA molecule may undergo a covalent linkage to form a circular ssRNA, a linear dsRNA molecule may undergo a covalent linkage to form a circular dsRNA or one or more circular ssRNA. In some embodiments, a viral genome may replicate by rolling circle replication in a host cell. In some embodiments, a viral genome may comprise a single nucleic acid molecule, e.g., comprise a non-segmented genome. In some embodiments, a viral genome may comprise two or more nucleic acid molecules, e.g., comprise a segmented genome. In some embodiments, a nucleic acid in a virion may be associated with one or proteins. In some embodiments, one or more proteins in a virion may be delivered to a host cell upon transduction. In some embodiments, a natural virus may be adapted for nucleic acid delivery by the addition of virion packaging signals to the target nucleic acid, wherein a host cell is used to package the target nucleic acid containing the packaging signals.

[0744] In some embodiments, a virion used as a delivery vehicle may comprise a commensal human virus. In some embodiments, a virion used as a delivery vehicle may comprise an anellovirus, the use of which is described in WO2018232017A1, which is incorporated herein by reference in its entirety.

### AAV Administration

[0745] In some embodiments, an adeno-associated virus (AAV) is used in conjunction with the system, template nucleic acid, and/or polypeptide described herein. In some embodiments, an AAV is used to deliver, administer, or package the system, template nucleic acid, and/or polypeptide described herein. In some embodiments, the AAV is a recombinant AAV (rAAV).

[0746] In some embodiments, a system comprises (a) a polypeptide described herein or a nucleic acid encoding the same, (b) a template nucleic acid (e.g., template RNA) described herein, and (c) one or more first tissue-specific expression-control sequences specific to the target tissue, wherein the one or more first tissue-specific expression-control sequences specific to the target tissue are in operative association with (a), (b), or (a) and (b), wherein, when associated with (a), (a) comprises a nucleic acid encoding the polypeptide.

[0747] In some embodiments, a system described herein further comprises a first recombinant adeno-associated virus (rAAV) capsid protein; wherein the at least one of (a) or (b) is associated with the first rAAV capsid protein, wherein at least one of (a) or (b) is flanked by AAV inverted terminal repeats (ITRs).

[0748] In some embodiments, (a) and (b) are associated with the first rAAV capsid protein.

[0749] In some embodiments, (a) and (b) are on a single nucleic acid.

[0750] In some embodiments, the system further comprises a second rAAV capsid protein, wherein at least one of (a) or (b) is associated with the second rAAV capsid protein, and wherein the at least one of (a) or (b) associated with the second rAAV capsid protein is different from the at least one of (a) or (b) is associated with the first rAAV capsid protein.

[0751] In some embodiments, the at least one of (a) or (b) is associated with the first or second rAAV capsid protein is dispersed in the interior of the first or second rAAV capsid protein, which first or second rAAV capsid protein is in the form of an AAV capsid particle.

[0752] In some embodiments, the system further comprises a nanoparticle, wherein the nanoparticle is associated with at least one of (a) or (b).

[0753] In some embodiments, (a) and (b), respectively are associated with: a) a first rAAV capsid protein and a second rAAV capsid protein; b) a nanoparticle and a first rAAV capsid protein; c) a first rAAV capsid protein; d) a first adenovirus capsid protein; e) a first nanoparticle and a second nanoparticle; or f) a first nanoparticle.

[0754] Viral vectors are useful for delivering all or part of a system provided by the invention, e.g., for use in methods provided by the invention. Systems derived from different viruses have been employed for the delivery of polypeptides or nucleic acids; for example: integrase-deficient lentivirus, adenovirus, adeno-associated virus (AAV), herpes simplex virus, and baculovirus (reviewed in Hodge et al. Hum Gene Ther 2017; Narayanavari et al. Crit Rev Biochem Mol Biol 2017; Boehme et al. Curr Gene Ther 2015).

[0755] Adenoviruses are common viruses that have been used as gene delivery vehicles given well-defined biology, genetic stability, high transduction efficiency, and ease of large-scale production (see, for example, review by Lee et al. Genes & Diseases 2017). They possess linear dsDNA genomes and come in a variety of serotypes that differ in tissue and cell tropisms. In order to prevent replication of infectious virus in recipient cells, adenovirus genomes used for packaging are deleted of some or all endogenous viral proteins, which are provided in trans in viral production cells. This renders the genomes helper-dependent, meaning they can only be replicated and packaged into viral particles in the presence of the missing components provided by so-called helper functions. A helper-dependent adenovirus system with all viral ORFs removed may be compatible with packaging foreign DNA of up to ˜37 kb (Parks et al. J Virol 1997). In some embodiments, an adenoviral vector is used to deliver DNA corresponding to the polypeptide or template component of the gene modifying system, or both are contained on separate or the same adenoviral vector. In some embodiments, the adenovirus is a helper-dependent adenovirus (HD-AdV) that is incapable of self-packaging. In some embodiments, the adenovirus is a high-capacity adenovirus (HC-AdV) that has had all or a substantial portion of endogenous viral ORFs deleted, while retaining the necessary sequence components for packaging into adenoviral particles. For this type of vector, the only adenoviral sequences required for genome packaging are noncoding sequences: the inverted terminal repeats (ITRs) at both ends and the packaging signal at the 5′-end (Jager et al. Nat Protoc 2009). In some embodiments, the adenoviral genome also comprises stuffer DNA to meet a minimal genome size for optimal production and stability (see, for example, Hausl et al. Mol Ther 2010). In some embodiments, an adenovirus is used to deliver a gene modifying system to the liver.

[0756] In some embodiments, an adenovirus is used to deliver a gene modifying system to HSCs, e.g., HDAd5/35++. HDAd5/35++ is an adenovirus with modified serotype 35 fibers that de-target the vector from the liver (Wang et al. Blood Adv 2019). In some embodiments, the adenovirus that delivers a gene modifying system to HSCs utilizes a receptor that is expressed specifically on primitive HSCs, e.g., CD46.

[0757] Adeno-associated viruses (AAV) belong to the parvoviridae family and more specifically constitute the dependoparvovirus genus. The AAV genome is composed of a linear single-stranded DNA molecule which contains approximately 4.7 kilobases (kb) and consists of two major open reading frames (ORFs) encoding the non-structural Rep (replication) and structural Cap (capsid) proteins. A second ORF within the cap gene was identified that encodes the assembly-activating protein (AAP). The DNAs flanking the AAV coding regions are two cis-acting inverted terminal repeat (ITR) sequences, approximately 145 nucleotides in length, with interrupted palindromic sequences that can be folded into energetically stable hairpin structures that function as primers of DNA replication. In addition to their role in DNA replication, the ITR sequences have been shown to be involved in viral DNA integration into the cellular genome, rescue from the host genome or plasmid, and encapsidation of viral nucleic acid into mature virions (Muzyczka, (1992) Curr. Top. Micro. Immunol. 158:97-129). In some embodiments, one or more gene modifying nucleic acid components is flanked by ITRs derived from AAV for viral packaging. See, e.g., WO2019113310.

[0758] In some embodiments, one or more components of the gene modifying system are carried via at least one AAV vector. In some embodiments, the at least one AAV vector is selected for tropism to a particular cell, tissue, organism. In some embodiments, the AAV vector is pseudotyped, e.g., AAV2/8, wherein AAV2 describes the design of the construct but the capsid protein is replaced by that from AAV8. It is understood that any of the described vectors could be pseudotype derivatives, wherein the capsid protein used to package the AAV genome is derived from that of a different AAV serotype. Without wishing to be limited in vector choice, a list of exemplary AAV serotypes can be found in Table 18. In some embodiments, an AAV to be employed for gene modifying may be evolved for novel cell or tissue tropism as has been demonstrated in the literature (e.g., Davidsson et al. Proc Natl Acad Sci USA 2019).

[0759] In some embodiments, the AAV delivery vector is a vector which has two AAV inverted terminal repeats (ITRs) and a nucleotide sequence of interest (for example, a sequence coding for a gene modifying polypeptideor a DNA template, or both), each of said ITRs having an interrupted (or noncontiguous) palindromic sequence, i.e., a sequence composed of three segments: a first segment and a last segment that are identical when read 5′->3′ but hybridize when placed against each other, and a segment that is different that separates the identical segments. See, for example, WO2012123430.

[0760] Conventionally, AAV virions with capsids are produced by introducing a plasmid or plasmids encoding the rAAV or scAAV genome, Rep proteins, and Cap proteins (Grimm et al, 1998). Upon introduction of these helper plasmids in trans, the AAV genome is “rescued” (i.e., released and subsequently recovered) from the host genome, and is further encapsidated to produce infectious AAV. In some embodiments, one or more gene modifying nucleic acids are packaged into AAV particles by introducing the ITR-flanked nucleic acids into a packaging cell in conjunction with the helper functions.

[0761] In some embodiments, the AAV genome is a so called self-complementary genome (referred to as scAAV), such that the sequence located between the ITRs contains both the desired nucleic acid sequence (e.g., DNA encoding the gene modifying polypeptide or template, or both) in addition to the reverse complement of the desired nucleic acid sequence, such that these two components can fold over and self-hybridize. In some embodiments, the self-complementary modules are separated by an intervening sequence that permits the DNA to fold back on itself, e.g., forms a stem-loop. An scAAV has the advantage of being poised for transcription upon entering the nucleus, rather than being first dependent on ITR priming and second-strand synthesis to form dsDNA. In some embodiments, one or more gene modifying components is designed as an scAAV, wherein the sequence between the AAV ITRs contains two reverse complementing modules that can self-hybridize to create dsDNA.

[0762] In some embodiments, nucleic acid (e.g., encoding a polypeptide, or a template, or both) delivered to cells is closed-ended, linear duplex DNA (CELID DNA or ceDNA). In some embodiments, ceDNA is derived from the replicative form of the AAV genome (Li et al. PLOS One 2013). In some embodiments, the nucleic acid (e.g., encoding a polypeptide, or a template DNA, or both) is flanked by ITRs, e.g., AAV ITRs, wherein at least one of the ITRs comprises a terminal resolution site and a replication protein binding site (sometimes referred to as a replicative protein binding site). In some embodiments, the ITRs are derived from an adeno-associated virus, e.g., AAV1, AAV2, AAV3, AAV4, AAV5, AAV6, AAV7, AAV8, AAV9, AAV10, AAV11, AAV12, or a combination thereof. In some embodiments, the ITRs are symmetric. In some embodiments, the ITRs are asymmetric. In some embodiments, at least one Rep protein is provided to enable replication of the construct. In some embodiments, the at least one Rep protein is derived from an adeno-associated virus, e.g., AAV1, AAV2, AAV3, AAV4, AAV5, AAV6, AAV7, AAV8, AAV9, AAV10, AAV11, AAV12, or a combination thereof. In some embodiments, ceDNA is generated by providing a production cell with (i) DNA flanked by ITRs, e.g., AAV ITRs, and (ii) components required for ITR-dependent replication, e.g., AAV proteins Rep78 and Rep52 (or nucleic acid encoding the proteins). In some embodiments, ceDNA is free of any capsid protein, e.g., is not packaged into an infectious AAV particle. In some embodiments, ceDNA is formulated into LNPs (see, for example, WO2019051289A1).

[0763] In some embodiments, the ceDNA vector consists of two self-complementary sequences, e.g., asymmetrical or symmetrical or substantially symmetrical ITRs as defined herein, flanking said expression cassette, wherein the ceDNA vector is not associated with a capsid protein. In some embodiments, the ceDNA vector comprises two self-complementary sequences found in an AAV genome, where at least one ITR comprises an operative Rep-binding element (RBE) (also sometimes referred to herein as “RBS”) and a terminal resolution site (trs) of AAV or a functional variant of the RBE. See, for example, WO2019113310.

[0764] In some embodiments, the AAV genome comprises two genes that encode four replication proteins and three capsid proteins, respectively. In some embodiments, the genes are flanked on either side by 145-bp inverted terminal repeats (ITRs). In some embodiments, the virion comprises up to three capsid proteins (Vp1, Vp2, and/or Vp3), e.g., produced in a 1:1:10 ratio. In some embodiments, the capsid proteins are produced from the same open reading frame and/or from differential splicing (Vp1) and alternative translational start sites (Vp2 and Vp3, respectively). Generally, Vp3 is the most abundant subunit in the virion and participates in receptor recognition at the cell surface defining the tropism of the virus. In some embodiments, Vp1 comprises a phospholipase domain, e.g., which functions in viral infectivity, in the N-terminus of Vp1.

[0765] In some embodiments, packaging capacity of the viral vectors limits the size of the gene modifying system that can be packaged into the vector. For example, the packaging capacity of the AAVs can be about 4.5 kb (e.g., about 3.0, 3.5, 4.0, 4.5, 5.0, 5.5, or 6.0 kb), e.g., including one or two inverted terminal repeats (ITRs), e.g., 145 base ITRs.

[0766] In some embodiments, recombinant AAV (rAAV) comprises cis-acting 145-bp ITRs flanking vector transgene cassettes, e.g., providing up to 4.5 kb for packaging of foreign DNA. Subsequent to infection, rAAV can, in some instances, express a fusion protein of the invention and persist without integration into the host genome by existing episomally in circular head-to-tail concatemers. rAAV can be used, for example, in vitro and in vivo. In some embodiments, AAV-mediated gene delivery requires that the length of the coding sequence of the gene is equal or greater in size than the wild-type AAV genome.

[0767] AAV delivery of genes that exceed this size and/or the use of large physiological regulatory elements can be accomplished, for example, by dividing the protein(s) to be delivered into two or more fragments. In some embodiments, the N-terminal fragment is fused to an intein-N sequence. In some embodiments, the C-terminal fragment is fused to an intein-C sequence. In embodiments, the fragments are packaged into two or more AAV vectors.

[0768] In some embodiments, dual AAV vectors are generated by splitting a large transgene expression cassette in two separate halves (5′ and 3′ ends, or head and tail), e.g., wherein each half of the cassette is packaged in a single AAV vector (of <5 kb). The re-assembly of the full-length transgene expression cassette can, in some embodiments, then be achieved upon co-infection of the same cell by both dual AAV vectors. In some embodiments, co-infection is followed by one or more of: (1) homologous recombination (HR) between 5′ and 3′ genomes (dual AAV overlapping vectors); (2) ITR-mediated tail-to-head concatemerization of 5′ and 3′ genomes (dual AAV trans-splicing vectors); and/or (3) a combination of these two mechanisms (dual AAV hybrid vectors). In some embodiments, the use of dual AAV vectors in vivo results in the expression of full-length proteins. In some embodiments, the use of the dual AAV vector platform represents an efficient and viable gene transfer strategy for transgenes of greater than about 4.0, 4.1, 4.2, 4.3, 4.4, 4.5, 4.6, 4.7, 4.8, 4.9, or 5.0 kb in size. In some embodiments, AAV vectors can also be used to transduce cells with target nucleic acids, e.g., in the in vitro production of nucleic acids and peptides. In some embodiments, AAV vectors can be used for in vivo and ex vivo gene therapy procedures (see, e.g., West et al., Virology 160:38-47 (1987); U.S. Pat. No. 4,797,368; WO 93/24641; Kotin, Human Gene Therapy 5:793-801 (1994); Muzyczka, J. Clin. Invest.94:1351 (1994); each of which is incorporated herein by reference in their entirety). The construction of recombinant AAV vectors is described in a number of publications, including U.S. Pat. No. 5,173,414; Tratschin et al., Mol. Cell. Biol.5:3251-3260 (1985); Tratschin, et al., Mol. Cell. Biol.4:2072-2081 (1984); Hermonat & Muzyczka, PNAS 81:6466-6470 (1984); and Samulski et al., J. Virol.63:03822-3828 (1989) (incorporated by reference herein in their entirety).

[0769] In some embodiments, a gene modifying polypeptide described herein (e.g., with or without one or more guide nucleic acids) can be delivered using AAV, lentivirus, adenovirus or other plasmid or viral vector types, in particular, using formulations and doses from, for example, U.S. Pat. No. 8,454,972 (formulations, doses for adenovirus), U.S. Pat. No. 8,404,658 (formulations, doses for AAV) and U.S. Pat. No. 5,846,946 (formulations, doses for DNA plasmids) and from clinical trials and publications regarding the clinical trials involving lentivirus, AAV and adenovirus. For example, for AAV, the route of administration, formulation and dose can be as described in U.S. Pat. No. 8,454,972 and as in clinical trials involving AAV. For adenovirus, the route of administration, formulation and dose can be as described in U.S. Pat. No. 8,404,658 and as in clinical trials involving adenovirus. For plasmid delivery, the route of administration, formulation and dose can be as described in U.S. Pat. No. 5,846,946 and as in clinical studies involving plasmids. Doses can be based on or extrapolated to an average 70 kg individual (e.g. a male adult human), and can be adjusted for patients, subjects, mammals of different weight and species. Frequency of administration is within the ambit of the medical or veterinary practitioner (e.g., physician, veterinarian), depending on usual factors including the age, sex, general health, other conditions of the patient or subject and the particular condition or symptoms being addressed. In some embodiments, the viral vectors can be injected into the tissue of interest. For cell-type specific gene modifying, the expression of the gene modifying polypeptide and optional guide nucleic acid can, in some embodiments, be driven by a cell-type specific promoter.

[0770] In some embodiments, AAV allows for low toxicity, for example, due to the purification method not requiring ultracentrifugation of cell particles that can activate the immune response. In some embodiments, AAV allows low probability of causing insertional mutagenesis, for example, because it does not substantially integrate into the host genome.

[0771] In some embodiments, AAV has a packaging limit of about 4.4, 4.5, 4.6, 4.7, or 4.75 kb. In some embodiments, a gene modifying polypeptide-encoding sequence, promoter, and transcription terminator can fit into a single viral vector. SpCas9 (4.1 kb) may, in some instances, be difficult to package into AAV. Therefore, in some embodiments, a gene modifying polypeptide coding sequence is used that is shorter in length than other gene modifying polypeptide coding sequences or base editors. In some embodiments, the gene modifying polypeptide encoding sequences are less than about 4.5 kb, 4.4 kb, 4.3 kb, 4.2 kb, 4.1 kb, 4 kb, 3.9 kb, 3.8 kb, 3.7 kb, 3.6 kb, 3.5 kb, 3.4 kb, 3.3 kb, 3.2 kb, 3.1 kb, 3 kb, 2.9 kb, 2.8 kb, 2.7 kb, 2.6 kb, 2.5 kb, 2 kb, or 1.5 kb.

[0772] An AAV can be AAV1, AAV2, AAV5 or any combination thereof. In some embodiments, the type of AAV is selected with respect to the cells to be targeted; e.g., AAV serotypes 1, 2, 5 or a hybrid capsid AAV1, AAV2, AAV5 or any combination thereof can be selected for targeting brain or neuronal cells; or AAV4 can be selected for targeting cardiac tissue. In some embodiments, AAV8 is selected for delivery to the liver. Exemplary AAV serotypes as to these cells are described, for example, in Grimm, D. et al, J. Virol.82: 5887-5911 (2008) (incorporated herein by reference in its entirety). In some embodiments, AAV refers all serotypes, subtypes, and naturally-occurring AAV as well as recombinant AAV. AAV may be used to refer to the virus itself or a derivative thereof. In some embodiments, AAV includes AAV1, AAV2, AAV3, AAV3B, AAV4, AAV5, AAV6, AAV6.2, AAV7, AAVrh.64RI, AAVhu.37, AAVrh.8, AAVrh.32.33, AAV8, AAV9, AAV-DJ, AAV2/8, AAVrhIO, AAVLK03, AV10, AAV11, AAV 12, rhIO, and hybrids thereof, avian AAV, bovine AAV, canine AAV, equine AAV, primate AAV, non-primate AAV, and ovine AAV. The genomic sequences of various serotypes of AAV, as well as the sequences of the native terminal repeats (TRs), Rep proteins, and capsid subunits are known in the art. Such sequences may be found in the literature or in public databases such as GenBank. Additional exemplary AAV serotypes are listed in Table 18.

TABLE 18
Exemplary AAV serotypes.

| Target | | |
|---|---|---|
| Tissue | Vehicle | Reference |
| Liver | AAV (AAV8¹, AAVrh.8¹, | 1. Wang et al., Mol. Ther. 18, |
| | AAVhu.37¹, AAV2/8, | 118-25 (2010) |
| | AAV2/rh10², AAV9, AAV2, | |
| | NP40³, NP59^{2,3}, AAV3B⁵, | 2. Ginn et al., JHEP Reports, |
| | AAV-DJ⁴, AAV-LK01⁴, | 100065 (2019) |
| | AAV-LK02⁴, AAV-LK03⁴, | 3. Paulk et al., Mol. Ther. 26, |
| | AAV-LK19⁴, AAV5⁷ | 289-303 (2018). |
| | Adenovirus | 4. L. Lisowski et al., Nature. |
| | (Ad5, HC-AdV⁶) | 506, 382-6 (2014). |
| | | 5. L. Wang et al., Mol. Ther. |
| | | 23, 1877-87 (2015). |
| | | 6. Hausl Mol Ther (2010) |
| | | 7. Davidoff et al., Mol. Ther. |
| | | 11, 875-88 (2005) |
| Lung | AAV (AAV4, AAV5, | 1. Duncan et al., Mol Ther |
| | AAV6¹, AAV9, H22²) | Methods Clin Dev (2018) |
| | Adenovirus (Ad5, Ad3, | 2. Cooney et al., Am J Respir |
| | Ad21, Ad14)³ | Cell Mol Biol (2019) |
| | | 3. Li et al., Mol Ther Methods |
| | | Clin Dev (2019) |
| Skin | AAV (AAV6¹, AAV-LK19²) | 1. Petek et al., Mol. Ther. |
| | | (2010) |
| | | 2. L. Lisowski et al., Nature. |
| | | 506, 382-6 (2014). |
| HSCs | Adenovirus (HDAd5/35⁺⁺) | Wang et al. Blood Adv (2019) |

[0773] In some embodiments, a pharmaceutical composition (e.g., comprising an AAV as described herein) has less than 10% empty capsids, less than 8% empty capsids, less than 7% empty capsids, less than 5% empty capsids, less than 3% empty capsids, or less than 1% empty capsids. In some embodiments, the pharmaceutical composition has less than about 5% empty capsids. In some embodiments, the number of empty capsids is below the limit of detection. In some embodiments, it is advantageous for the pharmaceutical composition to have low amounts of empty capsids, e.g., because empty capsids may generate an adverse response (e.g., immune response, inflammatory response, liver response, and/or cardiac response), e.g., with little or no substantial therapeutic benefit.

[0774] In some embodiments, the residual host cell protein (rHCP) in the pharmaceutical composition is less than or equal to 100 ng/ml rHCP per 1×10¹³ vg/ml, e.g., less than or equal to 40 ng/ml rHCP per 1×10¹³ vg/ml or 1-50 ng/ml rHCP per 1×10¹³ vg/ml. In some embodiments, the pharmaceutical composition comprises less than 10 ng rHCP per 1.0×10¹³ vg, or less than 5 ng rHCP per 1.0×10¹³ vg, less than 4 ng rHCP per 1.0×10¹³ vg, or less than 3 ng rHCP per 1.0×10¹³ vg, or any concentration in between. In some embodiments, the residual host cell DNA (hcDNA) in the pharmaceutical composition is less than or equal to 5×10⁶ pg/ml hcDNA per 1×10¹³ vg/ml, less than or equal to 1.2×10⁶ pg/ml hcDNA per 1×10¹³ vg/ml, or 1×10⁵ pg/ml hcDNA per 1×10¹³ vg/ml. In some embodiments, the residual host cell DNA in said pharmaceutical composition is less than 5.0×10⁵ pg per 1×10¹³ vg, less than 2.0×10⁵ pg per 1.0×10¹³ vg, less than 1.1×10⁵ pg per 1.0×10¹³ vg, less than 1.0×10⁵ pg hcDNA per 1.0×10¹³ vg, less than 0.9×10⁵ pg hcDNA per 1.0×10¹³ vg, less than 0.8×10⁵ pg hcDNA per 1.0×10¹³ vg, or any concentration in between.

[0775] In some embodiments, the residual plasmid DNA in the pharmaceutical composition is less than or equal to 1.7×10⁵ pg/ml per 1.0×10¹³ vg/ml, or 1×10⁵ pg/ml per 1×1.0×10¹³ vg/ml, or 1.7×10⁶ pg/ml per 1.0×10¹³ vg/ml. In some embodiments, the residual DNA plasmid in the pharmaceutical composition is less than 10.0×10⁵ pg by 1.0×10¹³ vg, less than 8.0×10⁵ pg by 1.0×10¹³ vg or less than 6.8×10⁵ pg by 1.0×10¹³ vg. In embodiments, the pharmaceutical composition comprises less than 0.5 ng per 1.0×10¹³ vg, less than 0.3 ng per 1.0×10¹³ vg, less than 0.22 ng per 1.0×10¹³ vg or less than 0.2 ng per 1.0×10¹³ vg or any intermediate concentration of bovine serum albumin (BSA). In embodiments, the benzonase in the pharmaceutical composition is less than 0.2 ng by 1.0×10¹³ vg, less than 0.1 ng by 1.0×10¹³ vg, less than 0.09 ng by 1.0×10¹³ vg, less than 0.08 ng by 1.0×10¹³ vg or any intermediate concentration. In embodiments, Poloxamer 188 in the pharmaceutical composition is about 10 to 150 ppm, about 15 to 100 ppm or about 20 to 80 ppm. In embodiments, the cesium in the pharmaceutical composition is less than 50 pg/g (ppm), less than 30 pg/g (ppm) or less than 20 pg/g (ppm) or any intermediate concentration.

[0776] In embodiments, the pharmaceutical composition comprises total impurities, e.g., as determined by SDS-PAGE, of less than 10%, less than 8%, less than 7%, less than 6%, less than 5%, less than 4%, less than 3%, less than 2%, or any percentage in between. In embodiments, the total purity, e.g., as determined by SDS-PAGE, is greater than 90%, greater than 92%, greater than 93%, greater than 94%, greater than 95%, greater than 96%, greater than 97%, greater than 98%, or any percentage in between. In embodiments, no single unnamed related impurity, e.g., as measured by SDS-PAGE, is greater than 5%, greater than 4%, greater than 3% or greater than 2%, or any percentage in between. In embodiments, the pharmaceutical composition comprises a percentage of filled capsids relative to total capsids (e.g., peak 1+peak 2 as measured by analytical ultracentrifugation) of greater than 85%, greater than 86%, greater than 87%, greater than 88%, greater than 89%, greater than 90%, greater than 91%, greater than 91.9%, greater than 92%, greater than 93%, or any percentage in between. In embodiments of the pharmaceutical composition, the percentage of filled capsids measured in peak 1 by analytical ultracentrifugation is 20-80%, 25-75%, 30-75%, 35-75%, or 37.4-70.3%. In embodiments of the pharmaceutical composition, the percentage of filled capsids measured in peak 2 by analytical ultracentrifugation is 20-80%, 20-70%, 22-65%, 24-62%, or 24.9-60.1%.

[0777] In one embodiment, the pharmaceutical composition comprises a genomic titer of 1.0 to 5.0×10¹³ vg/mL, 1.2 to 3.0×10¹³ vg/mL or 1.7 to 2.3×10¹³ vg/ml. In one embodiment, the pharmaceutical composition exhibits a biological load of less than 5 CFU/mL, less than 4 CFU/mL, less than 3 CFU/mL, less than 2 CFU/mL or less than 1 CFU/mL or any intermediate contraction. In embodiments, the amount of endotoxin according to USP, for example, USP <85>(incorporated by reference in its entirety) is less than 1.0 EU/mL, less than 0.8 EU/mL or less than 0.75 EU/mL. In embodiments, the osmolarity of a pharmaceutical composition according to USP, for example, USP <785>(incorporated by reference in its entirety) is 350 to 450 mOsm/kg, 370 to 440 mOsm/kg or 390 to 430 mOsm/kg. In embodiments, the pharmaceutical composition contains less than 1200 particles that are greater than 25 μm per container, less than 1000 particles that are greater than 25 μm per container, less than 500 particles that are greater than 25 μm per container or any intermediate value. In embodiments, the pharmaceutical composition contains less than 10,000 particles that are greater than 10 μm per container, less than 8000 particles that are greater than 10 μm per container or less than 600 particles that are greater than 10 μm per container.

[0778] In one embodiment, the pharmaceutical composition has a genomic titer of 0.5 to 5.0×10¹³ vg/mL, 1.0 to 4.0×10¹³ vg/mL, 1.5 to 3.0×10¹³ vg/ml or 1.7 to 2.3×10¹³ vg/ml. In one embodiment, the pharmaceutical composition described herein comprises one or more of the following: less than about 0.09 ng benzonase per 1.0×10¹³ vg, less than about 30 pg/g (ppm) of cesium, about 20 to 80 ppm Poloxamer 188, less than about 0.22 ng BSA per 1.0×10¹³ vg, less than about 6.8×10⁵ pg of residual DNA plasmid per 1.0×10¹³ vg, less than about 1.1×10⁵ pg of residual hcDNA per 1.0×10¹³ vg, less than about 4 ng of rHCP per 1.0×10¹³ vg, pH 7.7 to 8.3, about 390 to 430 mOsm/kg, less than about 600 particles that are >25 μm in size per container, less than about 6000 particles that are >10 μm in size per container, about 1.7×10¹³-2.3×10¹³ vg/mL genomic titer, infectious titer of about 3.9×10⁸ to 8.4×10¹⁰ IU per 1.0×10¹³ vg, total protein of about 100-300 μg per 1.0×10¹³ vg, mean survival of >24 days in A7SMA mice with about 7.5×10¹³ vg/kg dose of viral vector, about 70 to 130% relative potency based on an in vitro cell based assay and/or less than about 5% empty capsid. In various embodiments, the pharmaceutical compositions described herein comprise any of the viral particles discussed here, retain a potency of between +20%, between #15%, between +10% or within +5% of a reference standard. In some embodiments, potency is measured using a suitable in vitro cell assay or in vivo animal model.

[0779] Additional methods of preparation, characterization, and dosing AAV particles are taught in WO2019094253, which is incorporated herein by reference in its entirety.

[0780] Additional rAAV constructs that can be employed consonant with the invention include those described in Wang et al 2019, available at://doi.org/10.1038/s41573-019-0012-9, including Table 1 thereof, which is incorporated by reference in its entirety.

### Lipid Nanoparticles

[0781] The methods and systems provided herein may employ any suitable carrier or delivery modality, including, in certain embodiments, lipid nanoparticles (LNPs). Lipid nanoparticles, in some embodiments, comprise one or more ionic lipids, such as non-cationic lipids (e.g., neutral or anionic, or zwitterionic lipids); one or more conjugated lipids (such as PEG-conjugated lipids or lipids conjugated to polymers described in Table 5 of WO2019217941; incorporated herein by reference in its entirety); one or more sterols (e.g., cholesterol); and, optionally, one or more targeting molecules (e.g., conjugated receptors, receptor ligands, antibodies); or combinations of the foregoing.

[0782] Lipids that can be used in nanoparticle formations (e.g., lipid nanoparticles) include, for example those described in Table 4 of WO2019217941, which is incorporated by reference—e.g., a lipid-containing nanoparticle can comprise one or more of the lipids in Table 4 of WO2019217941. Lipid nanoparticles can include additional elements, such as polymers, such as the polymers described in Table 5 of WO2019217941, incorporated by reference.

[0783] In some embodiments, conjugated lipids, when present, can include one or more of PEG-diacylglycerol (DAG) (such as 1-(monomethoxy-polyethyleneglycol)-2,3-dimyristoylglycerol (PEG-DMG)), PEG-dialkyloxypropyl (DAA), PEG-phospholipid, PEG-ceramide (Cer), a pegylated phosphatidylethanoloamine (PEG-PE), PEG succinate diacylglycerol (PEGS-DAG) (such as 4-O-(2′,3′-di(tetradecanoyloxy)propyl-1-O-(w-methoxy(polyethoxy)ethyl) butanedioate (PEG-S-DMG)), PEG dialkoxypropylcarbam, N-(carbonyl-methoxypoly ethylene glycol 2000)-1,2-distearoyl-sn-glycero-3-phosphoethanolamine sodium salt, and those described in Table 2 of WO2019051289 (incorporated by reference), and combinations of the foregoing.

[0784] In some embodiments, sterols that can be incorporated into lipid nanoparticles include one or more of cholesterol or cholesterol derivatives, such as those in WO2009/127060 or US2010/0130588, which are incorporated by reference. Additional exemplary sterols include phytosterols, including those described in Eygeris et al (2020), dx.doi.org/10.1021/acs.nanolett.0c01386, incorporated herein by reference.

[0785] In some embodiments, the lipid particle comprises an ionizable lipid, a non-cationic lipid, a conjugated lipid that inhibits aggregation of particles, and a sterol. The amounts of these components can be varied independently and to achieve desired properties. For example, in some embodiments, the lipid nanoparticle comprises an ionizable lipid is in an amount from about 20 mol % to about 90 mol % of the total lipids (in other embodiments it may be 20-70% (mol), 30-60% (mol) or 40-50% (mol); about 50 mol % to about 90 mol % of the total lipid present in the lipid nanoparticle), a non-cationic lipid in an amount from about 5 mol % to about 30 mol % of the total lipids, a conjugated lipid in an amount from about 0.5 mol % to about 20 mol % of the total lipids, and a sterol in an amount from about 20 mol % to about 50 mol % of the total lipids. The ratio of total lipid to nucleic acid (e.g., encoding the gene modifying polypeptide or template nucleic acid) can be varied as desired. For example, the total lipid to nucleic acid (mass or weight) ratio can be from about 10:1 to about 30:1.

[0786] In some embodiments, an ionizable lipid may be a cationic lipid, an ionizable cationic lipid, e.g., a cationic lipid that can exist in a positively charged or neutral form depending on pH, or an amine-containing lipid that can be readily protonated. In some embodiments, the cationic lipid is a lipid capable of being positively charged, e.g., under physiological conditions. Exemplary cationic lipids include one or more amine group(s) which bear the positive charge. In some embodiments, the lipid particle comprises a cationic lipid in formulation with one or more of neutral lipids, ionizable amine-containing lipids, biodegradable alkyn lipids, steroids, phospholipids including polyunsaturated lipids, structural lipids (e.g., sterols), PEG, cholesterol and polymer conjugated lipids. In some embodiments, the cationic lipid may be an ionizable cationic lipid. An exemplary cationic lipid as disclosed herein may have an effective pKa over 6.0. In embodiments, a lipid nanoparticle may comprise a second cationic lipid having a different effective pKa (e.g., greater than the first effective pKa), than the first cationic lipid. A lipid nanoparticle may comprise between 40 and 60 mol percent of a cationic lipid, a neutral lipid, a steroid, a polymer conjugated lipid, and a therapeutic agent, e.g., a nucleic acid (e.g., RNA) described herein (e.g., a template nucleic acid or a nucleic acid encoding a gene modifying polypeptide), encapsulated within or associated with the lipid nanoparticle. In some embodiments, the nucleic acid is co-formulated with the cationic lipid. The nucleic acid may be adsorbed to the surface of an LNP, e.g., an LNP comprising a cationic lipid. In some embodiments, the nucleic acid may be encapsulated in an LNP, e.g., an LNP comprising a cationic lipid. In some embodiments, the lipid nanoparticle may comprise a targeting moiety, e.g., coated with a targeting agent. In embodiments, the LNP formulation is biodegradable. In some embodiments, a lipid nanoparticle comprising one or more lipid described herein, e.g., Formula (i), (ii), (ii), (vii) and/or (ix) encapsulates at least 1%, at least 5%, at least 10%, at least 20%, at least 30%, at least 40%, at least 50%, at least 60%, at least 70%, at least 80%, at least 90%, at least 92%, at least 95%, at least 97%, at least 98% or 100% of an RNA molecule, e.g., template RNA and/or a mRNA encoding the gene modifying polypeptide.

[0787] In some embodiments, the lipid to nucleic acid ratio (mass/mass ratio; w/w ratio) can be in the range of from about 1:1 to about 25:1, from about 10:1 to about 14:1, from about 3:1 to about 15:1, from about 4:1 to about 10:1, from about 5:1 to about 9:1, or about 6:1 to about 9:1. The amounts of lipids and nucleic acid can be adjusted to provide a desired N/P ratio, for example, N/P ratio of 3, 4, 5, 6, 7, 8, 9, 10 or higher. Generally, the lipid nanoparticle formulation's overall lipid content can range from about 5 mg/ml to about 30 mg/mL.

[0788] Exemplary ionizable lipids that can be used in lipid nanoparticle formulations include, without limitation, those listed in Table 1 of WO2019051289, incorporated herein by reference. Additional exemplary lipids include, without limitation, one or more of the following formulae: X of US2016/0311759; I of US20150376115 or in US2016/0376224; I, II or III of US20160151284; I, IA, II, or IIA of US20170210967; I-c of US20150140070; A of US2013/0178541; I of US2013/0303587 or US2013/0123338; I of US2015/0141678; II, III, IV, or V of US2015/0239926; I of US2017/0119904; I or II of WO2017/117528; A of US2012/0149894; A of US2015/0057373; A of WO2013/116126; A of US2013/0090372; A of US2013/0274523; A of US2013/0274504; A of US2013/0053572; A of WO2013/016058; A of WO2012/162210; I of US2008/042973; I, II, III, or IV of US2012/01287670; I or II of US2014/0200257; I, II, or III of US2015/0203446; I or III of US2015/0005363; I, IA, IB, IC, ID, II, IIA, IIB, IIC, IID, or III-XXIV of US2014/0308304; of US2013/0338210; I, II, III, or IV of WO2009/132131; A of US2012/01011478; I or XXXV of US2012/0027796; XIV or XVII of US2012/0058144; of US2013/0323269; I of US2011/0117125; I, II, or III of US2011/0256175; I, II, III, IV, V, VI, VII, VIII, IX, X, XI, XII of US2012/0202871; I, II, III, IV, V, VI, VII, VIII, X, XII, XIII, XIV, XV, or XVI of US2011/0076335; I or II of US2006/008378; I of US2013/0123338; I or X-A-Y-Z of US2015/0064242; XVI, XVII, or XVIII of US2013/0022649; I, II, or III of US2013/0116307; I, II, or III of US2013/0116307; I or II of US2010/0062967; I-X of US2013/0189351; I of US2014/0039032; V of US2018/0028664; I of US2016/0317458; I of US2013/0195920; 5, 6, or 10 of U.S. Pat. No. 10,221,127; III-3 of WO2018/081480; I-5 or I-8 of WO2020/081938; 18 or 25 of U.S. Pat. No. 9,867,888; A of US2019/0136231; II of WO2020/219876; 1 of US2012/0027803; OF-02 of US2019/0240349; 23 of U.S. Pat. No. 10,086,013; cKK-E12/A6 of Miao et al (2020); C12-200 of WO2010/053572; 7C1 of Dahlman et al (2017); 304-013 or 503-013 of Whitehead et al; TS-P4C2 of U.S. Pat. No. 9,708,628; I of WO2020/106946; I of WO2020/106946.

[0789] In some embodiments, the ionizable lipid is MC3 (6Z,9Z,28Z,3 IZ)-heptatriaconta-6,9,28,3 1-tetraen-19-yl-4-(dimethylamino) butanoate (DLin-MC3-DMA or MC3), e.g., as described in Example 9 of WO2019051289A9 (incorporated by reference herein in its entirety). In some embodiments, the ionizable lipid is the lipid ATX-002, e.g., as described in Example 10 of WO2019051289A9 (incorporated by reference herein in its entirety). In some embodiments, the ionizable lipid is (13Z,16Z)-A,A-dimethyl-3-nonyldocosa-13, 16-dien-1-amine (Compound 32), e.g., as described in Example 11 of WO2019051289A9 (incorporated by reference herein in its entirety). In some embodiments, the ionizable lipid is Compound 6 or Compound 22, e.g., as described in Example 12 of WO2019051289A9 (incorporated by reference herein in its entirety). In some embodiments, the ionizable lipid is heptadecan-9-yl 8-((2-hydroxyethyl)(6-oxo-6-(undecyloxy)hexyl)amino)octanoate (SM-102); e.g., as described in Example 1 of U.S. Pat. No. 9,867,888(incorporated by reference herein in its entirety). In some embodiments, the ionizable lipid is 9Z, 12Z)-3-((4,4-bis(octyloxy)butanoyl)oxy)-2-((((3-(diethylamino)propoxy)carbonyl)oxy)methyl)propyl octadeca-9,12-dienoate (LP01) e.g., as synthesized in Example 13 of WO2015/095340(incorporated by reference herein in its entirety). In some embodiments, the ionizable lipid is Di((Z)-non-2-en-1-yl) 9-((4-dimethylamino)butanoyl)oxy)heptadecanedioate (L319), e.g. as synthesized in Example 7, 8, or 9 of US2012/0027803(incorporated by reference herein in its entirety). In some embodiments, the ionizable lipid is 1,1′-((2-(4-(2-((2-(Bis(2-hydroxydodecyl)amino)ethyl)(2-hydroxydodecyl) amino)ethyl)piperazin-1-yl)ethyl)azanediyl)bis(dodecan-2-ol) (C12-200), e.g., as synthesized in Examples 14 and 16 of WO2010/053572(incorporated by reference herein in its entirety). In some embodiments, the ionizable lipid is; Imidazole cholesterol ester (ICE) lipid (3S, 10R, 13R, 17R)-10, 13-dimethyl-17-((R)-6-methylheptan-2-yl)-2, 3, 4, 7, 8, 9, 10, 11, 12, 13, 14, 15, 16, 17-tetradecahydro-1H-cyclopenta[a]phenanthren-3-yl 3-(1H-imidazol-4-yl)propanoate, e.g., Structure (I) from WO2020/106946 (incorporated by reference herein in its entirety).

[0790] Some non-limiting examples of lipid compounds that may be used (e.g., in combination with other lipid components) to form lipid nanoparticles for the delivery of compositions described herein, e.g., nucleic acid (e.g., RNA) described herein (e.g., a template nucleic acid or a nucleic acid encoding a gene modifying polypeptide) includes,

[chemical structure]

[0791] In some embodiments an LNP comprising Formula (i) is used to deliver a gene modifying composition described herein to the liver and/or hepatocyte cells.

[chemical structure]

[0792] In some embodiments an LNP comprising Formula (ii) is used to deliver a gene modifying composition described herein to the liver and/or hepatocyte cells.

[chemical structure]

[0793] In some embodiments an LNP comprising Formula (iii) is used to deliver a gene modifying composition described herein to the liver and/or hepatocyte cells.

[chemical structure]

[0794] In some embodiments an LNP comprising Formula (v) is used to deliver a gene modifying composition described herein to the liver and/or hepatocyte cells.

[chemical structure]

[0795] In some embodiments an LNP comprising Formula (vi) is used to deliver a gene modifying composition described herein to the liver and/or hepatocyte cells.

[chemical structure]

[0796] In some embodiments an LNP comprising Formula (viii) is used to deliver a gene modifying composition described herein to the liver and/or hepatocyte cells.

[chemical structure]

[0797] In some embodiments an LNP comprising Formula (ix) is used to deliver a gene modifying composition described herein to the liver and/or hepatocyte cells.

[chemical structure]

wherein
[0798] X¹ is O, NR¹, or a direct bond, X² is C2-5 alkylene, X³ is C(═O) or a direct bond, R₁ is H or Me, R₃ is Ci-3 alkyl, R₂ is Ci-3 alkyl, or R₂ taken together with the nitrogen atom to which it is attached and 1-3 carbon atoms of X² form a 4-, 5-, or 6-membered ring, or X′ is NR¹, R₁ and R₂ taken together with the nitrogen atoms to which they are attached form a 5- or 6-membered ring, or R₂ taken together with R₃ and the nitrogen atom to which they are attached form a 5-, 6-, or 7-membered ring, Y′ is C2-12 alkylene, Y² is selected from

[chemical structure]

[0799] n is 0 to 3, R₄ is Ci-15 alkyl, Z¹ is Ci-6 alkylene or a direct bond,
[0800] Z² is

[chemical structure]

(in either orientation) or absent, provided that if Z¹ is a direct bond, Z² is absent;
[0801] R₃ is C5-9 alkyl or C6-10 alkoxy, R₆ is C5-9 alkyl or C6-10 alkoxy, W is methylene or a direct bond, and R₇ is H or Me, or a salt thereof, provided that if R₃ and R₂ are C2 alkyls, X¹ is O, X² is linear C3 alkylene, X³ is C(=0), Y′ is linear Ce alkylene, (Y²)ₙ-R₄ is

[chemical structure]

[0802] R₄ is linear C5 alkyl, Z¹ is C2 alkylene, Z² is absent, W is methylene, and R₇ is H, then R₅ and

[0803] In some embodiments an LNP comprising Formula (xii) is used to deliver a gene modifying composition described herein to the liver and/or hepatocyte cells.

[chemical structure]

[0804] In some embodiments an LNP comprising Formula (xi) is used to deliver a gene modifying composition described herein to the liver and/or hepatocyte cells.

[chemical structure]

[0805] In some embodiments an LNP comprises a compound of Formula (xiii) and a compound of Formula (xiv).

[chemical structure]

[0806] In some embodiments an LNP comprising Formula (xv) is used to deliver a gene modifying composition described herein to the liver and/or hepatocyte cells.

[chemical structure]

[0807] In some embodiments an LNP comprising a formulation of Formula (xvi) is used to deliver a gene modifying composition described herein to the lung endothelial cells.

[chemical structure]

[0808] In some embodiments, a lipid compound used to form lipid nanoparticles for the delivery of compositions described herein, e.g., nucleic acid (e.g., RNA) described herein (e.g., a template nucleic acid or a nucleic acid encoding a gene modifying polypeptide) is made by one of the following reactions:

[chemical structure]

[0809] Exemplary non-cationic lipids include, but are not limited to, distearoyl-sn-glycero-phosphoethanolamine, distearoylphosphatidylcholine (DSPC), dioleoylphosphatidylcholine (DOPC), dipalmitoylphosphatidylcholine (DPPC), dioleoylphosphatidylglycerol (DOPG), dipalmitoylphosphatidylglycerol (DPPG), dioleoyl-phosphatidylethanolamine (DOPE), 1,2-dioleoyl-sn-glycero-3-phosphoethanolamine (DOPE), palmitoyloleoylphosphatidylcholine (POPC), palmitoyloleoylphosphatidylethanolamine (POPE), dioleoyl-phosphatidylethanolamine 4-(N-maleimidomethyl)-cyclohexane-1-carboxylate (DOPE-mal), dipalmitoyl phosphatidyl ethanolamine (DPPE), dimyristoylphosphoethanolamine (DMPE), distearoyl-phosphatidyl-ethanolamine (DSPE), monomethyl-phosphatidylethanolamine (such as 16-O-monomethyl PE), dimethyl-phosphatidylethanolamine (such as 16-O-dimethyl PE), 18-1-trans PE, 1-stearoyl-2-oleoyl-phosphatidyethanolamine (SOPE), hydrogenated soy phosphatidylcholine (HSPC), egg phosphatidylcholine (EPC), dioleoylphosphatidylserine (DOPS), sphingomyelin (SM), dimyristoyl phosphatidylcholine (DMPC), dimyristoyl phosphatidylglycerol (DMPG), distearoylphosphatidylglycerol (DSPG), dierucoylphosphatidylcholine (DEPC), palmitoyloleyolphosphatidylglycerol (POPG), dielaidoyl-phosphatidylethanolamine (DEPE), lecithin, phosphatidylethanolamine, lysolecithin, lysophosphatidylethanolamine, phosphatidylserine, phosphatidylinositol, sphingomyelin, egg sphingomyelin (ESM), cephalin, cardiolipin, phosphatidicacid, cerebrosides, dicetylphosphate, lysophosphatidylcholine, dilinoleoylphosphatidylcholine, or mixtures thereof. It is understood that other diacylphosphatidylcholine and diacylphosphatidylethanolamine phospholipids can also be used. The acyl groups in these lipids are preferably acyl groups derived from fatty acids having C10-C24 carbon chains, e.g., lauroyl, myristoyl, paimitoyl, stearoyl, or oleoyl. Additional exemplary lipids, in certain embodiments, include, without limitation, those described in Kim et al. (2020) dx.doi.org/10.1021/acs.nanolett.0c01386, incorporated herein by reference. Such lipids include, in some embodiments, plant lipids found to improve liver transfection with mRNA (e.g., DGTS). In some embodiments, the non-cationic lipid may have the following structure,

[chemical structure]

[0810] Other examples of non-cationic lipids suitable for use in the lipid nanopartieles include, without limitation, nonphosphorous lipids such as, e.g., stearylamine, dodeeylamine, hexadecylamine, acetyl palmitate, glycerol ricinoleate, hexadecyl stereate, isopropyl myristate, amphoteric acrylic polymers, triethanolamine-lauryl sulfate, alkyl-aryl sulfate polyethyloxylated fatty acid amides, dioctadecyl dimethyl ammonium bromide, ceramide, sphingomyelin, and the like. Other non-cationic lipids are described in WO2017/099823 or US patent publication US2018/0028664, the contents of which is incorporated herein by reference in their entirety.

[0811] In some embodiments, the non-cationic lipid is oleic acid or a compound of Formula I, II, or IV of US2018/0028664, incorporated herein by reference in its entirety. The non-cationic lipid can comprise, for example, 0-30% (mol) of the total lipid present in the lipid nanoparticle. In some embodiments, the non-cationic lipid content is 5-20% (mol) or 10-15% (mol) of the total lipid present in the lipid nanoparticle. In embodiments, the molar ratio of ionizable lipid to the neutral lipid ranges from about 2:1 to about 8:1 (e.g., about 2:1, 3:1, 4:1, 5:1, 6:1, 7:1, or 8:1).

[0812] In some embodiments, the lipid nanoparticles do not comprise any phospholipids.

[0813] In some aspects, the lipid nanoparticle can further comprise a component, such as a sterol, to provide membrane integrity. One exemplary sterol that can be used in the lipid nanoparticle is cholesterol and derivatives thereof. Non-limiting examples of cholesterol derivatives include polar analogues such as 5a-choiestanol, 53-coprostanol, choiesteryl-(2;-hydroxy)-ethyl ether, choiesteryl-(4′-hydroxy)-butyl ether, and 6-ketocholestanol; non-polar analogues such as 5a-cholestane, cholestenone, 5a-cholestanone, 5p-cholestanone, and cholesteryl decanoate; and mixtures thereof. In some embodiments, the cholesterol derivative is a polar analogue, e.g., choiesteryl-(4′-hydroxy)-butyl ether. Exemplary cholesterol derivatives are described in PCT publication WO2009/127060 and US patent publication US2010/0130588, each of which is incorporated herein by reference in its entirety.

[0814] In some embodiments, the component providing membrane integrity, such as a sterol, can comprise 0-50% (mol) (e.g., 0-10%, 10-20%, 20-30%, 30-40%, or 40-50%) of the total lipid present in the lipid nanoparticle. In some embodiments, such a component is 20-50% (mol) 30-40% (mol) of the total lipid content of the lipid nanoparticle.

[0815] In some embodiments, the lipid nanoparticle can comprise a polyethylene glycol (PEG) or a conjugated lipid molecule. Generally, these are used to inhibit aggregation of lipid nanoparticles and/or provide steric stabilization. Exemplary conjugated lipids include, but are not limited to, PEG-lipid conjugates, polyoxazoline (POZ)-lipid conjugates, polyamide-lipid conjugates (such as ATTA-lipid conjugates), cationic-polymer lipid (CPL) conjugates, and mixtures thereof. In some embodiments, the conjugated lipid molecule is a PEG-lipid conjugate, for example, a (methoxy polyethylene glycol)-conjugated lipid.

[0816] Exemplary PEG-lipid conjugates include, but are not limited to, PEG-diacylglycerol (DAG) (such as 1-(monomethoxy-polyethyleneglycol)-2,3-dimyristoylglycerol (PEG-DMG)), PEG-dialkyloxypropyl (DAA), PEG-phospholipid, PEG-ceramide (Cer), a pegylated phosphatidylethanoloamine (PEG-PE), 1,2-dimyristoyl-sn-glycerol, methoxypoly ethylene glycol (DMG-PEG-2K), PEG succinate diacylglycerol (PEGS-DAG) (such as 4-O-(2′,3′-di(tetradecanoyloxy)propyl-1-O-(w-methoxy(polyethoxy)ethyl) butanedioate (PEG-S-DMG)), PEG dialkoxypropylcarbam, N-(carbonyl-methoxypolyethylene glycol 2000)-1,2-distearoyl-sn-glycero-3-phosphoethanolamine sodium salt, or a mixture thereof. Additional exemplary PEG-lipid conjugates are described, for example, in U.S. Pat. Nos. 5,885,613, 6,287,591, US2003/0077829, US2003/0077829, US2005/0175682, US2008/0020058, US2011/0117125, US2010/0130588, US2016/0376224, US2017/0119904, and US/099823, the contents of all of which are incorporated herein by reference in their entirety. In some embodiments, a PEG-lipid is a compound of Formula III, III-a-I, III-a-2, III-b-1, III-b-2, or V of US2018/0028664, the content of which is incorporated herein by reference in its entirety. In some embodiments, a PEG-lipid is of Formula II of US20150376115 or US2016/0376224, the content of both of which is incorporated herein by reference in its entirety. In some embodiments, the PEG-DAA conjugate can be, for example, PEG-dilauryloxypropyl, PEG-dimyristyloxypropyl, PEG-dipalmityloxypropyl, or PEG-distearyloxypropyl. The PEG-lipid can be one or more of PEG-DMG, PEG-dilaurylglycerol, PEG-dipalmitoylglycerol, PEG-disterylglycerol, PEG-dilaurylglycamide, PEG-dimyristylglycamide, PEG-dipalmitoylglycamide, PEG-disterylglycamide, PEG-cholesterol (1-[8′-(Cholest-5-en-3[beta]-oxy)carboxamido-3′,6′-dioxaoctanyl] carbamoyl-[omega]-methyl-poly(ethylene glycol), PEG-DMB (3,4-Ditetradecoxylbenzyl-[omega]-methyl-poly(ethylene glycol) ether), and 1,2-dimyristoyl-sn-glycero-3-phosphoethanolamine-N-[methoxy(polyethylene glycol)-2000]. In some embodiments, the PEG-lipid comprises PEG-DMG, 1,2-dimyristoyl-sn-glycero-3-phosphoethanolamine-N-[methoxy(polyethylene glycol)-2000]. In some embodiments, the PEG-lipid comprises a structure selected from:

[chemical structure]

[0817] In some embodiments, lipids conjugated with a molecule other than a PEG can also be used in place of PEG-lipid. For example, polyoxazoline (POZ)-lipid conjugates, polyamide-lipid conjugates (such as ATTA-lipid conjugates), and cationic-polymer lipid (GPL) conjugates can be used in place of or in addition to the PEG-lipid.

[0818] Exemplary conjugated lipids, i.e., PEG-lipids, (POZ)-lipid conjugates, ATTA-lipid conjugates and cationic polymer-lipids are described in the PCT and LIS patent applications listed in Table 2 of WO2019051289A9 and in WO2020106946A1, the contents of all of which are incorporated herein by reference in their entirety.

[0819] In some embodiments an LNP comprises a compound of Formula (xix), a compound of Formula (xxi) and a compound of Formula (xxv). In some embodiments an LNP comprising a formulation of Formula (xix), Formula (xxi) and Formula (xxv)is used to deliver a gene modifying composition described herein to the lung or pulmonary cells.

[0820] In some embodiments, a lipid nanoparticle may comprise one or more cationic lipids selected from Formula (i), Formula (ii), Formula (iii), Formula (vii), and Formula (ix). In some embodiments, the LNP may further comprise one or more neutral lipid, e.g., DSPC, DPPC, DMPC, DOPC, POPC, DOPE, SM, a steroid, e.g., cholesterol, and/or one or more polymer conjugated lipid, e.g., a pegylated lipid, e.g., PEG-DAG, PEG-PE, PEG-S-DAG, PEG-cer or a PEG dialkyoxypropylcarbamate.

[0821] In some embodiments, the PEG or the conjugated lipid can comprise 0-20% (mol) of the total lipid present in the lipid nanoparticle. In some embodiments, PEG or the conjugated lipid content is 0.5-10% or 2-5% (mol) of the total lipid present in the lipid nanoparticle. Molar ratios of the ionizable lipid, non-cationic-lipid, sterol, and PEG/conjugated lipid can be varied as needed. For example, the lipid particle can comprise 30-70% ionizable lipid by mole or by total weight of the composition, 0-60% cholesterol by mole or by total weight of the composition, 0-30% non-cationic-lipid by mole or by total weight of the composition and 1-10% conjugated lipid by mole or by total weight of the composition. Preferably, the composition comprises 30-40% ionizable lipid by mole or by total weight of the composition, 40-50% cholesterol by mole or by total weight of the composition, and 10-20% non-cationic-lipid by mole or by total weight of the composition. In some other embodiments, the composition is 50-75% ionizable lipid by mole or by total weight of the composition, 20-40% cholesterol by mole or by total weight of the composition, and 5 to 10% non-cationic-lipid, by mole or by total weight of the composition and 1-10% conjugated lipid by mole or by total weight of the composition. The composition may contain 60-70% ionizable lipid by mole or by total weight of the composition, 25-35% cholesterol by mole or by total weight of the composition, and 5-10% non-cationic-lipid by mole or by total weight of the composition. The composition may also contain up to 90% ionizable lipid by mole or by total weight of the composition and 2 to 15% non-cationic lipid by mole or by total weight of the composition. The formulation may also be a lipid nanoparticle formulation, for example comprising 8-30% ionizable lipid by mole or by total weight of the composition, 5-30% non-cationic lipid by mole or by total weight of the composition, and 0-20% cholesterol by mole or by total weight of the composition; 4-25% ionizable lipid by mole or by total weight of the composition, 4-25% non-cationic lipid by mole or by total weight of the composition, 2 to 25% cholesterol by mole or by total weight of the composition, 10 to 35% conjugate lipid by mole or by total weight of the composition, and 5% cholesterol by mole or by total weight of the composition; or 2-30% ionizable lipid by mole or by total weight of the composition, 2-30% non-cationic lipid by mole or by total weight of the composition, 1 to 15% cholesterol by mole or by total weight of the composition, 2 to 35% conjugate lipid by mole or by total weight of the composition, and 1-20% cholesterol by mole or by total weight of the composition; or even up to 90% ionizable lipid by mole or by total weight of the composition and 2-10% non-cationic lipids by mole or by total weight of the composition, or even 100% cationic lipid by mole or by total weight of the composition. In some embodiments, the lipid particle formulation comprises ionizable lipid, phospholipid, cholesterol and a PEG-ylated lipid in a molar ratio of 50:10:38.5: 1.5. In some other embodiments, the lipid particle formulation comprises ionizable lipid, cholesterol and a PEG-ylated lipid in a molar ratio of 60:38.5:1.5.

[0822] In some embodiments, the lipid particle comprises ionizable lipid, non-cationic lipid (e.g. phospholipid), a sterol (e.g., cholesterol) and a PEG-ylated lipid, where the molar ratio of lipids ranges from 20 to 70 mole percent for the ionizable lipid, with a target of 40-60, the mole percent of non-cationic lipid ranges from 0 to 30, with a target of 0 to 15, the mole percent of sterol ranges from 20 to 70, with a target of 30 to 50, and the mole percent of PEG-ylated lipid ranges from 1 to 6, with a target of 2 to 5.

[0823] In some embodiments, the lipid particle comprises ionizable lipid/non-cationic-lipid/sterol/conjugated lipid at a molar ratio of 50:10:38.5:1.5.

[0824] In an aspect, the disclosure provides a lipid nanoparticle formulation comprising phospholipids, lecithin, phosphatidylcholine and phosphatidylethanolamine.

[0825] In some embodiments, one or more additional compounds can also be included. Those compounds can be administered separately or the additional compounds can be included in the lipid nanoparticles of the invention. In other words, the lipid nanoparticles can contain other compounds in addition to the nucleic acid or at least a second nucleic acid, different than the first. Without limitations, other additional compounds can be selected from the group consisting of small or large organic or inorganic molecules, monosaccharides, disaccharides, trisaccharides, oligosaccharides, polysaccharides, peptides, proteins, peptide analogs and derivatives thereof, peptidomimetics, nucleic acids, nucleic acid analogs and derivatives, an extract made from biological materials, or any combinations thereof.

[0826] In some embodiments, a lipid nanoparticle (or a formulation comprising lipid nanoparticles) lacks reactive impurities (e.g., aldehydes or ketones), or comprises less than a preselected level of reactive impurities (e.g., aldehydes or ketones). While not wishing to be bound by theory, in some embodiments, a lipid reagent is used to make a lipid nanoparticle formulation, and the lipid reagent may comprise a contaminating reactive impurity (e.g., an aldehyde or ketone). A lipid regent may be selected for manufacturing based on having less than a preselected level of reactive impurities (e.g., aldehydes or ketones). Without wishing to be bound by theory, in some embodiments, aldehydes can cause modification and damage of RNA, e.g., cross-linking between bases and/or covalently conjugating lipid to RNA (e.g., forming lipid-RNA adducts). This may, in some instances, lead to failure of a reverse transcriptase reaction and/or incorporation of inappropriate bases, e.g., at the site(s) of lesion(s), e.g., a mutation in a newly synthesized target DNA.

[0827] In some embodiments, a lipid nanoparticle formulation is produced using a lipid reagent comprising less than 5%, 4%, 3%, 2%, 1%, 0.9%, 0.8%, 0.7%, 0.6%, 0.5%, 0.4%, 0.3%, 0.2%, or 0.1% total reactive impurity (e.g., aldehyde) content. In some embodiments, a lipid nanoparticle formulation is produced using a lipid reagent comprising less than 5%, 4%, 3%, 2%, 1%, 0.9%, 0.8%, 0.7%, 0.6%, 0.5%, 0.4%, 0.3%, 0.2%, or 0.1% of any single reactive impurity (e.g., aldehyde) species. In some embodiments, a lipid nanoparticle formulation is produced using a lipid reagent comprising: (i) less than 5%, 4%, 3%, 2%, 1%, 0.9%, 0.8%, 0.7%, 0.6%, 0.5%, 0.4%, 0.3%, 0.2%, or 0.1% total reactive impurity (e.g., aldehyde) content; and (ii) less than 5%, 4%, 3%, 2%, 1%, 0.9%, 0.8%, 0.7%, 0.6%, 0.5%, 0.4%, 0.3%, 0.2%, or 0.1% of any single reactive impurity (e.g., aldehyde) species. In some embodiments, the lipid nanoparticle formulation is produced using a plurality of lipid reagents, and each lipid reagent of the plurality independently meets one or more criterion described in this paragraph. In some embodiments, each lipid reagent of the plurality meets the same criterion, e.g., a criterion of this paragraph.

[0828] In some embodiments, the lipid nanoparticle formulation comprises less than 5%, 4%, 3%, 2%, 1%, 0.9%, 0.8%, 0.7%, 0.6%, 0.5%, 0.4%, 0.3%, 0.2%, or 0.1% total reactive impurity (e.g., aldehyde) content. In some embodiments, the lipid nanoparticle formulation comprises less than 5%, 4%, 3%, 2%, 1%, 0.9%, 0.8%, 0.7%, 0.6%, 0.5%, 0.4%, 0.3%, 0.2%, or 0.1% of any single reactive impurity (e.g., aldehyde) species. In some embodiments, the lipid nanoparticle formulation comprises: (i) less than 5%, 4%, 3%, 2%, 1%, 0.9%, 0.8%, 0.7%, 0.6%, 0.5%, 0.4%, 0.3%, 0.2%, or 0.1% total reactive impurity (e.g., aldehyde) content; and (ii) less than 5%, 4%, 3%, 2%, 1%, 0.9%, 0.8%, 0.7%, 0.6%, 0.5%, 0.4%, 0.3%, 0.2%, or 0.1% of any single reactive impurity (e.g., aldehyde) species.

[0829] In some embodiments, one or more, or optionally all, of the lipid reagents used for a lipid nanoparticle as described herein or a formulation thereof comprise less than 5%, 4%, 3%, 2%, 1%, 0.9%, 0.8%, 0.7%, 0.6%, 0.5%, 0.4%, 0.3%, 0.2%, or 0.1% total reactive impurity (e.g., aldehyde) content. In some embodiments, one or more, or optionally all, of the lipid reagents used for a lipid nanoparticle as described herein or a formulation thereof comprise less than 5%, 4%, 3%, 2%, 1%, 0.9%, 0.8%, 0.7%, 0.6%, 0.5%, 0.4%, 0.3%, 0.2%, or 0.1% of any single reactive impurity (e.g., aldehyde) species. In some embodiments, one or more, or optionally all, of the lipid reagents used for a lipid nanoparticle as described herein or a formulation thereof comprise: (i) less than 5%, 4%, 3%, 2%, 1%, 0.9%, 0.8%, 0.7%, 0.6%, 0.5%, 0.4%, 0.3%, 0.2%, or 0.1% total reactive impurity (e.g., aldehyde) content; and (ii) less than 5%, 4%, 3%, 2%, 1%, 0.9%, 0.8%, 0.7%, 0.6%, 0.5%, 0.4%, 0.3%, 0.2%, or 0.1% of any single reactive impurity (e.g., aldehyde) species.

[0830] In some embodiments, total aldehyde content and/or quantity of any single reactive impurity (e.g., aldehyde) species is determined by liquid chromatography (LC), e.g., coupled with tandem mass spectrometry (MS/MS), e.g., according to the method described in Example 40 of PCT/US21/20948. In some embodiments, reactive impurity (e.g., aldehyde) content and/or quantity of reactive impurity (e.g., aldehyde) species is determined by detecting one or more chemical modifications of a nucleic acid molecule (e.g., an RNA molecule, e.g., as described herein) associated with the presence of reactive impurities (e.g., aldehydes), e.g., in the lipid reagents. In some embodiments, reactive impurity (e.g., aldehyde) content and/or quantity of reactive impurity (e.g., aldehyde) species is determined by detecting one or more chemical modifications of a nucleotide or nucleoside (e.g., a ribonucleotide or ribonucleoside, e.g., comprised in or isolated from a template nucleic acid, e.g., as described herein) associated with the presence of reactive impurities (e.g., aldehydes), e.g., in the lipid reagents, e.g., according to the method described in Example 41 of PCT/US21/20948. In embodiments, chemical modifications of a nucleic acid molecule, nucleotide, or nucleoside are detected by determining the presence of one or more modified nucleotides or nucleosides, e.g., using LC-MS/MS analysis, e.g., according to the method described in Example 41 of PCT/US21/20948.

[0831] In some embodiments, a nucleic acid (e.g., RNA) described herein (e.g., a template nucleic acid or a nucleic acid encoding a gene modifying polypeptide) does not comprise an aldehyde modification, or comprises less than a preselected amount of aldehyde modifications. In some embodiments, on average, a nucleic acid has less than 50, 20, 10, 5, 2, or 1 aldehyde modifications per 1000 nucleotides, e.g., wherein a single cross-linking of two nucleotides is a single aldehyde modification. In some embodiments, the aldehyde modification is an RNA adduct (e.g., a lipid-RNA adduct). In some embodiments, the aldehyde-modified nucleotide is cross-linking between bases. In some embodiments, a nucleic acid (e.g., RNA) described herein comprises less than 50, 20, 10, 5, 2, or 1 cross-links between nucleotide.

[0832] In some embodiments, LNPs are directed to specific tissues by the addition of targeting domains. For example, biological ligands may be displayed on the surface of LNPs to enhance interaction with cells displaying cognate receptors, thus driving association with and cargo delivery to tissues wherein cells express the receptor. In some embodiments, the biological ligand may be a ligand that drives delivery to the liver, e.g., LNPs that display GalNAc result in delivery of nucleic acid cargo to hepatocytes that display asialoglycoprotein receptor (ASGPR). The work of Akinc et al. Mol Ther 18(7): 1357-1364 (2010) teaches the conjugation of a trivalent GalNAc ligand to a PEG-lipid (GalNAc-PEG-DSG) to yield LNPs dependent on ASGPR for observable LNP cargo effect (see, e.g., FIG. 6 therein). Other ligand-displaying LNP formulations, e.g., incorporating folate, transferrin, or antibodies, are discussed in WO2017223135, which is incorporated herein by reference in its entirety, in addition to the references used therein, namely Kolhatkar et al., Curr Drug Discov Technol. 2011 8:197-206; Musacchio and Torchilin, Front Biosci. 2011 16:1388-1412; Yu et al., Mol Membr Biol. 2010 27:286-298; Patil et al., Crit Rev Ther Drug Carrier Syst. 2008 25:1-61; Benoit et al., Biomacromolecules. 2011 12:2708-2714; Zhao et al., Expert Opin Drug Deliv. 2008 5:309-319; Akinc et al., Mol Ther. 2010 18:1357-1364; Srinivasan et al., Methods Mol Biol. 2012 820:105-116; Ben-Arie et al., Methods Mol Biol. 2012 757:497-507; Peer 2010 J Control Release. 20:63-68; Peer et al., Proc Natl Acad Sci USA. 2007 104:4095-4100; Kim et al., Methods Mol Biol. 2011 721:339-353; Subramanya et al., Mol Ther. 2010 18:2028-2037; Song et al., Nat Biotechnol. 2005 23:709-717; Peer et al., Science. 2008 319:627-630; and Peer and Lieberman, Gene Ther. 2011 18:1127-1133.

[0833] In some embodiments, LNPs are selected for tissue-specific activity by the addition of a Selective ORgan Targeting (SORT) molecule to a formulation comprising traditional components, such as ionizable cationic lipids, amphipathic phospholipids, cholesterol and poly(ethylene glycol) (PEG) lipids. The teachings of Cheng et al. Nat Nanotechnol 15(4):313-320 (2020) demonstrate that the addition of a supplemental “SORT” component precisely alters the in vivo RNA delivery profile and mediates tissue-specific (e.g., lungs, liver, spleen) gene delivery and editing as a function of the percentage and biophysical property of the SORT molecule.

[0834] In some embodiments, the LNPs comprise biodegradable, ionizable lipids. In some embodiments, the LNPs comprise (9Z,12Z)-3-((4,4-bis(octyloxy)butanoyl)oxy)-2-((((3-(diethylamino)propoxy)carbonyl)oxy)methyl)propyl octadeca-9,12-dienoate, also called 3-((4,4-bis(octyloxy)butanoyl)oxy)-2-((((3-(diethylamino)propoxy)carbonyl)oxy)methyl)propyl (9Z,12Z)-octadeca-9,12-dienoate) or another ionizable lipid. See, e.g, lipids of WO2019/067992, WO/2017/173054, WO2015/095340, and WO2014/136086, as well as references provided therein. In some embodiments, the term cationic and ionizable in the context of LNP lipids is interchangeable, e.g., wherein ionizable lipids are cationic depending on the pH.

[0835] In some embodiments, an LNP described herein comprises a lipid described in Table 19.

TABLE 19
Exemplary Lipids

| | | Molecular | |
|---|---|---|---|
| LIPID ID | Chemical Name | Weight | Structure |
| LIPIDV003 | (9Z,12Z)- 3-((4,4- bis(octyloxy) butanoyl)oxy)-2- ((((3- (diethylamino) propoxy)carbonyl) oxy)methyl) propyl octadeca- 9, 12-dienoate | 852.29 | [chemical structure] |
| LIPIDV004 | Heptadecan-9- yl 8-((2- hydroxyethyl) (8-(nonyloxy)-8- oxooctyl) amino)octanoate | 710.18 | [chemical structure] |
| LIPIDV005 | | 919.56 | [chemical structure] |

[0836] In some embodiments, multiple components of a gene modifying system may be prepared as a single LNP formulation, e.g., an LNP formulation comprises mRNA encoding for the gene modifying polypeptide and an RNA template. Ratios of nucleic acid components may be varied in order to maximize the properties of a therapeutic. In some embodiments, the ratio of RNA template to mRNA encoding a gene modifying polypeptide is about 1:1 to 100:1, e.g., about 1:1 to 20:1, about 20:1 to 40:1, about 40:1 to 60:1, about 60:1 to 80:1, or about 80:1 to 100:1, by molar ratio. In other embodiments, a system of multiple nucleic acids may be prepared by separate formulations, e.g., one LNP formulation comprising a template RNA and a second LNP formulation comprising an mRNA encoding a gene modifying polypeptide. In some embodiments, the system may comprise more than two nucleic acid components formulated into LNPs. In some embodiments, the system may comprise a protein, e.g., a gene modifying polypeptide, and a template RNA formulated into at least one LNP formulation.

[0837] In some embodiments, the average LNP diameter of the LNP formulation may be between 10s of nm and 100s of nm, e.g., measured by dynamic light scattering (DLS). In some embodiments, the average LNP diameter of the LNP formulation may be from about 40 nm to about 150 nm, such as about 40 nm, 45 nm, 50 nm, 55 nm, 60 nm, 65 nm, 70 nm, 75 nm, 80 nm, 85 nm, 90 nm, 95 nm, 100 nm, 105 nm, 110 nm, 115 nm, 120 nm, 125 nm, 130 nm, 135 nm, 140 nm, 145 nm, or 150 nm. In some embodiments, the average LNP diameter of the LNP formulation may be from about 50 nm to about 100 nm, from about 50 nm to about 90 nm, from about 50 nm to about 80 nm, from about 50 nm to about 70 nm, from about 50 nm to about 60 nm, from about 60 nm to about 100 nm, from about 60 nm to about 90 nm, from about 60 nm to about 80 nm, from about 60 nm to about 70 nm, from about 70 nm to about 100 nm, from about 70 nm to about 90 nm, from about 70 nm to about 80 nm, from about 80 nm to about 100 nm, from about 80 nm to about 90 nm, or from about 90 nm to about 100 nm. In some embodiments, the average LNP diameter of the LNP formulation may be from about 70 nm to about 100 nm. In a particular embodiment, the average LNP diameter of the LNP formulation may be about 80 nm. In some embodiments, the average LNP diameter of the LNP formulation may be about 100 nm. In some embodiments, the average LNP diameter of the LNP formulation ranges from about 1 mm to about 500 mm, from about 5 mm to about 200 mm, from about 10 mm to about 100 mm, from about 20 mm to about 80 mm, from about 25 mm to about 60 mm, from about 30 mm to about 55 mm, from about 35 mm to about 50 mm, or from about 38 mm to about 42 mm.

[0838] An LNP may, in some instances, be relatively homogenous. A polydispersity index may be used to indicate the homogeneity of an LNP, e.g., the particle size distribution of the lipid nanoparticles. A small (e.g., less than 0.3) polydispersity index generally indicates a narrow particle size distribution. An LNP may have a polydispersity index from about 0 to about 0.25, such as 0.01, 0.02, 0.03, 0.04, 0.05, 0.06, 0.07, 0.08, 0.09, 0.10, 0.11, 0.12, 0.13, 0.14, 0.15, 0.16, 0.17, 0.18, 0.19, 0.20, 0.21, 0.22, 0.23, 0.24, or 0.25. In some embodiments, the polydispersity index of an LNP may be from about 0.10 to about 0.20.

[0839] The zeta potential of an LNP may be used to indicate the electrokinetic potential of the composition. In some embodiments, the zeta potential may describe the surface charge of an LNP. Lipid nanoparticles with relatively low charges, positive or negative, are generally desirable, as more highly charged species may interact undesirably with cells, tissues, and other elements in the body. In some embodiments, the zeta potential of an LNP may be from about −10 mV to about +20 mV, from about −10 mV to about +15 mV, from about −10 mV to about +10 mV, from about −10 mV to about +5 mV, from about −10 mV to about 0 mV, from about −10 mV to about −5 mV, from about −5 mV to about +20 mV, from about −5 mV to about +15 mV, from about −5 mV to about +10 mV, from about −5 mV to about +5 mV, from about −5 mV to about 0 mV, from about 0 mV to about +20 mV, from about 0 mV to about +15 mV, from about 0 mV to about +10 mV, from about 0 mV to about +5 mV, from about +5 mV to about +20 mV, from about +5 mV to about +15 mV, or from about +5 mV to about +10 mV.

[0840] The efficiency of encapsulation of a protein and/or nucleic acid, e.g., gene modifying polypeptide or mRNA encoding the polypeptide, describes the amount of protein and/or nucleic acid that is encapsulated or otherwise associated with an LNP after preparation, relative to the initial amount provided. The encapsulation efficiency is desirably high (e.g., close to 100%). The encapsulation efficiency may be measured, for example, by comparing the amount of protein or nucleic acid in a solution containing the lipid nanoparticle before and after breaking up the lipid nanoparticle with one or more organic solvents or detergents. An anion exchange resin may be used to measure the amount of free protein or nucleic acid (e.g., RNA) in a solution. Fluorescence may be used to measure the amount of free protein and/or nucleic acid (e.g., RNA) in a solution. For the lipid nanoparticles described herein, the encapsulation efficiency of a protein and/or nucleic acid may be at least 50%, for example 50%, 55%, 60%, 65%, 70%, 75%, 80%, 85%, 90%, 91%, 92%, 93%, 94%, 95%, 96%, 97%, 98%, 99%, or 100%. In some embodiments, the encapsulation efficiency may be at least 80%. In some embodiments, the encapsulation efficiency may be at least 90%. In some embodiments, the encapsulation efficiency may be at least 95%.

[0841] An LNP may optionally comprise one or more coatings. In some embodiments, an LNP may be formulated in a capsule, film, or table having a coating. A capsule, film, or tablet including a composition described herein may have any useful size, tensile strength, hardness or density.

[0842] Additional exemplary lipids, formulations, methods, and characterization of LNPs are taught by WO2020061457, which is incorporated herein by reference in its entirety.

[0843] In some embodiments, in vitro or ex vivo cell lipofections are performed using Lipofectamine MessengerMax (Thermo Fisher) or TransIT-mRNA Transfection Reagent (Mirus Bio). In certain embodiments, LNPs are formulated using the Gen Voy_ILM ionizable lipid mix (Precision NanoSystems). In certain embodiments, LNPs are formulated using 2,2-dilinoleyl-4-dimethylaminoethyl-[1,3]-dioxolane (DLin-KC2-DMA) or dilinoleylmethyl-4-dimethylaminobutyrate (DLin-MC3-DMA or MC3), the formulation and in vivo use of which are taught in Jayaraman et al. Angew Chem Int Ed Engl 51(34):8529-8533 (2012), incorporated herein by reference in its entirety.

[0844] LNP formulations optimized for the delivery of CRISPR-Cas systems, e.g., Cas9-gRNA RNP, gRNA, Cas9 mRNA, are described in WO2019067992 and WO2019067910, both incorporated by reference.

[0845] Additional specific LNP formulations useful for delivery of nucleic acids are described in U.S. Pat. Nos. 8,158,601 and 8,168,775, both incorporated by reference, which include formulations used in patisiran, sold under the name ONPATTRO.

[0846] Exemplary dosing of gene modifying LNP may include about 0.1, 0.25, 0.3, 0.5, 1, 2, 3, 4, 5, 6, 8, 10, or 100 mg/kg (RNA). Exemplary dosing of AAV comprising a nucleic acid encoding one or more components of the system may include an MOI of about 10¹¹, 10¹², 10¹³ and 10¹⁴ vg/kg.

### Kits, Articles of Manufacture, and Pharmaceutical Compositions

[0847] In an aspect the disclosure provides a kit comprising a gene modifying polypeptide or a gene modifying system, e.g., as described herein. In some embodiments, the kit comprises a gene modifying polypeptide (or a nucleic acid encoding the polypeptide) and a template RNA (or DNA encoding the template RNA). In some embodiments, the kit further comprises a reagent for introducing the system into a cell, e.g., transfection reagent, LNP, and the like. In some embodiments, the kit is suitable for any of the methods described herein. In some embodiments, the kit comprises one or more elements, compositions (e.g., pharmaceutical compositions), gene modifying polypeptides, and/or gene modifying systems, or a functional fragment or component thereof, e.g., disposed in an article of manufacture. In some embodiments, the kit comprises instructions for use thereof.

[0848] In an aspect, the disclosure provides an article of manufacture, e.g., in which a kit as described herein, or a component thereof, is disposed.

[0849] In an aspect, the disclosure provides a pharmaceutical composition comprising a gene modifying polypeptide or a gene modifying system, e.g., as described herein. In some embodiments, the pharmaceutical composition further comprises a pharmaceutically acceptable carrier or excipient. In some embodiments, the pharmaceutical composition comprises a template RNA and/or an RNA encoding the polypeptide. In embodiments, the pharmaceutical composition has one or more (e.g., 1, 2, 3, or 4) of the following characteristics:
[0850] (a) less than 1% (e.g., less than 0.5%, 0.4%, 0.3%, 0.2%, or 0.1%) DNA template relative to the template RNA and/or the RNA encoding the polypeptide, e.g., on a molar basis;
[0851] (b) less than 1% (e.g., less than 0.5%, 0.4%, 0.3%, 0.2%, or 0.1%) uncapped RNA relative to the template RNA and/or the RNA encoding the polypeptide, e.g., on a molar basis;
[0852] (c) less than 1% (e.g., less than 0.5%, 0.4%, 0.3%, 0.2%, or 0.1%) partial length RNAs relative to the template RNA and/or the RNA encoding the polypeptide, e.g., on a molar basis;
[0853] (d) substantially lacks unreacted cap dinucleotides.

### Chemistry, Manufacturing, and Controls (CMC)

[0854] Purification of protein therapeutics is described, for example, in Franks, Protein Biotechnology: Isolation, Characterization, and Stabilization, Humana Press (2013); and in Cutler, Protein Purification Protocols (Methods in Molecular Biology), Humana Press (2010).

[0855] In some embodiments, a gene modifying system, polypeptide, and/or template nucleic acid (e.g., template RNA) conforms to certain quality standards. In some embodiments, a gene modifying system, polypeptide, and/or template nucleic acid (e.g., template RNA) produced by a method described herein conforms to certain quality standards. Accordingly, the disclosure is directed, in some aspects, to methods of manufacturing a gene modifying system, polypeptide, and/or template nucleic acid (e.g., template RNA) that conforms to certain quality standards, e.g., in which said quality standards are assayed. The disclosure is also directed, in some aspects, to methods of assaying said quality standards in a gene modifying system, polypeptide, and/or template nucleic acid (e.g., template RNA). In some embodiments, quality standards include, but are not limited to, one or more (e.g., 1, 2, 3, 4, 5, 6, 7, 8, 9, 10, 11, or 12) of the following:
[0856] (i) the length of the template RNA, e.g., whether the template RNA has a length that is above a reference length or within a reference length range, e.g., whether at least 80%, 85%, 90%, 95%, 96%, 97%, 98%, or 99% of the template RNA present is greater than 100, 125, 150, 175, or 200 nucleotides long;
[0857] (ii) the presence, absence, and/or length of a poly A tail on the template RNA, e.g., whether at least 80%, 85%, 90%, 95%, 96%, 97%, 98%, or 99% of the template RNA present contains a poly A tail (e.g., a polyA tail that is at least 5, 10, 20, 30, 50, 70, 100 nucleotides in length (SEQ ID NO: 22004));
[0858] (iii) the presence, absence, and/or type of a 5′ cap on the template RNA, e.g., whether at least 80%, 85%, 90%, 95%, 96%, 97%, 98%, or 99% of the template RNA present contains a 5′ cap, e.g., whether that cap is a 7-methylguanosine cap, e.g., a O-Me-m7G cap;
[0859] (iv) the presence, absence, and/or type of one or more modified nucleotides (e.g., selected from pseudouridine, dihydrouridine, inosine, 7-methylguanosine, 1-N-methylpseudouridine (1-Me-Y′), 5-methoxyuridine (5-MO-U), 5-methylcytidine (5mC), or a locked nucleotide) in the template RNA, e.g., whether at least 80%, 85%, 90%, 95%, 96%, 97%, 98%, or 99% of the template RNA present contains one or more modified nucleotides;
[0860] (v) the stability of the template RNA (e.g., over time and/or under a pre-selected condition), e.g., whether at least 80%, 85%, 90%, 95%, 96%, 97%, 98%, or 99% of the template RNA remains intact (e.g., greater than 100, 125, 150, 175, or 200 nucleotides long) after a stability test;
[0861] (vi) the potency of the template RNA in a system for modifying DNA, e.g., whether at least 1% of target sites are modified after a system comprising the template RNA is assayed for potency;
[0862] (vii) the length of the polypeptide, first polypeptide, or second polypeptide, e.g., whether the polypeptide, first polypeptide, or second polypeptide has a length that is above a reference length or within a reference length range, e.g., whether at least 80%, 85%, 90%, 95%, 96%, 97%, 98%, or 99% of the polypeptide, first polypeptide, or second polypeptide present is greater than 600, 650, 700, 750, 800, 850, 900, 950, 1000, 1050, 1100, 1150, 1200, 1250, 1300, 1350, 1400, 1450, 1500, 1600, 1700, 1800, 1900, or 2000 amino acids long (and optionally, no larger than 2500, 2000, 1500, 1400, 1300, 1200, 1100, 1000, 900, 800, 700, or 600 amino acids long);
[0863] (viii) the presence, absence, and/or type of post-translational modification on the polypeptide, first polypeptide, or second polypeptide, e.g., whether at least 80, 85, 90, 95, 96, 97, 98, or 99% of the polypeptide, first polypeptide, or second polypeptide contains phosphorylation, methylation, acetylation, myristoylation, palmitoylation, isoprenylation, glipyatyon, or lipoylation, or any combination thereof;
[0864] (ix) the presence, absence, and/or type of one or more artificial, synthetic, or non-canonical amino acids (e.g., selected from ornithine, B-alanine, GABA, 8-Aminolevulinic acid, PABA, a D-amino acid (e.g., D-alanine or D-glutamate), aminoisobutyric acid, dehydroalanine, cystathionine, lanthionine, Djenkolic acid, Diaminopimelic acid, Homoalanine, Norvaline, Norleucine, Homonorleucine, homoserine, O-methyl-homoserine and O-ethyl-homoserine, ethionine, selenocysteine, selenohomocysteine, selenomethionine, selenoethionine, tellurocysteine, or telluromethionine) in the polypeptide, first polypeptide, or second polypeptide, e.g., whether at least 80%, 85%, 90%, 95%, 96%, 97%, 98%, or 99% of the polypeptide, first polypeptide, or second polypeptide present contains one or more artificial, synthetic, or non-canonical amino acids;
[0865] (x) the stability of the polypeptide, first polypeptide, or second polypeptide (e.g., over time and/or under a pre-selected condition), e.g., whether at least 80%, 85%, 90%, 95%, 96%, 97%, 98%, or 99% of the polypeptide, first polypeptide, or second polypeptide remains intact (e.g., greater than 600, 650, 700, 750, 800, 850, 900, 950, 1000, 1050, 1100, 1150, 1200, 1250, 1300, 1350, 1400, 1450, 1500, 1600, 1700, 1800, 1900, or 2000 amino acids long (and optionally, no larger than 2500, 2000, 1500, 1400, 1300, 1200, 1100, 1000, 900, 800, 700, or 600 amino acids long)) after a stability test;
[0866] (xi) the potency of the polypeptide, first polypeptide, or second polypeptide in a system for modifying DNA, e.g., whether at least 1% of target sites are modified after a system comprising the polypeptide, first polypeptide, or second polypeptide is assayed for potency; or (xii) the presence, absence, and/or level of one or more of a pyrogen, virus, fungus, bacterial pathogen, or host cell protein, e.g., whether the system is free or substantially free of pyrogen, virus, fungus, bacterial pathogen, or host cell protein contamination.

[0867] In some embodiments, a system or pharmaceutical composition described herein is endotoxin free.

[0868] In some embodiments, the presence, absence, and/or level of one or more of a pyrogen, virus, fungus, bacterial pathogen, and/or host cell protein is determined. In embodiments, whether the system is free or substantially free of pyrogen, virus, fungus, bacterial pathogen, and/or host cell protein contamination is determined.

[0869] In some embodiments, a pharmaceutical composition or system as described herein has one or more (e.g., 1, 2, 3, or 4) of the following characteristics:
[0870] (a) less than 1% (e.g., less than 0.5%, 0.4%, 0.3%, 0.2%, or 0.1%) DNA template relative to the template RNA and/or the RNA encoding the polypeptide, e.g., on a molar basis;
[0871] (b) less than 1% (e.g., less than 0.5%, 0.4%, 0.3%, 0.2%, or 0.1%) uncapped RNA relative to the template RNA and/or the RNA encoding the polypeptide, e.g., on a molar basis;
[0872] (c) less than 1% (e.g., less than 0.5%, 0.4%, 0.3%, 0.2%, or 0.1%) partial length RNAs relative to the template RNA and/or the RNA encoding the polypeptide, e.g., on a molar basis;
[0873] (d) substantially lacks unreacted cap dinucleotides.

### EXAMPLES

### Example 1: Screening Configurations of Template RNAs that Correct a Sickle Cell Disease Associated Mutation in a Genomic Landing Pad in Human Cells

[0874] This example describes the use of gene modifying system containing a gene modifying polypeptide and template RNAs comprising varied lengths of heterologous object sequences and PBS sequences to quantify the activity of template RNAs for correction of the HBB:E6V mutation (also referred to as E7V or the HbS variant; NC_000011.10: g.5227002T>A). In this example, a template RNA contains:
[0875] (1) a gRNA spacer;
[0876] (2) a gRNA scaffold;
[0877] (3) a heterologous object sequence; and
[0878] (4) a primer binding site (PBS) sequence.

[0879] One or more template RNAs described in Tables 1˜4 can be tested as described in this example. The heterologous object sequences and PBS sequences were designed to correct the SCD mutation in a landing pad by replacing an “A” nucleotide with a “T” nucleotide at the mutation site via gene editing, to reverse an E6V mutation in the corresponding protein.

[0880] A cell line is created to have a “landing pad” or a stable integration that mimics a region of the HBB gene that contains the E6V mutation site and flanking sequences. In some embodiments, a cell line used for screening may contain one or more additional SNPs in the HBB locus relative to a patient or reference sequence, e.g., the hg38 human genome reference sequence, and a landing pad containing the target mutation is optionally designed to carry the one or more non-pathogenic SNPs to match the endogenous cell line HBB locus, e.g., designed to carry a mutation that recapitulates a SNP present in the endogenous HBB locus in HEK293T cells. Without wishing to be limited by example, it is understood that template RNA sequences found to successfully edit a target mutation at a site containing an additional SNP relative to a reference sequence would differ from a therapeutic template RNA in any region overlapping the additional SNP. For example, a successful template RNA in a HEK293T-based screening assay where a genomic landing pad contains the target mutation (corresponding to the endogenous E6V mutation caused by DNA substitution NC_000011.10: g.5227002T>A) and an additional substitution relative to hg38 (corresponding to the NC_000011.10: g.5227013T>C mutation at the endogenous HBB locus in HEK293T cells) in the protospacer may provide a candidate composition where the corresponding therapeutic template RNA would thus have a substitution (C>T) in the spacer region relative to the corresponding spacer region of the screening template RNA, in order to enable therapeutic correction of the E6V mutation at a target site lacking the additional substitution, e.g., at a target site comprising the pathogenic E6V mutation but otherwise matching the hg38 reference sequence. In this example, a screening cell line containing a target site landing pad comprising the pathogenic mutation with an additional T>C substitution in the protospacer region might be corrected using a screening template RNA comprising the spacer sequence 5′-CATGGTGCACCTGACTCCTG-3′ (SEQ ID NO: 19249), whereas the corresponding therapeutic template RNA might comprise the spacer sequence 5′-CATGGTGCATCTGACTCCTG-3′(SEQ ID NO: 19250), where the underlined nucleotides indicate the position that is altered to match either the screening cell target sequence or the hg38 target sequence. In some embodiments, the spacer, PBS, and/or RT template regions may need to be adjusted in this manner to account for any discrepancies between screening and reference target sequences. It is further contemplated that a given patient or patient population may possess one or more SNPs relative to hg38 at the target locus in addition to the pathogenic E6V mutation and thus a similar adaptation of candidate template RNA molecules could be used to generate template RNA sequences specific for the patient or patient population.

[0881] The DNA for the landing pad is chemically synthesized and cloned into the pLenti-N-tGFP vector. The cloned landing pad sequence in the lentiviral expression vector is confirmed and the sequence is verified by Sanger sequencing of the landing pad. The sequence verified plasmids (9 ug) along with the lentiviral packaging mix (9 ug, Biosettia) are transfected using Lipofectamine2000TM according to the manufacturer instructions into a packaging cell line, LentiX-293T (Takara Bio). The transfected cells are incubated at 37° ° C., 5% CO₂ for 48 hours (including one medium change at 24 hrs) and the viral particle containing medium is collected from the cell culture dish. The collected medium is filtered through a 0.2 μm filter to remove cell debris and is prepared for transduction of HEK293T cells. The virus-containing medium is diluted in DMEM and mixed with polybrene to prepare a dilution series for transduction of HEK293T cells where the final concentration of polybrene is 8 ug/ml. The HEK293T cells are grown in virus containing medium for 48 hours and then split with fresh medium. The split cells are grown to confluence and transduction efficiency of the different dilutions of virus is measured by GFP expression via flow cytometry and ddPCR detection of the genomic integrated lentivirus that contained GFP and the HBB:E6V landing pads.

[0882] A gene modifying system comprising (i) a compatible gene modifying polypeptide described herein, e.g., having: an NLS of Table 11, a compatible Cas9 domain having a sequence of Table 8, a linker of Table 10, an RT sequence of Table 6 (e.g., MLVMS_P03355_PLV919), and a second NLS of Table 11 and (ii) a template RNA of any of Tables 1˜4 is transfected into the HEK293T landing pad cell line. The gene modifying polypeptide and the template RNAs are delivered by nucleofection in RNA format. Specifically, 1 μg of gene modifying polypeptide mRNA is combined with 10 μM template RNAs. The mRNA and template RNAs are added to 25 μL SF buffer containing 250,000 HEK293T landing pad cells and cells are nucleofected using program DS-150. After nucleofection, are were grown at 37° C., 5% CO₂ for 3 days prior to cell lysis and genomic DNA extraction. To analyze gene editing activity, primers flanking the HBB:E6V site are used to amplify across the locus. Amplicons are analyzed via short read sequencing using an Illumina MiSeq. In some embodiments, the assay will indicate that at least 10%, 20%, 30%, 40%, 50%, 60%, or 70% of copies of the HBB gene in the sample are converted to the desired wild-type sequence.

### Example 2: Gene Modifying Polypeptide Selection by Pooled Screening in HEK293T & U2OS Cells

[0883] This example describes the use of an RNA gene modifying system for the targeted editing of a coding sequence in the human genome. More specifically, this example describes the infection of HEK293T and U2OS cells with a library of gene modifying candidates, followed by transfection of a template guide RNA (tgRNA) for in vitro gene modifying in the cells, e.g., as a means of evaluating a new gene modifying polypeptide for editing activity in human cells by a pooled screening approach.

[0884] The gene modifying polypeptide library candidates assayed herein each comprise: 1) a S. pyogenes (Spy) Cas9 nickase containing an N863A mutation that inactivates one endonuclease active site; 2) one of the 122 peptide linkers depicted at Table 10; and 3) a reverse transcriptase (RT) domain from Table 6 of retroviral origin. The particular retroviral RT domains utilized were selected if they were expected to function as a monomer. For each selected RT domain, the wild-type sequences were tested, as well as versions with point mutations installed in the primary wild-type sequence. In particular, 143 RT domains were tested, either wild type or containing various mutations. In total, 17,446 Cas-linker-RT gene modifying polypeptides were tested.

[0885] The system described here is a two-component system comprising: 1) an expression plasmid encoding a human codon-optimized gene modifying polypeptide library candidate within a lentiviral cassette, and 2) a tgRNA expression plasmid expressing a non-coding tgRNA sequence that is recognized by Cas and localizes it to the genomic locus of interest, and that also templates reverse transcription of the desired edit into the genome by the RT domain, driven by a U6 promoter. The lentiviral cassette comprises: (i) a CMV promoter for expression in mammalian cells; (ii) a gene modifying polypeptide library candidate as shown; (iii) a self-cleaving T2A polypeptide; (iv) a puromycin resistance gene enabling selection in mammalian cells; and (v) a polyA tail termination signal.

[0886] To prepare a pool of cells expressing gene modifying polypeptide library candidates, HEK293T or U2OS cells were transduced with pooled lentiviral preparations of the gene modifying candidate plasmid library. HEK293 Lenti-X cells were seeded in 15 cm plates (12×10⁶ cells) prior to lentiviral plasmid transfection. Lentiviral plasmid transfection using the Lentiviral Packaging Mix (Biosettia, 27 ug) and the plasmid DNA for the gene modifying candidate library (27 ug) was performed the following day using Lipofectamine 2000 and Opti-MEM media according to the manufacturer's protocol. Extracellular DNA was removed by a full media change the next day and virus-containing media was harvested 48 hours after. Lentiviral media was concentrated using Lenti-X Concentrator (TaKaRa Biosciences) and 5 mL lentiviral aliquots were made and stored at −80° C. Lentiviral titering was performed by enumerating colony forming units post Puromycin selection. HEK293T or U2OS cells carrying a BFP-expressing genomic landing pad were seeded at 6×10⁷ cells in culture plates and transduced at a 0.3 multiplicity of infection (MOI) to minimize multiple infections per cell. Puromycin (2.5 ug/mL) was added 48 hours post infection to allow for selection of infected cells. Cells were kept under puromycin selection for at least 7 days and then scaled up for tgRNA electroporation.

[0887] To determine the genome-editing capacity of the gene modifying library candidates in the assay, infected BFP-expressing HEK293T or U2OS cells were then transfected by electroporation of 250,000 cells/well with 200 ng of a tgRNA (either g4 or g10) plasmid, designed to convert BFP to GFP, at sufficient cell count for >1000x coverage per library candidate.

[0888] The g4 tgRNA (5′ to 3′) is as follows: 20 nucleotide spacer region (GCCGAAGCACTGCACGCCGT; SEQ ID NO: 11,011), a scaffold region (GTTTTAGAGCTAGAAATAGCAAGTTAAAATAAGGCTAGTCCGTTATCAACTTGAAA AAGTGGCACCGAGTCGGTGC; SEQ ID NO: 11,012), the template region encoding the single base pair substitution to change BFP to GFP (bold) and a PAM inactivation that introduces a synonymous point mutation in the SpyCas9 PAM (NGG to NCG) that prevents re-engagement of the gene modifying polypeptide upon completion of a functional gene modifying reaction (underline) (ACCCTGACGTACG; SEQ ID NO: 11,013), and the 13 nucleotide PBS (GCGTGCAGTGCTT; SEQ ID NO: 11,014).

[0889] Similarly, the g10 tgRNA (5′ to 3′) is as follows: 20 nucleotide spacer region (AGAAGTCGTGCTGCTTCATG; SEQ ID NO: 11,015), a scaffold region (GTTTTAGAGCTAGAAATAGCAAGTTAAAATAAGGCTAGTCCGTTATCAACTTGAAA AAGTGGCACCGAGTCGGTGC; SEQ ID NO: 11,016), the template region encoding the single base pair substitution to change BFP to GFP (bold) and a PAM inactivation that introduces a synonymous point mutation in the SpyCas9 PAM (NGG to NGA) that prevents re-engagement of the gene modifying polypeptide upon completion of a functional gene modifying reaction (underline) (ACCCTGACCTACGGCGTGCAGTGCTTCGGCCGCTACCCCGATCACAT; SEQ ID NO: 11,017), and 13 nucleotide PBS (GAAGCAGCACGAC; SEQ ID NO: 11,018).

[0890] To assess the genome-editing capacity of the various constructs in the assay, cells were sorted by Fluorescence-Activated Cell Sorting (FACS) for GFP expression 6-7 days post-electroporation. Cells were sorted and harvested as distinct populations of unedited (BFP+) cells, edited (GFP+) cells and imperfect edit (BFP-, GFP-) cells. A sample of unsorted cells was also harvested as the input population to determine enrichment during analysis.

[0891] To determine which gene modifying library candidates have genome-editing capacity in this assay, genomic DNA (gDNA) was harvested from sorted and unsorted cell populations, and analyzed by sequencing the gene modifying library candidates in each population. Briefly, gene modifying sequences were amplified from the genome using primers specific to the lentiviral cassette, amplified in a second round of PCR to dilute genomic DNA, and then sequenced using Oxford Nanopore Sequencing Technology according to the manufacturer's protocol.

[0892] After quality control of sequencing reads, reads of at least 1500 and no more than 3200 nucleotides were mapped to the gene modifying polypeptide library sequences and those containing a minimum of an 80% match to a library sequence were considered to be successfully aligned to a given candidate. To identify gene modifying candidates capable of performing gene editing in the assay, the read count of each library candidate in the edited population was compared to its read count in the initial, unsorted population. For purposes of this pooled screen, gene modifying candidates with genome-editing capacity were selected as those candidates that were enriched in the converted (GFP+) population relative to unsorted (input) cells and wherein the enrichment was determined to be at or above the enrichment level of a reference (Element ID No: 17380).

[0893] A large number of gene modifying polypeptide candidates were determined to be enriched in the GFP+ cell populations. For example, of the 17,446 candidates tested, over 3,300 exhibited enrichment in GFP+sorted populations (relative to unsorted) that was at least equivalent to that of the reference under similar experimental conditions (HEK293T using g4 tgRNA; HEK293T cells using g10 tgRNA; or U2OS cells using g4 tgRNA), shown in Table D. Although the 17,446 candidates were also tested in U2OS cells using g10 tgRNA, the pooled screen did not yield candidates that were enriched in the converted (GFP+) population relative to unsorted (input) cells under that experimental condition; further investigation is required to explain these results.

TABLE D
Combinations of linker and RT sequences screened.
The amino acid sequence of each RT in this table is
provided in Table 6.

| | Linker | |
|---|---|---|
| Linker amino | SEQ ID | |
| acid sequence | NO: | RT domain name |
| EAAAKGSS | 12,001 | PERV_Q4VFZ2_3mutA_WS |
| EAAAKEAAAKEAAAKEAAAK | 12,002 | MLVMS_P03355_PLV919 |
| PAPEAAAK | 12,003 | MLVFF_P26809_3mutA |
| EAAAKPAPGGG | 12,004 | MLVFF_P26809_3mutA |
| GSSGSSGSSGSSGSSGSS | 12,005 | PERV_Q4VFZ2_3mut |
| PAPGGGEAAAK | 12,006 | MLVAV_P03356_3mutA |
| AEAAAKEAAAKEAAAKEAAAKALEAEAAAKEAAAKEAAAKEAAAKA | 12,007 | MLVMS_P03355_PLV919 |
| GSSEAAAK | 12,008 | MLVFF_P26809_3mutA |
| EAAAKPAPGGS | 12,009 | MLVFF_P26809_3mutA |
| GGSGGSGGSGGSGGSGGS | 12,010 | MLVFF_P26809_3mutA |
| AEAAAKEAAAKEAAAKEAAAKALEAEAAAKEAAAKEAAAKEAAAKA | 12,011 | XMRV6_A1Z651_3mutA |
| AEAAAKEAAAKEAAAKEAAAKALEAEAAAKEAAAKEAAAKEAAAKA | 12,012 | PERV_Q4VFZ2_3mutA_WS |
| EAAAKEAAAKEAAAK | 12,013 | MLVFF_P26809_3mutA |
| PAPEAAAKGSS | 12,014 | MLVFF_P26809_3mutA |
| AEAAAKEAAAKEAAAKEAAAKALEAEAAAKEAAAKEAAAKEAAAKA | 12,015 | PERV_Q4VFZ2_3mutA_WS |
| EAAAKEAAAKEAAAK | 12,016 | PERV_Q4VFZ2_3mutA_WS |
| AEAAAKEAAAKEAAAKEAAAKALEAEAAAKEAAAKEAAAKEAAAKA | 12,017 | AVIRE_P03360_3mutA |
| PAPAPAPAPAP | 12,018 | MLVCB_P08361_3mutA |
| PAPAPAPAPAP | 12,019 | MLVFF_P26809_3mutA |
| EAAAKGGSPAP | 12,020 | PERV_Q4VFZ2_3mutA_WS |
| PAP | | MLVMS_P03355_PLV919 |
| PAPGGGGSS | 12,022 | WMSV_P03359_3mutA |
| SGSETPGTSESATPES | 12,023 | MLVFF_P26809_3mutA |
| PAPEAAAKGSS | 12,024 | XMRV6_A1Z651_3mutA |
| EAAAKGGSGGG | 12,025 | MLVMS_P03355_PLV919 |
| GGGGSGGGGS | 12,026 | MLVFF_P26809_3mutA |
| GGGPAPGSS | 12,027 | MLVAV_P03356_3mutA |
| GGSGGSGGSGGSGGSGGS | 12,028 | XMRV6_A1Z651_3mut |
| GGGGSGGGGSGGGGSGGGGSGGGGSGGGGS | 12,029 | MLVCB_P08361_3mutA |
| GSSPAP | 12,030 | AVIRE_P03360_3mutA |
| EAAAKGSSPAP | 12,031 | MLVFF_P26809_3mutA |
| GSSGGGEAAAK | 12,032 | MLVFF_P26809_3mutA |
| GGSGGSGGSGGSGGSGGS | 12,033 | MLVMS_P03355_3mutA_WS |
| PAPAPAPAP | 12,034 | MLVFF_P26809_3mutA |
| EAAAKEAAAKEAAAKEAAAK | 12,035 | XMRV6_A1Z651_3mutA |
| EAAAKGGSPAP | 12,036 | MLVMS_P03355_3mutA_WS |
| PAPGGSEAAAK | 12,037 | AVIRE_P03360_3mutA |
| GGGGSGGGGSGGGGSGGGGSGGGGSGGGGS | 12,038 | AVIRE_P03360_3mutA |
| EAAAKGGGGSEAAAK | 12,039 | MLVCB_P08361_3mutA |
| AEAAAKEAAAKEAAAKEAAAKALEAEAAAKEAAAKEAAAKEAAAKA | 12,040 | WMSV_P03359_3mutA |
| GSS | | MLVMS_P03355_PLV919 |
| GSSGSSGSSGSS | 12,042 | MLVMS_P03355_PLV919 |
| GSSPAPEAAAK | 12,043 | XMRV6_A1Z651_3mutA |
| GGSPAPEAAAK | 12,044 | MLVFF_P26809_3mutA |
| GGGEAAAKGGS | 12,045 | MLVFF_P26809_3mutA |
| EAAAKEAAAKEAAAKEAAAKEAAAK | 12,046 | PERV_Q4VFZ2_3mutA_WS |
| GGGGGGGG | 12,047 | PERV_Q4VFZ2_3mut |
| GGGPAP | 12,048 | MLVCB_P08361_3mutA |
| PAPAPAPAPAPAP | 12,049 | MLVCB_P08361_3mutA |
| GGSGGSGGSGGSGGSGGS | 12,050 | MLVCB_P08361_3mutA |
| PAP | | MLVMS_P03355_3mutA_WS |
| GGSGGSGGSGGSGGSGGS | 12,052 | PERV_Q4VFZ2_3mutA_WS |
| PAPAPAPAPAPAP | 12,053 | MLVMS_P03355_PLV919 |
| EAAAKPAPGSS | 12,054 | MLVMS_P03355_3mutA_WS |
| EAAAKEAAAKEAAAKEAAAK | 12,055 | MLVMS_P03355_3mutA_WS |
| EAAAKGGS | 12,056 | MLVMS_P03355_3mutA_WS |
| GGGGSEAAAKGGGGS | 12,057 | MLVFF_P26809_3mutA |
| EAAAKPAPGSS | 12,058 | MLVFF_P26809_3mutA |
| GGGGSGGGGSGGGGSGGGGS | 12,059 | MLVMS_P03355_PLV919 |
| EAAAKGGGGGS | 12,060 | MLVMS_P03355_PLV919 |
| GGSPAP | 12,061 | XMRV6_A1Z651_3mutA |
| EAAAKGGGPAP | 12,062 | MLVMS_P03355_PLV919 |
| EAAAKEAAAKEAAAKEAAAKEAAAK | 12,063 | MLVFF_P26809_3mutA |
| PAP | | MLVCB_P08361_3mutA |
| EAAAK | 12,065 | XMRV6_A1Z651_3mutA |
| GGSGSSPAP | 12,066 | PERV_Q4VFZ2_3mutA_WS |
| GSSGSSGSSGSSGSSGSS | 12,067 | MLVMS_P03355_PLV919 |
| GSSEAAAKGGG | 12,068 | MLVAV_P03356_3mutA |
| GGGEAAAKGGS | 12,069 | XMRV6_A1Z651_3mutA |
| EAAAKGGGGSEAAAK | 12,070 | MLVAV_P03356_3mutA |
| GGGGSGGGGSGGGGS | 12,071 | MLVFF_P26809_3mutA |
| GGGGSGGGGSGGGGSGGGGS | 12,072 | AVIRE_P03360_3mutA |
| SGSETPGTSESATPES | 12,073 | AVIRE_P03360_3mutA |
| GGGEAAAKPAP | 12,074 | MLVFF_P26809_3mutA |
| EAAAKGSSGGG | 12,075 | MLVMS_P03355_3mutA_WS |
| EAAAKEAAAKEAAAKEAAAKEAAAK | 12,076 | WMSV_P03359_3mut |
| GGSGGSGGSGGS | 12,077 | XMRV6_A1Z651_3mutA |
| GGSEAAAKPAP | 12,078 | MLVFF_P26809_3mutA |
| EAAAKGSSGGG | 12,079 | XMRV6_A1Z651_3mutA |
| GGGGS | 12,080 | MLVFF_P26809_3mutA |
| GGGEAAAKGSS | 12,081 | MLVMS_P03355_PLV919 |
| PAPAPAPAPAPAP | 12,082 | MLVAV_P03356_3mutA |
| GGGGSGGGGSGGGGSGGGGS | 12,083 | MLVCB_P08361_3mutA |
| GGGEAAAKGSS | 12,084 | MLVCB_P08361_3mutA |
| PAPGGSGSS | 12,085 | MLVFF_P26809_3mutA |
| GSAGSAAGSGEF | 12,086 | MLVCB_P08361_3mutA |
| PAPGGSEAAAK | 12,087 | MLVMS_P03355_3mutA_WS |
| GGSGSS | 12,088 | XMRV6_A1Z651_3mutA |
| PAPGGGGSS | 12,089 | MLVMS_P03355_PLV919 |
| GSSGSSGSS | 12,090 | XMRV6_A1Z651_3mut |
| AEAAAKEAAAKEAAAKEAAAKALEAEAAAKEAAAKEAAAKEAAAKA | 12,091 | MLVMS_P03355_3mutA_WS |
| EAAAK | 12,092 | MLVMS_P03355_PLV919 |
| GSSGSSGSSGSS | 12,093 | MLVFF_P26809_3mutA |
| PAPGGGGSS | 12,094 | MLVCB_P08361_3mutA |
| GGGEAAAKGGS | 12,095 | MLVCB_P08361_3mutA |
| PAPGGGEAAAK | 12,096 | MLVMS_P03355_PLV919 |
| GGGGGSPAP | 12,097 | XMRV6_A1Z651_3mutA |
| EAAAKGGS | 12,098 | XMRV6_A1Z651_3mutA |
| EAAAKGSSPAP | 12,099 | XMRV6_A1Z651_3mut |
| PAPEAAAK | 12,100 | MLVAV_P03356_3mutA |
| GGSGGSGGSGGS | 12,101 | MLVMS_P03355_3mutA_WS |
| GGGPAPGGS | 12,102 | MLVMS_P03355_PLV919 |
| GSSGSSGSSGSS | 12,103 | PERV_Q4VFZ2_3mutA_WS |
| EAAAKPAPGGS | 12,104 | MLVCB_P08361_3mutA |
| GSSGSS | 12,105 | MLVFF_P26809_3mutA |
| EAAAKEAAAKEAAAKEAAAK | 12,106 | MLVCB_P08361_3mutA |
| EAAAKEAAAKEAAAKEAAAK | 12,107 | FLV_P10273_3mutA |
| GSS | | MLVFF_P26809_3mutA |
| EAAAKEAAAK | 12,109 | MLVMS_P03355_3mutA_WS |
| PAPEAAAKGGG | 12,110 | MLVAV_P03356_3mutA |
| GGSGSSEAAAK | 12,111 | MLVFF_P26809_3mutA |
| EAAAKEAAAKEAAAKEAAAKEAAAK | 12,112 | PERV_Q4VFZ2 |
| GSSEAAAKPAP | 12,113 | AVIRE_P03360_3mutA |
| EAAAKEAAAKEAAAKEAAAKEAAAK | 12,114 | MLVCB_P08361_3mutA |
| EAAAKGGG | 12,115 | MLVFF_P26809_3mutA |
| GSSPAPGGG | 12,116 | MLVCB_P08361_3mutA |
| GGGPAPGSS | 12,117 | MLVMS_P03355_PLV919 |
| GGGGGS | 12,118 | MLVMS_P03355_3mutA_WS |
| EAAAKEAAAKEAAAKEAAAKEAAAKEAAAK | 12,119 | PERV_Q4VFZ2_3mut |
| GGGGSGGGGSGGGGSGGGGSGGGGS | 12,120 | WMSV_P03359_3mutA |
| EAAAKEAAAKEAAAK | 12,121 | PERV_Q4VFZ2_3mut |
| PAPAPAPAP | 12,122 | MLVCB_P08361_3mutA |
| GSSGSSGSSGSSGSS | 12,123 | PERV_Q4VFZ2_3mut |
| GGGGSSEAAAK | 12,124 | MLVMS_P03355_3mutA_WS |
| GGSGGSGGSGGS | 12,125 | MLVCB_P08361_3mutA |
| PAPEAAAKGGS | 12,126 | MLVCB_P08361_3mutA |
| EAAAKEAAAKEAAAKEAAAKEAAAKEAAAK | 12,127 | MLVCB_P08361_3mutA |
| EAAAKGGGGSEAAAK | 12,128 | MLVMS_P03355_PLV919 |
| EAAAKGGGGSEAAAK | 12,129 | MLVMS_P03355_3mutA_WS |
| EAAAKGGGPAP | 12,130 | XMRV6_A1Z651_3mut |
| EAAAKEAAAKEAAAKEAAAKEAAAK | 12,131 | MLVMS_P03355_3mutA_WS |
| AEAAAKEAAAKEAAAKEAAAKALEAEAAAKEAAAKEAAAKEAAAKA | 12,132 | FLV_P10273_3mutA |
| GGSEAAAKGGG | 12,133 | MLVMS_P03355_3mutA_WS |
| GGGGSGGGGSGGGGSGGGGSGGGGSGGGGS | 12,134 | KORV_Q9TTC1-Pro_3mutA |
| GGGPAPGGS | 12,135 | MLVCB_P08361_3mutA |
| PAPAPAPAPAPAP | 12,136 | XMRV6_A1Z651_3mutA |
| GGSGSSGGG | 12,137 | XMRV6_A1Z651_3mutA |
| GGSGSSGGG | 12,138 | MLVCB_P08361_3mutA |
| GGGEAAAKGGS | 12,139 | MLVMS_P03355_3mutA_WS |
| EAAAK | 12,140 | MLVCB_P08361_3mutA |
| GGSPAPGSS | 12,141 | MLVMS_P03355_3mutA_WS |
| GGGGSSEAAAK | 12,142 | PERV_Q4VFZ2_3mut |
| PAPAPAPAPAP | 12,143 | MLVBM_Q7SVK7_3mut |
| EAAAKEAAAKEAAAKEAAAK | 12,144 | MLVAV_P03356_3mutA |
| GGGGGSGSS | 12,145 | MLVCB_P08361_3mutA |
| EAAAKGSSPAP | 12,146 | MLVMS_P03355_3mutA_WS |
| PAPAPAPAPAPAP | 12,147 | MLVMS_P03355_3mutA_WS |
| GSSGGGGGS | 12,148 | MLVMS_P03355_3mutA_WS |
| PAPGSSGGG | 12,149 | MLVMS_P03355_PLV919 |
| GGSGGGPAP | 12,150 | MLVCB_P08361_3mutA |
| GGGGGGG | 12,151 | MLVCB_P08361_3mutA |
| GSSGSSGSSGSSGSSGSS | 12,152 | MLVCB_P08361_3mutA |
| GGGPAPGGS | 12,153 | MLVFF_P26809_3mutA |
| EAAAKGGSGGG | 12,154 | PERV_Q4VFZ2_3mut |
| EAAAKGGGGSS | 12,155 | MLVMS_P03355_3mutA_WS |
| GSSGSSGSSGSSGSSGSS | 12,156 | MLVMS_P03355_3mut |
| GGGGSGGGGSGGGGSGGGGS | 12,157 | MLVBM_Q7SVK7_3mutA_WS |
| PAPAPAPAPAP | 12,158 | MLVMS_P03355_PLV919 |
| GGGEAAAKGGS | 12,159 | MLVMS_P03355_PLV919 |
| AEAAAKEAAAKEAAAKEAAAKALEAEAAAKEAAAKEAAAKEAAAKA | 12,160 | MLVMS_P03355_3mut |
| GSAGSAAGSGEF | 12,161 | MLVMS_P03355_3mutA_WS |
| GSSGSSGSSGSSGSS | 12,162 | MLVFF_P26809_3mutA |
| EAAAKGGSGSS | 12,163 | MLVFF_P26809_3mutA |
| PAPGGG | 12,164 | MLVFF_P26809_3mutA |
| GGGPAPGSS | 12,165 | XMRV6_A1Z651_3mutA |
| PAPEAAAKGGS | 12,166 | AVIRE_P03360_3mutA |
| PAPGGGEAAAK | 12,167 | MLVFF_P26809_3mut |
| GGGGSSEAAAK | 12,168 | MLVCB_P08361_3mutA |
| EAAAK | 12,169 | MLVMS_P03355_PLV919 |
| GGGGSGGGGSGGGGSGGGGSGGGGSGGGGS | 12,170 | BAEVM_P10272_3mutA |
| GGSGGGEAAAK | 12,171 | MLVMS_P03355_PLV919 |
| AEAAAKEAAAKEAAAKEAAAKALEAEAAAKEAAAKEAAAKEAAAKA | 12,172 | MLVFF_P26809_3mutA |
| GSSPAPGGS | 12,173 | XMRV6_A1Z651_3mutA |
| GGSGGGPAP | 12,174 | MLVMS_P03355_PLV919 |
| EAAAK | 12,175 | AVIRE_P03360_3mutA |
| GSS | | XMRV6_A1Z651_3mutA |
| GGSGGSGGS | 12,177 | MLVFF_P26809_3mutA |
| EAAAKEAAAKEAAAKEAAAK | 12,178 | AVIRE_P03360_3mut |
| PAPEAAAKGGG | 12,179 | PERV_Q4VFZ2_3mutA_WS |
| GGGGGSEAAAK | 12,180 | BAEVM_P10272_3mutA |
| GGSGSSGGG | 12,181 | MLVMS_P03355_3mutA_WS |
| GGGGGGG | 12,182 | MLVMS_P03355_3mutA_WS |
| GSSEAAAKPAP | 12,183 | PERV_Q4VFZ2_3mut |
| GGGGGSEAAAK | 12,184 | WMSV_P03359_3mut |
| GGGGSGGGGSGGGGSGGGGSGGGGS | 12,185 | MLVFF_P26809_3mut |
| GGGEAAAKGGS | 12,186 | AVIRE_P03360_3mutA |
| GGSPAPGGG | 12,187 | AVIRE_P03360_3mutA |
| GSAGSAAGSGEF | 12,188 | MLVAV_P03356_3mutA |
| EAAAK | 12,189 | MLVAV_P03356_3mutA |
| EAAAKPAPGSS | 12,190 | WMSV_P03359_3mutA |
| EAAAKEAAAKEAAAKEAAAKEAAAKEAAAK | 12,191 | PERV_Q4VFZ2_3mutA_WS |
| GGSEAAAKPAP | 12,192 | MLVCB_P08361_3mutA |
| PAPAPAPAPAPAP | 12,193 | MLVBM_Q7SVK7_3mutA_WS |
| GGSPAPGGG | 12,194 | MLVMS_P03355_3mutA_WS |
| GGSEAAAKGGG | 12,195 | MLVMS_P03355_3mut |
| GGSGGSGGSGGS | 12,196 | MLVFF_P26809_3mutA |
| EAAAKEAAAKEAAAKEAAAKEAAAKEAAAK | 12,197 | MLVFF_P26809_3mutA |
| GGG | | AVIRE_P03360_3mutA |
| AEAAAKEAAAKEAAAKEAAAKALEAEAAAKEAAAKEAAAKEAAAKA | 12,199 | PERV_Q4VFZ2_3mut |
| GGSGGSGGSGGS | 12,200 | MLVMS_P03355_3mutA_WS |
| GGGEAAAK | 12,201 | MLVCB_P08361_3mutA |
| GSSGSSGSSGSSGSSGSS | 12,202 | MLVMS_P03355_3mutA_WS |
| GSSGGGPAP | 12,203 | MLVMS_P03355_3mutA_WS |
| GSSEAAAKPAP | 12,204 | MLVFF_P26809_3mutA |
| EAAAKEAAAK | 12,205 | MLVMS_P03355_PLV919 |
| GGGGSGGGGSGGGGSGGGGSGGGGSGGGGS | 12,206 | MLVCB_P08361_3mut |
| GGGGGG | 12,207 | MLVMS_P03355_3mutA_WS |
| GGSGSSGGG | 12,208 | MLVFF_P26809_3mutA |
| GSSGGGEAAAK | 12,209 | PERV_Q4VFZ2_3mutA_WS |
| PAPAPAPAPAP | 12,210 | PERV_Q4VFZ2_3mut |
| EAAAKEAAAKEAAAKEAAAKEAAAKEAAAK | 12,211 | SFV3L_P27401_2mut |
| EAAAKGGSGGG | 12,212 | BAEVM_P10272_3mutA |
| GGGGSSPAP | 12,213 | PERV_Q4VFZ2_3mutA_WS |
| GGGEAAAKPAP | 12,214 | MLVMS_P03355_PLV919 |
| GGSGGGPAP | 12,215 | BAEVM_P10272_3mutA |
| PAPGSSGGS | 12,216 | MLVMS_P03355_PLV919 |
| GGSGGGPAP | 12,217 | MLVMS_P03355_3mutA_WS |
| EAAAKGGSPAP | 12,218 | PERV_Q4VFZ2_3mutA_WS |
| EAAAKGGSGGG | 12,219 | MLVMS_P03355_3mutA_WS |
| PAPGSSGGG | 12,220 | MLVFF_P26809_3mutA |
| GSSEAAAKGGS | 12,221 | MLVFF_P26809_3mutA |
| PAPGSSEAAAK | 12,222 | MLVFF_P26809_3mutA |
| EAAAKGSSPAP | 12,223 | KORV_Q9TTC1-Pro_3mutA |
| EAAAKEAAAKEAAAKEAAAKEAAAK | 12,224 | MLVBM_Q7SVK7_3mutA_WS |
| PAPGSSEAAAK | 12,225 | MLVMS_P03355_PLV919 |
| EAAAKGSSGGG | 12,226 | MLVMS_P03355_3mutA_WS |
| EAAAKGGGGGS | 12,227 | AVIRE_P03360_3mutA |
| EAAAKEAAAKEAAAK | 12,228 | MLVMS_P03355_PLV919 |
| PAPAPAPAPAPAP | 12,229 | MLVFF_P26809_3mutA |
| GGGGSGGGGSGGGGS | 12,230 | MLVCB_P08361_3mutA |
| PAPGGSEAAAK | 12,231 | MLVCB_P08361_3mutA |
| PAPGSSEAAAK | 12,232 | MLVBM_Q7SVK7_3mutA_WS |
| PAPEAAAKGSS | 12,233 | AVIRE_P03360_3mutA |
| GGSPAPGSS | 12,234 | WMSV_P03359_3mutA |
| PAPGGSGGG | 12,235 | MLVMS_P03355_PLV919 |
| EAAAKGGSGSS | 12,236 | MLVMS_P03355_3mutA_WS |
| GGSGGG | 12,237 | MLVFF_P26809_3mutA |
| GGSEAAAKGSS | 12,238 | KORV_Q9TTC1_3mutA |
| AEAAAKEAAAKEAAAKEAAAKALEAEAAAKEAAAKEAAAKEAAAKA | 12,239 | MLVCB_P08361_3mutA |
| PAPAPAPAPAPAP | 12,240 | PERV_Q4VFZ2_3mutA_WS |
| PAPEAAAK | 12,241 | MLVMS_P03355_3mutA_WS |
| GGSEAAAKGGG | 12,242 | MLVMS_P03355_PLV919 |
| GSSPAP | 12,243 | MLVMS_P03355_3mutA_WS |
| GGGGSS | 12,244 | MLVMS_P03355_PLV919 |
| GGGEAAAKPAP | 12,245 | AVIRE_P03360_3mutA |
| EAAAKPAPGGS | 12,246 | MLVAV_P03356_3mutA |
| EAAAKGGGPAP | 12,247 | MLVAV_P03356_3mutA |
| PAPGGSEAAAK | 12,248 | BAEVM_P10272_3mutA |
| PAPGGSGSS | 12,249 | MLVMS_P03355_3mutA_WS |
| PAPGGSGSS | 12,250 | AVIRE_P03360_3mutA |
| GGSGGGPAP | 12,251 | MLVMS_P03355_3mutA_WS |
| EAAAKEAAAKEAAAKEAAAK | 12,252 | BAEVM_P10272_3mutA |
| GGGGSGGGGSGGGGSGGGGSGGGGS | 12,253 | MLVMS_P03355_PLV919 |
| GGGGSSPAP | 12,254 | MLVCB_P08361_3mutA |
| GSSGGGPAP | 12,255 | MLVFF_P26809_3mutA |
| GGGGSSGGS | 12,256 | MLVMS_P03355_PLV919 |
| GGSGGG | 12,257 | MLVCB_P08361_3mutA |
| GSSGGGGGS | 12,258 | MLVMS_P03355_PLV919 |
| SGGSSGGSSGSETPGTSESATPESSGGSSGGSS | 12,259 | XMRV6_A1Z651_3mutA |
| GGGGGSGSS | 12,260 | KORV_Q9TTC1_3mut |
| GGGEAAAKGGS | 12,261 | BAEVM_P10272_3mutA |
| GGSGGG | 12,262 | BAEVM_P10272_3mutA |
| PAPAPAP | 12,263 | KORV_Q9TTC1-Pro_3mut |
| AEAAAKEAAAKEAAAKEAAAKALEAEAAAKEAAAKEAAAKEAAAKA | 12,264 | SFV3L_P27401_2mutA |
| AEAAAKEAAAKEAAAKEAAAKALEAEAAAKEAAAKEAAAKEAAAKA | 12,265 | MLVBM_Q7SVK7_3mutA_WS |
| GSSGSSGSSGSSGSS | 12,266 | MLVMS_P03355_3mutA_WS |
| GSSGGGEAAAK | 12,267 | MLVMS_P03355_3mutA_WS |
| GSSGGSEAAAK | 12,268 | MLVFF_P26809_3mutA |
| PAP | | MLVMS_P03355_PLV919 |
| EAAAKGGGGSEAAAK | 12,270 | MLVBM_Q7SVK7_3mutA_WS |
| PAPAP | 12,271 | AVIRE_P03360_3mutA |
| PAP | | MLVFF_P26809_3mutA |
| GSSGGG | 12,273 | MLVMS_P03355_3mut |
| GSSPAPGGS | 12,274 | MLVFF_P26809_3mutA |
| PAPAPAPAP | 12,275 | XMRV6_A1Z651_3mutA |
| EAAAKGSSGGS | 12,276 | PERV_Q4VFZ2_3mut |
| PAPEAAAKGGG | 12,277 | KORV_Q9TTC1-Pro_3mutA |
| PAPGGS | 12,278 | MLVCB_P08361_3mutA |
| EAAAKGGG | 12,279 | MLVCB_P08361_3mutA |
| GSSEAAAKPAP | 12,280 | MLVMS_P03355_PLV919 |
| PAPGGS | 12,281 | MLVFF_P26809_3mutA |
| EAAAKGGS | 12,282 | MLVCB_P08361_3mutA |
| EAAAKEAAAKEAAAKEAAAKEAAAKEAAAK | 12,283 | FLV_P10273_3mutA |
| PAPGGSEAAAK | 12,284 | MLVAV_P03356_3mutA |
| GSS | | MLVCB_P08361_3mutA |
| GSSGSSGSSGSS | 12,286 | AVIRE_P03360_3mutA |
| GSSGSSGSS | 12,287 | MLVFF_P26809_3mutA |
| GSSGGG | 12,288 | MLVMS_P03355_PLV919 |
| EAAAK | 12,289 | MLVFF_P26809_3mutA |
| GGSPAPEAAAK | 12,290 | MLVCB_P08361_3mutA |
| GGSGSS | 12,291 | MLVCB_P08361_3mutA |
| GSSPAPGGG | 12,292 | MLVMS_P03355_PLV919 |
| EAAAKEAAAKEAAAKEAAAKEAAAK | 12,293 | MLVAV_P03356_3mutA |
| EAAAKGSSPAP | 12,294 | FLV_P10273_3mutA |
| GGGGSS | 12,295 | XMRV6_A1Z651_3mutA |
| GGSPAPGSS | 12,296 | MLVMS_P03355_PLV919 |
| EAAAKEAAAKEAAAKEAAAKEAAAK | 12,297 | MLVMS_P03355_3mutA_WS |
| PAPEAAAKGGG | 12,298 | FLV_P10273_3mutA |
| EAAAKPAPGGS | 12,299 | XMRV6_A1Z651_3mut |
| PAPAP | 12,300 | BAEVM_P10272_3mutA |
| EAAAKEAAAKEAAAKEAAAK | 12,301 | MLVMS_P03355_PLV919 |
| GSSPAPGGG | 12,302 | MLVMS_P03355_PLV919 |
| EAAAKGGGPAP | 12,303 | KORV_Q9TTC1_3mutA |
| PAPEAAAK | 12,304 | MLVMS_P03355_PLV919 |
| PAPGGGEAAAK | 12,305 | PERV_Q4VFZ2_3mutA_WS |
| EAAAKGSSGGS | 12,306 | MLVMS_P03355_3mutA_WS |
| EAAAKEAAAKEAAAK | 12,307 | MLVMS_P03355_PLV919 |
| GSSEAAAK | 12,308 | MLVMS_P03355_3mutA_WS |
| GSSGSSGSSGSS | 12,309 | MLVMS_P03355_3mutA_WS |
| GGGGSGGGGSGGGGSGGGGS | 12,310 | MLVMS_P03355_3mutA_WS |
| EAAAKGGGGSEAAAK | 12,311 | MLVMS_P03355_3mut |
| GGS | | MLVCB_P08361_3mutA |
| GGGGSGGGGSGGGGSGGGGSGGGGSGGGGS | 12,313 | XMRV6_A1Z651_3mutA |
| GGSGSSPAP | 12,314 | MLVCB_P08361_3mutA |
| GGGGSGGGGSGGGGS | 12,315 | XMRV6_A1Z651_3mutA |
| PAPAPAPAPAP | 12,316 | BAEVM_P10272_3mutA |
| PAPAPAPAPAP | 12,317 | MLVMS_P03355_3mutA_WS |
| EAAAKEAAAKEAAAKEAAAK | 12,318 | MLVBM_Q7SVK7_3mut |
| GGGGSGGGGSGGGGSGGGGSGGGGS | 12,319 | BAEVM_P10272_3mutA |
| GGSGGSGGS | 12,320 | MLVMS_P03355_3mutA_WS |
| EAAAKPAPGSS | 12,321 | MLVMS_P03355_PLV919 |
| GSS | | MLVMS_P03355_3mutA_WS |
| PAPEAAAKGGS | 12,323 | MLVMS_P03355_3mutA_WS |
| GGGPAPGGS | 12,324 | MLVMS_P03355_3mutA_WS |
| EAAAKGGGGSS | 12,325 | MLVAV_P03356_3mutA |
| GSSGSSGSSGSSGSS | 12,326 | MLVFF_P26809_3mut |
| SGSETPGTSESATPES | 12,327 | PERV_Q4VFZ2_3mut |
| GGSEAAAKGGG | 12,328 | MLVMS_P03355_3mut |
| GSSGSSGSSGSSGSSGSS | 12,329 | AVIRE_P03360_3mutA |
| PAPAPAPAPAPAP | 12,330 | AVIRE_P03360_3mut |
| GGSGGS | 12,331 | XMRV6_A1Z651_3mutA |
| PAPGSSEAAAK | 12,332 | MLVCB_P08361_3mut |
| GGSPAPEAAAK | 12,333 | PERV_Q4VFZ2_3mut |
| EAAAKGGGGGS | 12,334 | MLVCB_P08361_3mutA |
| GGSGGSGGSGGS | 12,335 | MLVMS_P03355_PLV919 |
| GGGGSSEAAAK | 12,336 | MLVMS_P03355_PLV919 |
| GSSEAAAKGGG | 12,337 | MLVFF_P26809_3mutA |
| PAPGGS | 12,338 | MLVMS_P03355_3mutA_WS |
| EAAAKGGSGGG | 12,339 | MLVCB_P08361_3mutA |
| EAAAKGGG | 12,340 | PERV_Q4VFZ2_3mut |
| PAPGGS | 12,341 | XMRV6_A1Z651_3mutA |
| GSSPAPGGG | 12,342 | XMRV6_A1Z651_3mutA |
| PAPEAAAKGGG | 12,343 | MLVMS_P03355_3mutA_WS |
| GSSEAAAKGGG | 12,344 | PERV_Q4VFZ2_3mutA_WS |
| PAPGGSEAAAK | 12,345 | XMRV6_A1Z651_3mutA |
| GGGGGS | 12,346 | MLVMS_P03355_3mutA_WS |
| GGSPAPEAAAK | 12,347 | MLVMS_P03355_3mutA_WS |
| GGGPAP | 12,348 | MLVFF_P26809_3mutA |
| PAPGSSGGG | 12,349 | XMRV6_A1Z651_3mutA |
| PAPGSSGGG | 12,350 | MLVBM_Q7SVK7_3mutA_WS |
| GGGEAAAKGSS | 12,351 | MLVMS_P03355_3mutA_WS |
| GSSEAAAKGGS | 12,352 | MLVCB_P08361_3mutA |
| PAPGGSGSS | 12,353 | MLVCB_P08361_3mutA |
| EAAAKGGGGSEAAAK | 12,354 | BAEVM_P10272_3mutA |
| PAPAPAP | 12,355 | PERV_Q4VFZ2_3mutA_WS |
| GGGGGG | 12,356 | MLVAV_P03356_3mutA |
| GSSPAPEAAAK | 12,357 | MLVCB_P08361_3mutA |
| GGSGGSGGS | 12,358 | MLVMS_P03355_3mutA_WS |
| GSSGSSGSSGSSGSS | 12,359 | XMRV6_A1Z651_3mut |
| GGGPAPGGS | 12,360 | XMRV6_A1Z651_3mutA |
| GGGPAPEAAAK | 12,361 | BAEVM_P10272_3mutA |
| GGSGGG | 12,362 | AVIRE_P03360_3mutA |
| SGSETPGTSESATPES | 12,363 | PERV_Q4VFZ2_3mutA_WS |
| EAAAKGSSPAP | 12,364 | MLVMS_P03355_PLV919 |
| GSSEAAAK | 12,365 | XMRV6_A1Z651_3mut |
| GSSGGSGGG | 12,366 | MLVFF_P26809_3mutA |
| EAAAKEAAAKEAAAKEAAAKEAAAK | 12,367 | WMSV_P03359_3mutA |
| GGGGSEAAAKGGGGS | 12,368 | MLVMS_P03355_PLV919 |
| PAPGGGGSS | 12,369 | MLVMS_P03355_3mutA_WS |
| SGSETPGTSESATPES | 12,370 | MLVMS_P03355_3mutA_WS |
| GGSPAPEAAAK | 12,371 | KORV_Q9TTC1-Pro_3mutA |
| GSSEAAAKGGG | 12,372 | MLVMS_P03355_3mutA_WS |
| GSSEAAAK | 12,373 | WMSV_P03359_3mutA |
| GGGGSEAAAKGGGGS | 12,374 | AVIRE_P03360_3mutA |
| GSS | | WMSV_P03359_3mutA |
| PAPGGSEAAAK | 12,376 | MLVFF_P26809_3mutA |
| GGGGS | 12,377 | MLVMS_P03355_3mutA_WS |
| GGGPAP | 12,378 | MLVMS_P03355_3mutA_WS |
| EAAAKEAAAKEAAAKEAAAKEAAAKEAAAK | 12,379 | MLVMS_P03355_3mutA_WS |
| EAAAKPAPGSS | 12,380 | PERV_Q4VFZ2_3mut |
| EAAAKPAPGSS | 12,381 | MLVCB_P08361_3mutA |
| GGGGGG | 12,382 | WMSV_P03359_3mutA |
| EAAAKPAPGGS | 12,383 | MLVMS_P03355_PLV919 |
| PAPGGGEAAAK | 12,384 | PERV_Q4VFZ2_3mut |
| EAAAKEAAAKEAAAKEAAAKEAAAK | 12,385 | AVIRE_P03360_3mutA |
| GSSEAAAKPAP | 12,386 | XMRV6_A1Z651_3mutA |
| PAPGGSEAAAK | 12,387 | MLVBM_Q7SVK7_3mutA_WS |
| PAPGSS | 12,388 | MLVCB_P08361_3mutA |
| EAAAKGGG | 12,389 | MLVMS_P03355_3mutA_WS |
| EAAAKPAP | 12,390 | MLVCB_P08361_3mutA |
| PAPEAAAKGGS | 12,391 | MLVBM_Q7SVK7_3mutA_WS |
| GGSPAPGGG | 12,392 | MLVCB_P08361_3mutA |
| PAPGGSGSS | 12,393 | WMSV_P03359_3mutA |
| EAAAKEAAAKEAAAKEAAAKEAAAKEAAAK | 12,394 | MLVMS_P03355_PLV919 |
| GGSGGGPAP | 12,395 | MLVMS_P03355_PLV919 |
| AEAAAKEAAAKEAAAKEAAAKALEAEAAAKEAAAKEAAAKEAAAKA | 12,396 | MLVMS_P03355 |
| PAPEAAAKGSS | 12,397 | MLVCB_P08361_3mutA |
| EAAAKGSS | 12,398 | MLVMS_P03355_3mutA_WS |
| GGSGGS | 12,399 | MLVMS_P03355_3mutA_WS |
| EAAAKEAAAKEAAAKEAAAKEAAAK | 12,400 | BAEVM_P10272_3mutA |
| GGGGSEAAAKGGGGS | 12,401 | FLV_P10273_3mutA |
| GGSEAAAKGGG | 12,402 | MLVCB_P08361_3mutA |
| GSSGSSGSSGSSGSS | 12,403 | BAEVM_P10272_3mutA |
| GGGGSGGGGSGGGGSGGGGSGGGGSGGGGS | 12,404 | MLVFF_P26809_3mutA |
| EAAAKGGG | 12,405 | PERV_Q4VFZ2_3mut |
| GGGGGSEAAAK | 12,406 | MLVCB_P08361_3mutA |
| EAAAKPAPGGS | 12,407 | MLVMS_P03355_3mutA_WS |
| GGGGGSGSS | 12,408 | XMRV6_A1Z651_3mutA |
| PAPGSSEAAAK | 12,409 | MLVMS_P03355_3mutA_WS |
| GSSEAAAKPAP | 12,410 | MLVCB_P08361_3mutA |
| EAAAKGSSPAP | 12,411 | MLVAV_P03356_3mutA |
| GGGPAPGGS | 12,412 | WMSV_P03359_3mutA |
| GGSPAP | 12,413 | MLVMS_P03355_3mutA_WS |
| GGSEAAAKGGG | 12,414 | MLVMS_P03355_3mutA_WS |
| GGGGGGGG | 12,415 | MLVFF_P26809_3mutA |
| GGGGSGGGGSGGGGSGGGGSGGGGSGGGGS | 12,416 | MLVMS_P03355_3mutA_WS |
| GGGGSGGGGSGGGGSGGGGSGGGGSGGGGS | 12,417 | MLVBM_Q7SVK7_3mutA_WS |
| GSSPAPGGG | 12,418 | MLVAV_P03356_3mutA |
| GGGGGG | 12,419 | AVIRE_P03360_3mutA |
| GSSGGS | 12,420 | MLVMS_P03355_3mutA_WS |
| GGSPAPGSS | 12,421 | MLVFF_P26809_3mutA |
| PAPEAAAKGGG | 12,422 | PERV_Q4VFZ2_3mut |
| EAAAKGGGPAP | 12,423 | MLVFF_P26809_3mutA |
| GGGEAAAKGGS | 12,424 | MLVMS_P03355_PLV919 |
| GGSGSSPAP | 12,425 | MLVFF_P26809_3mutA |
| SGSETPGTSESATPES | 12,426 | WMSV_P03359_3mutA |
| PAPGGSEAAAK | 12,427 | MLVBM_Q7SVK7_3mutA_WS |
| GGSGGG | 12,428 | MLVMS_P03355_PLV919 |
| GGGGSSPAP | 12,429 | PERV_Q4VFZ2_3mut |
| GGGEAAAKGSS | 12,430 | MLVAV_P03356_3mutA |
| PAPAPAPAPAPAP | 12,431 | MLVMS_P03355_3mutA_WS |
| EAAAKGGGGSEAAAK | 12,432 | PERV_Q4VFZ2 |
| EAAAKEAAAKEAAAKEAAAKEAAAK | 12,433 | MLVMS_P03355_PLV919 |
| GGGGGSEAAAK | 12,434 | PERV_Q4VFZ2_3mut |
| PAPGSSEAAAK | 12,435 | MLVCB_P08361_3mutA |
| GSAGSAAGSGEF | 12,436 | PERV_Q4VFZ2_3mutA_WS |
| EAAAKGGGGSEAAAK | 12,437 | MLVFF_P26809_3mutA |
| GGSPAPGGG | 12,438 | PERV_Q4VFZ2_3mutA_WS |
| GSSEAAAKGGG | 12,439 | AVIRE_P03360_3mutA |
| GGGEAAAKPAP | 12,440 | MLVMS_P03355_3mutA_WS |
| GGGPAP | 12,441 | AVIRE_P03360_3mutA |
| GGSEAAAK | 12,442 | MLVCB_P08361_3mutA |
| SGGSSGGSSGSETPGTSESATPESSGGSSGGSS | 12,443 | PERV_Q4VFZ2_3mut |
| EAAAKPAPGGS | 12,444 | MLVBM_Q7SVK7_3mutA_WS |
| AEAAAKEAAAKEAAAKEAAAKALEAEAAAKEAAAKEAAAKEAAAKA | 12,445 | XMRV6_A1Z651_3mut |
| GGGGGGGG | 12,446 | MLVCB_P08361_3mutA |
| PAPGSS | 12,447 | PERV_Q4VFZ2_3mut |
| EAAAK | 12,448 | PERV_Q4VFZ2_3mut |
| GSAGSAAGSGEF | 12,449 | MLVMS_P03355_3mutA_WS |
| PAPGGGEAAAK | 12,450 | PERV_Q4VFZ2_3mut |
| EAAAKGSSGGS | 12,451 | MLVFF_P26809_3mut |
| GGGGSEAAAKGGGGS | 12,452 | BAEVM_P10272_3mutA |
| GGGGSGGGGSGGGGS | 12,453 | MLVMS_P03355_PLV919 |
| EAAAKGGGGSEAAAK | 12,454 | BAEVM_P10272_3mut |
| PAPGGGEAAAK | 12,455 | MLVMS_P03355_3mutA_WS |
| GGSEAAAKPAP | 12,456 | MLVMS_P03355_3mutA_WS |
| PAPAP | 12,457 | MLVCB_P08361_3mutA |
| PAPAP | 12,458 | MLVFF_P26809_3mutA |
| GGSPAP | 12,459 | AVIRE_P03360_3mutA |
| EAAAKGSSGGS | 12,460 | MLVCB_P08361_3mutA |
| PAPGSSGGS | 12,461 | AVIRE_P03360_3mutA |
| EAAAKGGGGSEAAAK | 12,462 | XMRV6_A1Z651_3mutA |
| PAPAPAP | 12,463 | BAEVM_P10272_3mutA |
| GGSGGSGGSGGSGGSGGS | 12,464 | MLVMS_P03355_PLV919 |
| GGGGGSGSS | 12,465 | MLVMS_P03355_PLV919 |
| PAPGSSEAAAK | 12,466 | XMRV6_A1Z651_3mut |
| GGSEAAAKPAP | 12,467 | XMRV6_A1Z651_3mutA |
| EAAAKEAAAKEAAAKEAAAK | 12,468 | XMRV6_A1Z651_3mut |
| AEAAAKEAAAKEAAAKEAAAKALEAEAAAKEAAAKEAAAKEAAAKA | 12,469 | WMSV_P03359_3mut |
| GGSGGGEAAAK | 12,470 | XMRV6_A1Z651_3mutA |
| GGGEAAAK | 12,471 | XMRV6_A1Z651_3mutA |
| GGGGSGGGGSGGGGS | 12,472 | MLVMS_P03355_3mutA_WS |
| GGSGGSGGSGGSGGS | 12,473 | MLVFF_P26809_3mutA |
| GSSGGGGGS | 12,474 | MLVMS_P03355_3mut |
| PAPGGSEAAAK | 12,475 | MLVMS_P03355_3mutA_WS |
| GSSGGSPAP | 12,476 | MLVMS_P03355_3mutA_WS |
| SGSETPGTSESATPES | 12,477 | XMRV6_A1Z651_3mutA |
| GGGGSGGGGS | 12,478 | MLVMS_P03355_PLV919 |
| PAPAPAPAPAP | 12,479 | MLVMS_P03355_3mut |
| GSSGSS | 12,480 | XMRV6_A1Z651_3mutA |
| GSSEAAAKPAP | 12,481 | PERV_Q4VFZ2_3mut |
| GGSGSSGGG | 12,482 | MLVMS_P03355_3mutA_WS |
| EAAAKEAAAK | 12,483 | MLVCB_P08361_3mutA |
| GSSGSSGSSGSS | 12,484 | MLVMS_P03355_3mutA_WS |
| GSSPAPGGG | 12,485 | PERV_Q4VFZ2_3mutA_WS |
| EAAAKEAAAKEAAAK | 12,486 | MLVMS_P03355_3mutA_WS |
| AEAAAKEAAAKEAAAKEAAAKALEAEAAAKEAAAKEAAAKEAAAKA | 12,487 | SFV1_P23074_2mutA |
| GGGGSGGGGSGGGGSGGGGSGGGGSGGGGS | 12,488 | MLVMS_P03355_PLV919 |
| GSAGSAAGSGEF | 12,489 | MLVMS_P03355_PLV919 |
| PAPGSSEAAAK | 12,490 | MLVMS_P03355_3mutA_WS |
| GGSEAAAK | 12,491 | MLVMS_P03355_3mutA_WS |
| GSSGSSGSSGSSGSS | 12,492 | PERV_Q4VFZ2_3mutA_WS |
| GGSEAAAKPAP | 12,493 | PERV_Q4VFZ2_3mutA_WS |
| GGSGGSGGS | 12,494 | MLVCB_P08361_3mutA |
| EAAAKGGSGSS | 12,495 | MLVCB_P08361_3mutA |
| GGGGSGGGGSGGGGSGGGGSGGGGS | 12,496 | FLV_P10273_3mutA |
| EAAAKEAAAKEAAAKEAAAK | 12,497 | MLVBM_Q7SVK7_3mutA_WS |
| GGSGSSPAP | 12,498 | BAEVM_P10272_3mutA |
| EAAAKEAAAKEAAAKEAAAKEAAAK | 12,499 | XMRV6_A1Z651_3mutA |
| GGGGSGGGGSGGGGSGGGGSGGGGS | 12,500 | MLVBM_Q7SVK7_3mutA_WS |
| GGSGSS | 12,501 | WMSV_P03359_3mutA |
| PAPEAAAK | 12,502 | MLVCB_P08361_3mutA |
| EAAAKPAP | 12,503 | BAEVM_P10272_3mutA |
| GSSPAP | 12,504 | PERV_Q4VFZ2_3mutA_WS |
| GGGPAP | 12,505 | PERV_Q4VFZ2_3mutA_WS |
| EAAAKGGSGSS | 12,506 | MLVMS_P03355_3mutA_WS |
| EAAAKGGGGSEAAAK | 12,507 | AVIRE_P03360_3mutA |
| GGSGGG | 12,508 | KORV_Q9TTC1-Pro_3mutA |
| GSSPAP | 12,509 | MLVFF_P26809_3mutA |
| GGSGSSEAAAK | 12,510 | BAEVM_P10272_3mutA |
| PAPGSSGGS | 12,511 | BAEVM_P10272_3mutA |
| GGGGGG | 12,512 | MLVFF_P26809_3mutA |
| PAPGGSEAAAK | 12,513 | MLVMS_P03355_PLV919 |
| PAPGGS | 12,514 | MLVMS_P03355_PLV919 |
| GGSGGSGGSGGS | 12,515 | BAEVM_P10272_3mutA |
| GSSPAP | 12,516 | MLVCB_P08361_3mutA |
| PAPAPAPAP | 12,517 | MLVMS_P03355_3mutA_WS |
| GGGGGG | 12,518 | MLVCB_P08361_3mutA |
| GSSGSSGSSGSSGSSGSS | 12,519 | KORV_Q9TTC1-Pro_3mutA |
| GSSEAAAKGGS | 12,520 | BAEVM_P10272_3mutA |
| GGSEAAAK | 12,521 | FLV_P10273_3mutA |
| GGSGGSGGSGGSGGS | 12,522 | KORV_Q9TTC1-Pro_3mutA |
| GSSPAPEAAAK | 12,523 | PERV_Q4VFZ2_3mut |
| GSSGSSGSSGSSGSS | 12,524 | XMRV6_A1Z651_3mutA |
| EAAAKPAPGGS | 12,525 | MLVMS_P03355_3mut |
| SGGSSGGSSGSETPGTSESATPESSGGSSGGSS | 12,526 | FLV_P10273_3mut |
| GGSPAPEAAAK | 12,527 | XMRV6_A1Z651_3mut |
| EAAAKGGSGGG | 12,528 | MLVFF_P26809_3mutA |
| EAAAKEAAAKEAAAKEAAAK | 12,529 | MLVFF_P26809_3mutA |
| GSSPAP | 12,530 | WMSV_P03359_3mutA |
| PAPAPAPAP | 12,531 | MLVAV_P03356_3mutA |
| PAPGGSEAAAK | 12,532 | KORV_Q9TTC1_3mut |
| GGSGSSEAAAK | 12,533 | MLVBM_Q7SVK7_3mutA_WS |
| GSSGGG | 12,534 | MLVCB_P08361_3mutA |
| GGGEAAAKGSS | 12,535 | PERV_Q4VFZ2_3mut |
| PAPGGSGGG | 12,536 | MLVFF_P26809_3mutA |
| AEAAAKEAAAKEAAAKEAAAKALEAEAAAKEAAAKEAAAKEAAAKA | 12,537 | FFV_093209 |
| PAPGGGGSS | 12,538 | MLVMS_P03355_3mutA_WS |
| EAAAKGGS | 12,539 | MLVAV_P03356_3mutA |
| EAAAKEAAAKEAAAKEAAAKEAAAKEAAAK | 12,540 | MLVBM_Q7SVK7_3mutA_WS |
| GGSGGSGGS | 12,541 | WMSV_P03359_3mutA |
| PAPAP | 12,542 | MLVMS_P03355_3mutA_WS |
| GSSGGGEAAAK | 12,543 | MLVAV_P03356_3mutA |
| GGGGSSEAAAK | 12,544 | MLVFF_P26809_3mutA |
| EAAAKGSSGGS | 12,545 | MLVMS_P03355_PLV919 |
| EAAAKGGGGSEAAAK | 12,546 | MLVMS_P03355_3mutA_WS |
| GGGGGGGG | 12,547 | MLVMS_P03355_PLV919 |
| GSSGSSGSS | 12,548 | MLVMS_P03355_PLV919 |
| GGGEAAAKPAP | 12,549 | PERV_Q4VFZ2_3mutA_WS |
| GGGGGSGSS | 12,550 | MLVMS_P03355_3mutA_WS |
| GGGGGGG | 12,551 | MLVMS_P03355_PLV919 |
| GGS | | MLVMS_P03355_PLV919 |
| GSSGGG | 12,553 | MLVMS_P03355_3mutA_WS |
| EAAAKGGSGSS | 12,554 | PERV_Q4VFZ2_3mutA_WS |
| PAPGSSEAAAK | 12,555 | MLVMS_P03355_PLV919 |
| GSSEAAAKPAP | 12,556 | MLVMS_P03355_PLV919 |
| GGSPAPGSS | 12,557 | BAEVM_P10272_3mutA |
| GSAGSAAGSGEF | 12,558 | MLVCB_P08361_3mut |
| GGSPAPGGG | 12,559 | PERV_Q4VFZ2_3mut |
| GGGGSGGGGSGGGGSGGGGS | 12,560 | MLVMS_P03355_3mut |
| GSSGSSGSS | 12,561 | PERV_Q4VFZ2_3mutA_WS |
| EAAAKEAAAKEAAAKEAAAKEAAAKEAAAK | 12,562 | PERV_Q4VFZ2_3mut |
| GGGGSEAAAKGGGGS | 12,563 | MLVCB_P08361_3mutA |
| GGSEAAAKGSS | 12,564 | MLVAV_P03356_3mutA |
| EAAAKGGGGSEAAAK | 12,565 | MLVCB_P08361_3mut |
| EAAAKEAAAKEAAAKEAAAKEAAAKEAAAK | 12,566 | XMRV6_A1Z651_3mutA |
| PAPGGGEAAAK | 12,567 | MLVMS_P03355_3mutA_WS |
| GSSGGGEAAAK | 12,568 | PERV_Q4VFZ2_3mutA_WS |
| GSSGSS | 12,569 | MLVCB_P08361_3mut |
| PAPAPAPAPAPAP | 12,570 | PERV_Q4VFZ2_3mut |
| GGSPAPGGG | 12,571 | MLVFF_P26809_3mutA |
| GGSGGSGGSGGSGGS | 12,572 | MLVCB_P08361_3mutA |
| EAAAKEAAAK | 12,573 | MLVFF_P26809_3mutA |
| AEAAAKEAAAKEAAAKEAAAKALEAEAAAKEAAAKEAAAKEAAAKA | 12,574 | GALV_P21414_3mut |
| PAPAPAPAPAPAP | 12,575 | WMSV_P03359_3mutA |
| GGGEAAAKGGS | 12,576 | KORV_Q9TTC1_3mutA |
| EAAAKGGGPAP | 12,577 | KORV_Q9TTC1_3mut |
| PAPEAAAKGSS | 12,578 | MLVBM_Q7SVK7_3mutA_WS |
| PAPEAAAKGSS | 12,579 | FLV_P10273_3mutA |
| PAPGGSEAAAK | 12,580 | MLVMS_P03355_3mut |
| GSSPAPGGG | 12,581 | BAEVM_P10272_3mutA |
| GGGEAAAKPAP | 12,582 | KORV_Q9TTC1-Pro_3mutA |
| GGGGSGGGGS | 12,583 | MLVMS_P03355_PLV919 |
| GGGEAAAKGSS | 12,584 | MLVFF_P26809_3mutA |
| PAPGGGGSS | 12,585 | MLVBM_Q7SVK7_3mutA_WS |
| GSSEAAAK | 12,586 | BAEVM_P10272_3mutA |
| GGGGGGGG | 12,587 | MLVMS_P03355_PLV919 |
| PAPGSSGGS | 12,588 | MLVAV_P03356_3mutA |
| GGGGSGGGGSGGGGSGGGGS | 12,589 | BAEVM_P10272_3mutA |
| PAP | | MLVMS_P03355_3mut |
| EAAAKGSSPAP | 12,591 | XMRV6_A1Z651_3mutA |
| PAPEAAAKGGS | 12,592 | MLVFF_P26809_3mutA |
| GSSGGGEAAAK | 12,593 | BAEVM_P10272_3mutA |
| PAPAPAP | 12,594 | MLVMS_P03355_3mutA_WS |
| GGSEAAAKGGG | 12,595 | MLVMS_P03355_PLV919 |
| GSSEAAAK | 12,596 | PERV_Q4VFZ2_3mut |
| GGGG | 12,597 | MLVMS_P03355_3mutA_WS |
| GGGGGS | 12,598 | MLVMS_P03355_3mut |
| GGGGSSEAAAK | 12,599 | PERV_Q4VFZ2_3mut |
| EAAAKEAAAKEAAAKEAAAKEAAAKEAAAK | 12,600 | SFV3L_P27401-Pro_2mutA |
| GGSEAAAKGSS | 12,601 | MLVMS_P03355_3mutA_WS |
| PAPGSSGGS | 12,602 | XMRV6_A1Z651_3mutA |
| GGSPAP | 12,603 | MLVMS_P03355_3mutA_WS |
| GGGGSSEAAAK | 12,604 | BAEVM_P10272_3mut |
| GGSGGSGGSGGS | 12,605 | AVIRE_P03360_3mutA |
| PAPGSSGGS | 12,606 | MLVFF_P26809_3mutA |
| GSSPAPGGG | 12,607 | MLVMS_P03355_3mutA_WS |
| GGGGGGG | 12,608 | MLVMS_P03355_3mutA_WS |
| EAAAKGGGGGS | 12,609 | MLVMS_P03355_3mutA_WS |
| EAAAKGGSGGG | 12,610 | MLVMS_P03355_PLV919 |
| GGGGSSEAAAK | 12,611 | XMRV6_A1Z651_3mutA |
| GGGGSEAAAKGGGGS | 12,612 | MLVBM_Q7SVK7_3mutA_WS |
| GSSGSS | 12,613 | MLVMS_P03355_PLV919 |
| GGSGGG | 12,614 | MLVMS_P03355_PLV919 |
| PAPEAAAKGGG | 12,615 | AVIRE_P03360_3mutA |
| AEAAAKEAAAKEAAAKEAAAKALEAEAAAKEAAAKEAAAKEAAAKA | 12,616 | FOAMV_P14350-Pro_2mutA |
| GGGGGSGSS | 12,617 | PERV_Q4VFZ2_3mut |
| GSSGSSGSSGSSGSS | 12,618 | KORV_Q9TTC1-Pro_3mut |
| GGGGSEAAAKGGGGS | 12,619 | MLVMS_P03355_3mutA_WS |
| GGGGGSPAP | 12,620 | FLV_P10273_3mut |
| GGGEAAAK | 12,621 | MLVMS_P03355_3mutA_WS |
| GGSGGSGGSGGS | 12,622 | FLV_P10273_3mutA |
| GGG | | MLVMS_P03355_PLV919 |
| GGSPAPEAAAK | 12,624 | BAEVM_P10272_3mutA |
| EAAAKEAAAK | 12,625 | FLV_P10273_3mutA |
| GGGEAAAKPAP | 12,626 | BAEVM_P10272_3mutA |
| GGGEAAAKGGS | 12,627 | PERV_Q4VFZ2_3mut |
| GGSGGSGGS | 12,628 | PERV_Q4VFZ2_3mut |
| EAAAKGGGPAP | 12,629 | XMRV6_A1Z651_3mutA |
| EAAAK | 12,630 | MLVBM_Q7SVK7_3mutA_WS |
| PAPEAAAKGGG | 12,631 | PERV_Q4VFZ2_3mut |
| EAAAKGSS | 12,632 | MLVCB_P08361_3mutA |
| GGSEAAAKGGG | 12,633 | MLVBM_Q7SVK7_3mutA_WS |
| GGGGSGGGGSGGGGSGGGGS | 12,634 | XMRV6_A1Z651_3mutA |
| GGGGSGGGGSGGGGSGGGGSGGGGS | 12,635 | BAEVM_P10272_3mut |
| GGGGSSPAP | 12,636 | PERV_Q4VFZ2_3mutA_WS |
| GGSGGSGGSGGSGGSGGS | 12,637 | PERV_Q4VFZ2_3mut |
| GGGEAAAKPAP | 12,638 | PERV_Q4VFZ2_3mut |
| EAAAKEAAAK | 12,639 | BAEVM_P10272_3mutA |
| GGSGSSEAAAK | 12,640 | XMRV6_A1Z651_3mutA |
| PAPEAAAKGSS | 12,641 | WMSV_P03359_3mutA |
| PAPAPAPAPAP | 12,642 | XMRV6_A1Z651_3mutA |
| GSSGGGEAAAK | 12,643 | MLVMS_P03355_PLV919 |
| GSSPAPGGG | 12,644 | MLVFF_P26809_3mutA |
| GGSPAPEAAAK | 12,645 | MLVFF_P26809_3mut |
| PAPGGSEAAAK | 12,646 | PERV_Q4VFZ2_3mut |
| GGGGSS | 12,647 | MLVFF_P26809_3mutA |
| GGSGSSGGG | 12,648 | BAEVM_P10272_3mutA |
| GSSGGGEAAAK | 12,649 | MLVMS_P03355_3mutA_WS |
| EAAAKGGS | 12,650 | MLVBM_Q7SVK7_3mutA_WS |
| GGGPAPGGS | 12,651 | MLVMS_P03355_PLV919 |
| EAAAKEAAAK | 12,652 | MLVMS_P03355_PLV919 |
| GSSGSSGSS | 12,653 | MLVMS_P03355_PLV919 |
| GGGEAAAKPAP | 12,654 | MLVAV_P03356_3mutA |
| SGSETPGTSESATPES | 12,655 | FLV_P10273_3mutA |
| PAPAPAPAPAP | 12,656 | KORV_Q9TTC1-Pro_3mut |
| AEAAAKEAAAKEAAAKEAAAKALEAEAAAKEAAAKEAAAKEAAAKA | 12,657 | BAEVM_P10272_3mutA |
| PAPGSSGGG | 12,658 | MLVMS_P03355_3mutA_WS |
| GSSGGGEAAAK | 12,659 | XMRV6_A1Z651_3mutA |
| GGGGSGGGGSGGGGSGGGGSGGGGS | 12,660 | XMRV6_A1Z651_3mutA |
| GGGGSSPAP | 12,661 | MLVFF_P26809_3mutA |
| GGSGGGPAP | 12,662 | PERV_Q4VFZ2_3mutA_WS |
| GSS | | PERV_Q4VFZ2_3mut |
| EAAAKGSSPAP | 12,664 | MLVMS_P03355_3mut |
| EAAAKGGG | 12,665 | XMRV6_A1Z651_3mutA |
| GSSGSSGSSGSS | 12,666 | WMSV_P03359_3mutA |
| PAPEAAAKGSS | 12,667 | MLVMS_P03355_PLV919 |
| GSSEAAAK | 12,668 | AVIRE_P03360_3mutA |
| EAAAKGGSGSS | 12,669 | AVIRE_P03360_3mutA |
| GSSEAAAK | 12,670 | MLVMS_P03355_3mut |
| GGSGSSEAAAK | 12,671 | MLVMS_P03355_PLV919 |
| GGSEAAAKGGG | 12,672 | MLVFF_P26809_3mutA |
| GGGGSGGGGSGGGGSGGGGS | 12,673 | MLVAV_P03356_3mutA |
| PAPAPAPAPAPAP | 12,674 | MLVFF_P26809_3mut |
| EAAAKPAPGSS | 12,675 | KORV_Q9TTC1-Pro_3mut |
| PAPGSSEAAAK | 12,676 | MLVAV_P03356_3mutA |
| GGGGSSPAP | 12,677 | WMSV_P03359_3mutA |
| EAAAKGGGGGS | 12,678 | MLVMS_P03355_3mutA_WS |
| GGGEAAAKGGS | 12,679 | MLVMS_P03355_3mut |
| GGSGSSGGG | 12,680 | MLVMS_P03355_3mut |
| GGGPAPGGS | 12,681 | MLVAV_P03356_3mutA |
| PAPGGGGGS | 12,682 | MLVMS_P03355_PLV919 |
| GGGPAPGSS | 12,683 | PERV_Q4VFZ2_3mut |
| GGGGGGG | 12,684 | MLVFF_P26809_3mutA |
| GGSGGGGSS | 12,685 | MLVCB_P08361_3mutA |
| GGGGGG | 12,686 | FLV_P10273_3mutA |
| GGSEAAAKGSS | 12,687 | PERV_Q4VFZ2_3mut |
| GGSPAPGGG | 12,688 | BAEVM_P10272_3mutA |
| GGSPAPGSS | 12,689 | AVIRE_P03360_3mutA |
| GGSGGSGGSGGS | 12,690 | KORV_Q9TTC1_3mut |
| EAAAKEAAAKEAAAKEAAAKEAAAK | 12,691 | MLVBM_Q7SVK7_3mut |
| PAPGSSGGS | 12,692 | XMRV6_A1Z651_3mut |
| EAAAKGGGGSS | 12,693 | PERV_Q4VFZ2_3mutA_WS |
| GGSGGSGGSGGSGGS | 12,694 | PERV_Q4VFZ2_3mutA_WS |
| PAPGGSGGG | 12,695 | MLVMS_P03355_PLV919 |
| PAPGSSGGG | 12,696 | PERV_Q4VFZ2_3mutA_WS |
| GSSGSS | 12,697 | BAEVM_P10272_3mutA |
| EAAAKGSS | 12,698 | MLVFF_P26809_3mutA |
| GGGPAP | 12,699 | MLVMS_P03355_PLV919 |
| EAAAKGGGGGS | 12,700 | MLVFF_P26809_3mutA |
| EAAAKGGSPAP | 12,701 | MLVBM_Q7SVK7_3mutA_WS |
| EAAAKEAAAKEAAAKEAAAKEAAAKEAAAK | 12,702 | WMSV_P03359_3mutA |
| GSSPAPGGG | 12,703 | MLVBM_Q7SVK7_3mutA_WS |
| GGGEAAAKGSS | 12,704 | AVIRE_P03360_3mutA |
| GGGGSSEAAAK | 12,705 | AVIRE_P03360_3mutA |
| GGGGGGGG | 12,706 | PERV_Q4VFZ2_3mutA_WS |
| PAPGSSEAAAK | 12,707 | BAEVM_P10272_3mutA |
| EAAAKGSS | 12,708 | MLVFF_P26809_3mut |
| GSSEAAAKGGG | 12,709 | MLVCB_P08361_3mutA |
| GGSEAAAK | 12,710 | MLVBM_Q7SVK7_3mutA_WS |
| GSSEAAAKGGG | 12,711 | PERV_Q4VFZ2_3mutA_WS |
| PAPGGSGGG | 12,712 | WMSV_P03359_3mutA |
| GSSGGSGGG | 12,713 | MLVCB_P08361_3mutA |
| EAAAKGSSGGG | 12,714 | FLV_P10273_3mutA |
| GSSEAAAK | 12,715 | MLVCB_P08361_3mutA |
| GSSGGGEAAAK | 12,716 | MLVMS_P03355_3mut |
| GGGGSGGGGS | 12,717 | MLVCB_P08361_3mutA |
| EAAAKGGGGSEAAAK | 12,718 | MLVBM_Q7SVK7_3mutA_WS |
| EAAAKGGG | 12,719 | PERV_Q4VFZ2_3mutA_WS |
| EAAAKGGSPAP | 12,720 | MLVMS_P03355_PLV919 |
| GGGPAPGGS | 12,721 | AVIRE_P03360_3mutA |
| GSSEAAAK | 12,722 | MLVBM_Q7SVK7_3mutA_WS |
| GSSGGGEAAAK | 12,723 | PERV_Q4VFZ2_3mut |
| SGSETPGTSESATPES | 12,724 | MLVMS_P03355_PLV919 |
| GGSGSSPAP | 12,725 | MLVMS_P03355_3mut |
| GGGGGG | 12,726 | MLVBM_Q7SVK7_3mutA_WS |
| GGSPAPGGG | 12,727 | XMRV6_A1Z651_3mutA |
| GGSGSS | 12,728 | PERV_Q4VFZ2_3mutA_WS |
| PAP | | MLVBM_Q7SVK7_3mutA_WS |
| EAAAKPAPGSS | 12,730 | MLVMS_P03355_PLV919 |
| EAAAKGGG | 12,731 | MLVMS_P03355_3mut |
| GSSEAAAKPAP | 12,732 | PERV_Q4VFZ2_3mutA_WS |
| GGGGSS | 12,733 | MLVMS_P03355_3mutA_WS |
| GGSGSSEAAAK | 12,734 | PERV_Q4VFZ2_3mut |
| GGGGSS | 12,735 | BAEVM_P10272_3mutA |
| PAPAP | 12,736 | MLVFF_P26809_3mut |
| PAPEAAAKGGG | 12,737 | BAEVM_P10272_3mutA |
| EAAAKGGS | 12,738 | MLVMS_P03355_PLV919 |
| PAPAPAPAPAPAP | 12,739 | PERV_Q4VFZ2_3mutA_WS |
| GGGGGSEAAAK | 12,740 | MLVMS_P03355_3mut |
| PAPGGS | 12,741 | PERV_Q4VFZ2_3mut |
| GGGGSS | 12,742 | MLVCB_P08361_3mutA |
| GGGGS | 12,743 | MLVAV_P03356_3mutA |
| GSSPAPEAAAK | 12,744 | MLVMS_P03355_PLV919 |
| GGGGSSGGS | 12,745 | MLVFF_P26809_3mutA |
| PAPEAAAKGSS | 12,746 | MLVMS_P03355_PLV919 |
| GGSGSSEAAAK | 12,747 | MLVMS_P03355_3mutA_WS |
| EAAAKGGG | 12,748 | MLVAV_P03356_3mutA |
| PAPGSSEAAAK | 12,749 | FLV_P10273_3mutA |
| EAAAKGSSGGG | 12,750 | MLVCB_P08361_3mutA |
| PAPEAAAK | 12,751 | KORV_Q9TTC1-Pro_3mutA |
| GGSPAPEAAAK | 12,752 | KORV_Q9TTC1-Pro_3mut |
| GGSGGSGGSGGSGGSGGS | 12,753 | MLVAV_P03356_3mutA |
| GSSEAAAKPAP | 12,754 | MLVBM_Q7SVK7_3mutA_WS |
| AEAAAKEAAAKEAAAKEAAAKALEAEAAAKEAAAKEAAAKEAAAKA | 12,755 | KORV_Q9TTC1-Pro_3mutA |
| GSSGGGEAAAK | 12,756 | XMRV6_A1Z651_3mut |
| PAPGGSGGG | 12,757 | AVIRE_P03360_3mutA |
| PAPGGSEAAAK | 12,758 | PERV_Q4VFZ2_3mutA_WS |
| GGGGS | 12,759 | MLVMS_P03355_3mutA_WS |
| GGGGSGGGGSGGGGS | 12,760 | MLVBM_Q7SVK7_3mutA_WS |
| PAPAPAPAPAP | 12,761 | PERV_Q4VFZ2_3mutA_WS |
| EAAAKEAAAKEAAAKEAAAKEAAAK | 12,762 | MLVMS_P03355_3mut |
| GSSGGSEAAAK | 12,763 | MLVMS_P03355_3mutA_WS |
| GGSGGSGGSGGS | 12,764 | WMSV_P03359_3mutA |
| EAAAKGSSGGG | 12,765 | WMSV_P03359_3mutA |
| EAAAKGGG | 12,766 | PERV_Q4VFZ2_3mutA_WS |
| SGSETPGTSESATPES | 12,767 | PERV_Q4VFZ2_3mut |
| PAPGSSGGS | 12,768 | MLVMS_P03355_3mutA_WS |
| PAPEAAAKGSS | 12,769 | PERV_Q4VFZ2_3mut |
| PAPEAAAK | 12,770 | AVIRE_P03360_3mutA |
| GSSEAAAKGGG | 12,771 | BAEVM_P10272_3mutA |
| GSSPAP | 12,772 | MLVAV_P03356_3mutA |
| EAAAKEAAAKEAAAKEAAAK | 12,773 | MLVFF_P26809_3mut |
| PAPGGSGSS | 12,774 | MLVAV_P03356_3mutA |
| GGGGSGGGGSGGGGS | 12,775 | PERV_Q4VFZ2_3mutA_WS |
| GSSGGSEAAAK | 12,776 | MLVCB_P08361_3mutA |
| EAAAKGGS | 12,777 | KORV_Q9TTC1-Pro_3mutA |
| EAAAKGGS | 12,778 | MLVFF_P26809_3mutA |
| GGSPAP | 12,779 | MLVMS_P03355_PLV919 |
| GGSGSS | 12,780 | MLVMS_P03355_PLV919 |
| SGSETPGTSESATPES | 12,781 | WMSV_P03359_3mut |
| GGGGGGG | 12,782 | WMSV_P03359_3mut |
| GGSPAPGSS | 12,783 | MLVCB_P08361_3mutA |
| GGGGSSGGS | 12,784 | WMSV_P03359_3mut |
| PAPGGS | 12,785 | MLVMS_P03355_PLV919 |
| PAPGSSGGS | 12,786 | MLVCB_P08361_3mutA |
| EAAAKEAAAKEAAAKEAAAKEAAAK | 12,787 | MLVFF_P26809_3mut |
| SGGSSGGSSGSETPGTSESATPESSGGSSGGSS | 12,788 | PERV_Q4VFZ2_3mut |
| GGSGGSGGSGGSGGS | 12,789 | BAEVM_P10272_3mutA |
| GSSEAAAK | 12,790 | PERV_Q4VFZ2_3mut |
| EAAAKEAAAKEAAAKEAAAK | 12,791 | KORV_Q9TTC1-Pro_3mutA |
| GGSGGSGGSGGSGGS | 12,792 | MLVMS_P03355_3mut |
| PAPAPAPAPAPAP | 12,793 | MLVMS_P03355_3mut |
| GGSPAPEAAAK | 12,794 | MLVMS_P03355_PLV919 |
| EAAAK | 12,795 | WMSV_P03359_3mutA |
| EAAAKGSSGGS | 12,796 | MLVBM_Q7SVK7_3mutA_WS |
| GGSGGGGSS | 12,797 | MLVMS_P03355_3mutA_WS |
| GGGEAAAKPAP | 12,798 | MLVMS_P03355_3mut |
| EAAAKGGSGGG | 12,799 | XMRV6_A1Z651_3mutA |
| GGGGGSEAAAK | 12,800 | KORV_Q9TTC1-Pro_3mutA |
| GGGGGG | 12,801 | BAEVM_P10272_3mutA |
| GGGGGG | 12,802 | MLVMS_P03355_3mut |
| GGGGGGG | 12,803 | MLVBM_Q7SVK7_3mutA_WS |
| AEAAAKEAAAKEAAAKEAAAKALEAEAAAKEAAAKEAAAKEAAAKA | 12,804 | AVIRE_P03360 |
| PAPGSSGGS | 12,805 | PERV_Q4VFZ2_3mut |
| GGGGGS | 12,806 | XMRV6_A1Z651_3mut |
| EAAAKPAP | 12,807 | XMRV6_A1Z651_3mutA |
| GGG | | MLVMS_P03355_3mutA_WS |
| AEAAAKEAAAKEAAAKEAAAKALEAEAAAKEAAAKEAAAKEAAAKA | 12,809 | FLV_P10273_3mut |
| EAAAKGSSPAP | 12,810 | MLVMS_P03355_3mut |
| SGSETPGTSESATPES | 12,811 | BAEVM_P10272_3mutA |
| GGSPAPEAAAK | 12,812 | MLVMS_P03355_3mut |
| GSSGSSGSSGSS | 12,813 | MLVAV_P03356_3mutA |
| AEAAAKEAAAKEAAAKEAAAKALEAEAAAKEAAAKEAAAKEAAAKA | 12,814 | MLVMS_P03355_3mut |
| GGSPAP | 12,815 | MLVCB_P08361_3mutA |
| GGGGGSEAAAK | 12,816 | MLVMS_P03355_3mutA_WS |
| GGGGG | 12,817 | MLVFF_P26809_3mutA |
| GSSEAAAK | 12,818 | MLVAV_P03356_3mutA |
| GGS | | BAEVM_P10272_3mut |
| EAAAKGGSPAP | 12,820 | MLVCB_P08361_3mutA |
| PAPAPAPAP | 12,821 | FLV_P10273_3mutA |
| PAPGGGEAAAK | 12,822 | MLVCB_P08361_3mutA |
| GGGGSSEAAAK | 12,823 | MLVMS_P03355_3mutA_WS |
| GGGGG | 12,824 | PERV_Q4VFZ2_3mutA_WS |
| GGSGGSGGSGGSGGSGGS | 12,825 | PERV_Q4VFZ2_3mut |
| GGGGG | 12,826 | MLVMS_P03355_3mut |
| PAPEAAAKGGG | 12,827 | MLVBM_Q7SVK7_3mutA_WS |
| GSSGGGPAP | 12,828 | XMRV6_A1Z651_3mutA |
| GSSGSSGSSGSSGSSGSS | 12,829 | PERV_Q4VFZ2_3mutA_WS |
| EAAAKGGSPAP | 12,830 | PERV_Q4VFZ2_3mut |
| GSSGGSEAAAK | 12,831 | MLVMS_P03355_PLV919 |
| GSS | | PERV_Q4VFZ2_3mut |
| EAAAKGGS | 12,833 | WMSV_P03359_3mutA |
| GGGGGSPAP | 12,834 | PERV_Q4VFZ2_3mutA_WS |
| EAAAKGSS | 12,835 | MLVMS_P03355_PLV919 |
| EAAAKGGGGSS | 12,836 | KORV_Q9TTC1-Pro_3mutA |
| PAPGSSGGG | 12,837 | PERV_Q4VFZ2_3mut |
| GGGGSSEAAAK | 12,838 | MLVFF_P26809_3mut |
| PAPAPAP | 12,839 | MLVMS_P03355_3mut |
| GSSGGSEAAAK | 12,840 | XMRV6_A1Z651_3mut |
| PAPEAAAKGSS | 12,841 | MLVMS_P03355_3mutA_WS |
| GGSGGSGGSGGSGGS | 12,842 | MLVMS_P03355_3mutA_WS |
| GGSGSSPAP | 12,843 | XMRV6_A1Z651_3mutA |
| GGGGSSPAP | 12,844 | MLVMS_P03355_PLV919 |
| GGGGS | 12,845 | MLVCB_P08361_3mutA |
| EAAAKEAAAKEAAAKEAAAK | 12,846 | PERV_Q4VFZ2_3mutA_WS |
| EAAAKEAAAK | 12,847 | KORV_Q9TTC1_3mutA |
| PAPGGGEAAAK | 12,848 | BAEVM_P10272_3mutA |
| GSSGGSEAAAK | 12,849 | XMRV6_A1Z651_3mutA |
| EAAAKEAAAKEAAAKEAAAKEAAAKEAAAK | 12,850 | FLV_P10273_3mut |
| GSSEAAAKPAP | 12,851 | MLVMS_P03355_3mutA_WS |
| EAAAKPAPGSS | 12,852 | PERV_Q4VFZ2_3mutA_WS |
| GSSGGSPAP | 12,853 | XMRV6_A1Z651_3mutA |
| GSSEAAAKGGG | 12,854 | PERV_Q4VFZ2_3mut |
| GGGEAAAKGGS | 12,855 | WMSV_P03359_3mutA |
| GSSEAAAKGGG | 12,856 | MLVFF_P26809_3mut |
| PAPAPAP | 12,857 | KORV_Q9TTC1-Pro_3mutA |
| EAAAKGGSPAP | 12,858 | MLVMS_P03355_3mutA_WS |
| PAPGGSEAAAK | 12,859 | PERV_Q4VFZ2_3mut |
| GGGGS | 12,860 | MLVBM_Q7SVK7_3mutA_WS |
| EAAAKGSSGGG | 12,861 | KORV_Q9TTC1_3mut |
| EAAAKGGGPAP | 12,862 | MLVCB_P08361_3mutA |
| EAAAKGSS | 12,863 | BAEVM_P10272_3mutA |
| GGSPAPGGG | 12,864 | MLVBM_Q7SVK7_3mutA_WS |
| GGGGSEAAAKGGGGS | 12,865 | MLVMS_P03355_3mutA_WS |
| GGGEAAAKGGS | 12,866 | PERV_Q4VFZ2_3mutA_WS |
| EAAAKGGGGSS | 12,867 | MLVMS_P03355_3mutA_WS |
| EAAAKGGGPAP | 12,868 | MLVFF_P26809_3mut |
| GSSPAP | 12,869 | PERV_Q4VFZ2_3mutA_WS |
| EAAAKGGS | 12,870 | MLVMS_P03355_3mut |
| GGGGSS | 12,871 | KORV_Q9TTC1-Pro_3mutA |
| EAAAKGSSPAP | 12,872 | MLVMS_P03355_3mutA_WS |
| GGGPAP | 12,873 | PERV_Q4VFZ2_3mut |
| EAAAKGSSGGS | 12,874 | XMRV6_A1Z651_3mutA |
| PAPGGG | 12,875 | MLVAV_P03356_3mutA |
| GSSPAPEAAAK | 12,876 | BAEVM_P10272_3mutA |
| GGGPAP | 12,877 | MLVBM_Q7SVK7_3mutA_WS |
| GSSGGGGGS | 12,878 | AVIRE_P03360_3mutA |
| SGSETPGTSESATPES | 12,879 | MLVMS_P03355_PLV919 |
| GGGPAP | 12,880 | MLVFF_P26809_3mut |
| EAAAKGGGGSS | 12,881 | XMRV6_A1Z651_3mutA |
| GGGGSSPAP | 12,882 | XMRV6_A1Z651_3mut |
| GGGGSEAAAKGGGGS | 12,883 | MLVMS_P03355_3mut |
| GSSPAP | 12,884 | MLVBM_Q7SVK7_3mutA_WS |
| GGSGSSEAAAK | 12,885 | FLV_P10273_3mutA |
| SGSETPGTSESATPES | 12,886 | MLVBM_Q7SVK7_3mutA_WS |
| PAPGGG | 12,887 | AVIRE_P03360_3mutA |
| GGGEAAAKPAP | 12,888 | MLVMS_P03355_3mutA_WS |
| EAAAKGGSGSS | 12,889 | PERV_Q4VFZ2_3mut |
| GGSPAPGGG | 12,890 | MLVAV_P03356_3mutA |
| PAPGGSGSS | 12,891 | BAEVM_P10272_3mutA |
| GSSGGSPAP | 12,892 | MLVFF_P26809_3mutA |
| EAAAKGSSGGG | 12,893 | PERV_Q4VFZ2_3mut |
| GGGGSGGGGS | 12,894 | PERV_Q4VFZ2_3mutA_WS |
| GSSGGGGGS | 12,895 | BAEVM_P10272_3mutA |
| GGGGSSGGS | 12,896 | MLVBM_Q7SVK7_3mutA_WS |
| EAAAKGGS | 12,897 | PERV_Q4VFZ2_3mutA_WS |
| GSSGSSGSSGSS | 12,898 | MLVMS_P03355_3mut |
| GGS | | MLVMS_P03355_3mutA_WS |
| GSSGGSEAAAK | 12,900 | MLVBM_Q7SVK7_3mutA_WS |
| SGGSSGGSSGSETPGTSESATPESSGGSSGGSS | 12,901 | XMRV6_A1Z651 |
| GGGGG | 12,902 | FLV_P10273_3mutA |
| PAPEAAAKGSS | 12,903 | PERV_Q4VFZ2_3mut |
| GGGGGG | 12,904 | WMSV_P03359_3mut |
| EAAAKGGG | 12,905 | BAEVM_P10272_3mutA |
| GGGGSS | 12,906 | MLVMS_P03355_3mutA_WS |
| GSSGGGEAAAK | 12,907 | KORV_Q9TTC1_3mut |
| GGSGSS | 12,908 | AVIRE_P03360_3mutA |
| EAAAKPAP | 12,909 | MLVMS_P03355_3mut |
| EAAAKEAAAKEAAAK | 12,910 | FLV_P10273_3mutA |
| GGGG | 12,911 | XMRV6_A1Z651_3mutA |
| GSSPAPGGS | 12,912 | BAEVM_P10272_3mutA |
| GSSGGGGGS | 12,913 | MLVFF_P26809_3mutA |
| GGGGSSGGS | 12,914 | MLVAV_P03356_3mutA |
| GGS | | PERV_Q4VFZ2_3mut |
| GGGGG | 12,916 | WMSV_P03359_3mutA |
| GSSGSSGSSGSSGSSGSS | 12,917 | FLV_P10273_3mutA |
| PAPGGGGSS | 12,918 | MLVAV_P03356_3mutA |
| GGGGGGGG | 12,919 | BAEVM_P10272_3mutA |
| SGSETPGTSESATPES | 12,920 | MLVCB_P08361_3mutA |
| PAPGGG | 12,921 | BAEVM_P10272_3mutA |
| GSSGSSGSS | 12,922 | MLVCB_P08361_3mutA |
| GGSGSS | 12,923 | MLVMS_P03355_3mutA_WS |
| EAAAKGGGGSEAAAK | 12,924 | WMSV_P03359_3mutA |
| GGGGGGGG | 12,925 | FLV_P10273_3mutA |
| GSSGSS | 12,926 | MLVMS_P03355_3mutA_WS |
| PAPEAAAKGGS | 12,927 | XMRV6_A1Z651_3mutA |
| EAAAKEAAAK | 12,928 | MLVMS_P03355_3mut |
| GGGGSGGGGSGGGGS | 12,929 | BAEVM_P10272_3mutA |
| EAAAKGSSPAP | 12,930 | MLVMS_P03355_PLV919 |
| GGGGSSEAAAK | 12,931 | MLVMS_P03355_3mut |
| GGGGSSEAAAK | 12,932 | BAEVM_P10272_3mutA |
| PAPGGSGSS | 12,933 | PERV_Q4VFZ2_3mut |
| GGSGGGEAAAK | 12,934 | MLVFF_P26809_3mut |
| PAPEAAAKGGS | 12,935 | PERV_Q4VFZ2_3mut |
| GGGPAPGSS | 12,936 | AVIRE_P03360_3mut |
| PAPGGSGGG | 12,937 | PERV_Q4VFZ2_3mutA_WS |
| GGGGGGGG | 12,938 | PERV_Q4VFZ2_3mutA_WS |
| GSSEAAAK | 12,939 | MLVMS_P03355_3mutA_WS |
| GGGGSGGGGSGGGGS | 12,940 | PERV_Q4VFZ2_3mutA_WS |
| EAAAKGGS | 12,941 | MLVMS_P03355_3mut |
| GGGGGSGSS | 12,942 | MLVCB_P08361_3mut |
| GGGPAP | 12,943 | KORV_Q9TTC1-Pro_3mutA |
| EAAAKPAPGGG | 12,944 | MLVCB_P08361_3mut |
| GSSGGSPAP | 12,945 | MLVCB_P08361_3mutA |
| SGGSSGGSSGSETPGTSESATPESSGGSSGGSS | 12,946 | MLVMS_P03355_3mut |
| PAPAPAPAP | 12,947 | MLVMS_P03355_3mut |
| GSSGGS | 12,948 | XMRV6_A1Z651_3mutA |
| GSSEAAAKGGG | 12,949 | MLVMS_P03355_3mut |
| GGSGSSPAP | 12,950 | MLVMS_P03355_3mutA_WS |
| GSSEAAAKGGS | 12,951 | MLVMS_P03355_PLV919 |
| EAAAKEAAAKEAAAKEAAAKEAAAK | 12,952 | BAEVM_P10272_3mut |
| PAPGGGGSS | 12,953 | KORV_Q9TTC1_3mutA |
| EAAAKGSS | 12,954 | MLVMS_P03355_3mutA_WS |
| AEAAAKEAAAKEAAAKEAAAKALEAEAAAKEAAAKEAAAKEAAAKA | 12,955 | FFV_093209_2mut |
| GGSGGSGGSGGSGGSGGS | 12,956 | BAEVM_P10272_3mutA |
| GGGGGG | 12,957 | MLVMS_P03355_PLV919 |
| PAPEAAAK | 12,958 | BAEVM_P10272_3mutA |
| GGSGSSEAAAK | 12,959 | MLVAV_P03356_3mutA |
| GGG | | MLVCB_P08361_3mutA |
| GGGGG | 12,961 | MLVCB_P08361_3mutA |
| GGSGGSGGSGGS | 12,962 | KORV_Q9TTC1-Pro_3mutA |
| GSSGSSGSSGSSGSSGSS | 12,963 | XMRV6_A1Z651_3mutA |
| GSSEAAAKPAP | 12,964 | FLV_P10273_3mutA |
| GGGEAAAKPAP | 12,965 | MLVCB_P08361_3mutA |
| GSSGSSGSS | 12,966 | MLVMS_P03355_3mutA_WS |
| PAPAPAPAP | 12,967 | MLVMS_P03355_PLV919 |
| EAAAKGGG | 12,968 | MLVMS_P03355_PLV919 |
| PAPAPAPAPAPAP | 12,969 | FLV_P10273_3mutA |
| EAAAKGGSGSS | 12,970 | MLVMS_P03355_3mut |
| GGGGGG | 12,971 | PERV_Q4VFZ2_3mutA_WS |
| PAPGGG | 12,972 | MLVCB_P08361_3mutA |
| GGGGGSGSS | 12,973 | KORV_Q9TTC1_3mutA |
| GGGGSGGGGSGGGGSGGGGS | 12,974 | XMRV6_A1Z651_3mut |
| GGSGGSGGS | 12,975 | KORV_Q9TTC1-Pro_3mutA |
| EAAAKPAPGGG | 12,976 | MLVMS_P03355_3mutA_WS |
| AEAAAKEAAAKEAAAKEAAAKALEAEAAAKEAAAKEAAAKEAAAKA | 12,977 | XMRV6_A1Z651 |
| GGGGSGGGGSGGGGSGGGGSGGGGSGGGGS | 12,978 | FLV_P10273_3mutA |
| EAAAKGGGGSEAAAK | 12,979 | PERV_Q4VFZ2_3mutA_WS |
| GGGPAPGSS | 12,980 | AVIRE_P03360_3mutA |
| GGGGG | 12,981 | MLVMS_P03355_3mutA_WS |
| GGGGSGGGGSGGGGSGGGGSGGGGSGGGGS | 12,982 | MLVMS_P03355_3mut |
| GGGGSGGGGS | 12,983 | MLVMS_P03355_3mutA_WS |
| EAAAKGGSPAP | 12,984 | XMRV6_A1Z651_3mutA |
| EAAAKGSSPAP | 12,985 | AVIRE_P03360_3mutA |
| PAPGGSGSS | 12,986 | KORV_Q9TTC1-Pro_3mutA |
| GSS | | MLVBM_Q7SVK7_3mutA_WS |
| GSS | | WMSV_P03359_3mut |
| GGGPAPGSS | 12,989 | MLVFF_P26809_3mutA |
| EAAAKPAP | 12,990 | MLVMS_P03355_3mut |
| GSSPAPEAAAK | 12,991 | FLV_P10273_3mutA |
| GGSPAPGSS | 12,992 | MLVBM_Q7SVK7_3mutA_WS |
| GGGGGSEAAAK | 12,993 | XMRV6_A1Z651_3mut |
| PAPEAAAKGGG | 12,994 | WMSV_P03359_3mutA |
| PAPGGG | 12,995 | PERV_Q4VFZ2_3mut |
| GGSPAPEAAAK | 12,996 | WMSV_P03359_3mutA |
| GGSGGGGSS | 12,997 | PERV_Q4VFZ2_3mut |
| EAAAKGGGGSS | 12,998 | PERV_Q4VFZ2_3mut |
| EAAAKGGSPAP | 12,999 | AVIRE_P03360_3mut |
| GGSGGGGSS | 13,000 | WMSV_P03359_3mutA |
| PAPGSSEAAAK | 13,001 | MLVFF_P26809_3mut |
| GSSEAAAK | 13,002 | MLVMS_P03355_PLV919 |
| GSAGSAAGSGEF | 13,003 | AVIRE_P03360_3mutA |
| EAAAKGGSGSS | 13,004 | MLVMS_P03355_3mut |
| GGSEAAAKPAP | 13,005 | MLVMS_P03355_PLV919 |
| GGGGSGGGGSGGGGSGGGGSGGGGS | 13,006 | MLVFF_P26809_3mutA |
| PAPGSSEAAAK | 13,007 | PERV_Q4VFZ2_3mutA_WS |
| GGGGSSPAP | 13,008 | MLVMS_P03355_3mutA_WS |
| PAPAPAP | 13,009 | MLVCB_P08361_3mutA |
| EAAAKPAPGGG | 13,010 | MLVBM_Q7SVK7_3mutA_WS |
| GGGPAPGSS | 13,011 | BAEVM_P10272_3mutA |
| PAP | | MLVMS_P03355_3mutA_WS |
| PAPGGSGGG | 13,013 | MLVMS_P03355_3mutA_WS |
| GGSGGSGGSGGSGGS | 13,014 | MLVBM_Q7SVK7_3mutA_WS |
| PAPAPAPAP | 13,015 | XMRV6_A1Z651_3mut |
| GSSPAPGGG | 13,016 | MLVMS_P03355_3mutA_WS |
| GSSPAPGGG | 13,017 | MLVMS_P03355_3mut |
| PAPGGG | 13,018 | MLVMS_P03355_PLV919 |
| GGGEAAAKGSS | 13,019 | WMSV_P03359_3mut |
| EAAAKGSS | 13,020 | KORV_Q9TTC1-Pro_3mutA |
| EAAAKGGS | 13,021 | PERV_Q4VFZ2_3mut |
| EAAAKEAAAKEAAAKEAAAKEAAAK | 13,022 | PERV_Q4VFZ2_3mut |
| PAPEAAAKGGG | 13,023 | MLVMS_P03355_PLV919 |
| EAAAKGSSGGG | 13,024 | MLVFF_P26809_3mut |
| AEAAAKEAAAKEAAAKEAAAKALEAEAAAKEAAAKEAAAKEAAAKA | 13,025 | PERV_Q4VFZ2 |
| EAAAKEAAAKEAAAKEAAAKEAAAKEAAAK | 13,026 | MLVAV_P03356_3mutA |
| GSSGGSGGG | 13,027 | MLVFF_P26809_3mut |
| GSSGSSGSSGSS | 13,028 | PERV_Q4VFZ2_3mutA_WS |
| GGSPAPGGG | 13,029 | MLVMS_P03355_PLV919 |
| GSS | | BAEVM_P10272_3mut |
| GGGPAPGSS | 13,031 | MLVMS_P03355_3mutA_WS |
| GGGGSS | 13,032 | KORV_Q9TTC1_3mutA |
| GSSGGSGGG | 13,033 | BAEVM_P10272_3mutA |
| EAAAKEAAAKEAAAK | 13,034 | MLVCB_P08361_3mutA |
| SGGSSGGSSGSETPGTSESATPESSGGSSGGSS | 13,035 | FLV_P10273_3mutA |
| PAPGGGGGS | 13,036 | PERV_Q4VFZ2_3mut |
| PAPAPAPAPAP | 13,037 | KORV_Q9TTC1-Pro_3mutA |
| EAAAK | 13,038 | MLVMS_P03355_3mutA_WS |
| GGG | | MLVCB_P08361_3mut |
| GGSEAAAKGGG | 13,040 | BAEVM_P10272_3mutA |
| GGGGGSGSS | 13,041 | MLVAV_P03356_3mutA |
| EAAAKGSSPAP | 13,042 | MLVBM_Q7SVK7_3mutA_WS |
| GGSGGSGGS | 13,043 | XMRV6_A1Z651_3mut |
| EAAAKPAPGGG | 13,044 | KORV_Q9TTC1-Pro_3mutA |
| GGGPAPEAAAK | 13,045 | FLV_P10273_3mutA |
| GGSPAPEAAAK | 13,046 | MLVMS_P03355_3mutA_WS |
| GGSGGSGGSGGSGGS | 13,047 | MLVFF_P26809_3mut |
| EAAAKGGSGSS | 13,048 | MLVMS_P03355_PLV919 |
| GGGEAAAKGGS | 13,049 | MLVBM_Q7SVK7_3mutA_WS |
| PAPAPAPAP | 13,050 | BAEVM_P10272_3mutA |
| EAAAKEAAAKEAAAKEAAAK | 13,051 | MLVMS_P03355_3mut |
| EAAAKPAP | 13,052 | XMRV6_A1Z651_3mut |
| EAAAKEAAAK | 13,053 | MLVBM_Q7SVK7_3mutA_WS |
| EAAAKGGG | 13,054 | BAEVM_P10272_3mut |
| EAAAKGSS | 13,055 | MLVAV_P03356_3mutA |
| EAAAKEAAAKEAAAKEAAAKEAAAKEAAAK | 13,056 | MLVFF_P26809_3mut |
| GGGPAPGSS | 13,057 | PERV_Q4VFZ2_3mutA_WS |
| GGGG | 13,058 | PERV_Q4VFZ2_3mut |
| EAAAKGGSGSS | 13,059 | MLVMS_P03355_PLV919 |
| GGGGSGGGGSGGGGS | 13,060 | MLVMS_P03355_3mutA_WS |
| EAAAK | 13,061 | MLVMS_P03355_3mutA_WS |
| GGGGSS | 13,062 | PERV_Q4VFZ2 |
| PAPEAAAKGGS | 13,063 | MLVCB_P08361_3mut |
| GSS | | MLVMS_P03355_3mut |
| GSAGSAAGSGEF | 13,065 | MLVFF_P26809_3mutA |
| EAAAKEAAAKEAAAKEAAAKEAAAKEAAAK | 13,066 | KORV_Q9TTC1-Pro_3mut |
| GGGGSGGGGS | 13,067 | AVIRE_P03360_3mutA |
| EAAAK | 13,068 | MLVMS_P03355_3mut |
| GGGPAPGGS | 13,069 | PERV_Q4VFZ2_3mut |
| GGGGSGGGGSGGGGS | 13,070 | MLVMS_P03355_PLV919 |
| PAPGGG | 13,071 | MLVMS_P03355_3mutA_WS |
| GGGEAAAKPAP | 13,072 | PERV_Q4VFZ2_3mutA_WS |
| EAAAKPAPGSS | 13,073 | KORV_Q9TTC1-Pro_3mutA |
| PAPGSS | 13,074 | KORV_Q9TTC1_3mutA |
| GSAGSAAGSGEF | 13,075 | PERV_Q4VFZ2_3mut |
| PAPGGGGSS | 13,076 | KORV_Q9TTC1-Pro_3mutA |
| GSSGGGEAAAK | 13,077 | MLVCB_P08361_3mutA |
| GSS | | AVIRE_P03360_3mutA |
| GSSGSSGSSGSS | 13,079 | XMRV6_A1Z651_3mutA |
| PAPEAAAKGGG | 13,080 | MLVMS_P03355_PLV919 |
| GGGPAPEAAAK | 13,081 | MLVCB_P08361_3mutA |
| PAPGGGGGS | 13,082 | MLVCB_P08361_3mutA |
| EAAAKEAAAKEAAAKEAAAK | 13,083 | PERV_Q4VFZ2_3mutA_WS |
| GGGGGSPAP | 13,084 | MLVFF_P26809_3mutA |
| GSSGSSGSSGSSGSS | 13,085 | PERV_Q4VFZ2 |
| GSSPAPEAAAK | 13,086 | MLVMS_P03355_PLV919 |
| GSSGSSGSSGSSGSSGSS | 13,087 | MLVBM_Q7SVK7_3mutA_WS |
| GSSGSSGSSGSSGSSGSS | 13,088 | MLVMS_P03355_3mutA_WS |
| GGSPAPEAAAK | 13,089 | MLVAV_P03356_3mutA |
| GSSGGG | 13,090 | BAEVM_P10272_3mut |
| EAAAKGSSGGS | 13,091 | KORV_Q9TTC1-Pro_3mutA |
| GGSGSSEAAAK | 13,092 | MLVMS_P03355_3mutA_WS |
| GGGPAPEAAAK | 13,093 | MLVFF_P26809_3mutA |
| GGGPAPGGS | 13,094 | MLVMS_P03355_3mutA_WS |
| GGGGG | 13,095 | MLVMS_P03355_PLV919 |
| GGGEAAAKPAP | 13,096 | MLVBM_Q7SVK7_3mutA_WS |
| GGGGSGGGGS | 13,097 | WMSV_P03359_3mut |
| GGGPAPEAAAK | 13,098 | PERV_Q4VFZ2_3mut |
| GGSGSSEAAAK | 13,099 | MLVMS_P03355_PLV919 |
| EAAAKGGGPAP | 13,100 | MLVMS_P03355_3mutA_WS |
| GSSGSSGSSGSSGSS | 13,101 | KORV_Q9TTC1-Pro_3mutA |
| PAPAP | 13,102 | WMSV_P03359_3mutA |
| GGSPAPGSS | 13,103 | MLVAV_P03356_3mutA |
| GGSGGGPAP | 13,104 | MLVMS_P03355_3mut |
| GGSPAP | 13,105 | MLVMS_P03355_PLV919 |
| EAAAKGGSPAP | 13,106 | PERV_Q4VFZ2_3mut |
| GSSPAPGGG | 13,107 | KORV_Q9TTC1-Pro_3mutA |
| GSAGSAAGSGEF | 13,108 | MLVMS_P03355_3mut |
| GGSPAP | 13,109 | PERV_Q4VFZ2_3mut |
| GSSGSS | 13,110 | KORV_Q9TTC1-Pro_3mut |
| GGGPAPGSS | 13,111 | MLVMS_P03355_3mutA_WS |
| AEAAAKEAAAKEAAAKEAAAKALEAEAAAKEAAAKEAAAKEAAAKA | 13,112 | FOAMV_P14350 |
| PAPGSSGGG | 13,113 | MLVMS_P03355_PLV919 |
| GGSEAAAKPAP | 13,114 | BAEVM_P10272_3mutA |
| GGGGGS | 13,115 | MLVCB_P08361_3mutA |
| PAPEAAAKGGS | 13,116 | MLVMS_P03355_3mutA_WS |
| EAAAKEAAAKEAAAKEAAAKEAAAKEAAAK | 13,117 | BAEVM_P10272_3mutA |
| GGSEAAAK | 13,118 | BAEVM_P10272_3mutA |
| GSSPAPEAAAK | 13,119 | MLVMS_P03355_3mutA_WS |
| PAPGGG | 13,120 | WMSV_P03359_3mut |
| EAAAKPAP | 13,121 | PERV_Q4VFZ2_3mut |
| GSSGSSGSSGSSGSS | 13,122 | WMSV_P03359_3mut |
| PAPGGG | 13,123 | MLVBM_Q7SVK7_3mutA_WS |
| GGSGGGEAAAK | 13,124 | BAEVM_P10272_3mutA |
| PAPGGS | 13,125 | MLVMS_P03355_3mut |
| GGSGGSGGSGGS | 13,126 | MLVBM_Q7SVK7_3mutA_WS |
| EAAAKEAAAKEAAAKEAAAK | 13,127 | PERV_Q4VFZ2_3mut |
| GGSEAAAKGGG | 13,128 | WMSV_P03359_3mutA |
| GGGPAP | 13,129 | BAEVM_P10272_3mutA |
| GGGGSGGGGSGGGGSGGGGSGGGGSGGGGS | 13,130 | XMRV6_A1Z651_3mut |
| GGSPAPGSS | 13,131 | KORV_Q9TTC1_3mut |
| GGGPAPGSS | 13,132 | MLVMS_P03355_3mut |
| GGGGSSGGS | 13,133 | BAEVM_P10272_3mutA |
| GGGEAAAKGSS | 13,134 | KORV_Q9TTC1-Pro_3mutA |
| PAPAP | 13,135 | MLVBM_Q7SVK7_3mutA_WS |
| GGSPAPGGG | 13,136 | PERV_Q4VFZ2_3mut |
| PAPGSS | 13,137 | PERV_Q4VFZ2_3mutA_WS |
| GSSGGSPAP | 13,138 | MLVBM_Q7SVK7_3mutA_WS |
| EAAAKGGGGSEAAAK | 13,139 | PERV_Q4VFZ2_3mut |
| GSSEAAAKGGS | 13,140 | KORV_Q9TTC1-Pro_3mut |
| PAPAPAPAP | 13,141 | KORV_Q9TTC1-Pro_3mutA |
| GGSEAAAKPAP | 13,142 | WMSV_P03359_3mutA |
| PAPGGS | 13,143 | FLV_P10273_3mutA |
| EAAAKGGGPAP | 13,144 | PERV_Q4VFZ2_3mut |
| GGSGSSGGG | 13,145 | AVIRE_P03360_3mutA |
| EAAAKGGSGSS | 13,146 | BAEVM_P10272_3mutA |
| SGGSSGGSSGSETPGTSESATPESSGGSSGGSS | 13,147 | MLVCB_P08361_3mutA |
| GSSEAAAKGGS | 13,148 | XMRV6_A1Z651_3mutA |
| GGGGG | 13,149 | BAEVM_P10272_3mutA |
| GGGGSGGGGSGGGGSGGGGSGGGGSGGGGS | 13,150 | SFV3L_P27401_2mutA |
| GGGEAAAKGSS | 13,151 | MLVMS_P03355_PLV919 |
| EAAAKGGGGSEAAAK | 13,152 | KORV_Q9TTC1_3mutA |
| EAAAKGGG | 13,153 | AVIRE_P03360_3mut |
| GGSGGG | 13,154 | MLVMS_P03355_3mutA_WS |
| GGSGSSGGG | 13,155 | MLVMS_P03355_PLV919 |
| GGGGSGGGGSGGGGSGGGGSGGGGSGGGGS | 13,156 | KORV_Q9TTC1_3mut |
| GGGGSEAAAKGGGGS | 13,157 | KORV_Q9TTC1_3mutA |
| PAPAPAPAPAP | 13,158 | FLV_P10273_3mutA |
| GGS | | MLVBM_Q7SVK7_3mutA_WS |
| GGGGGSEAAAK | 13,160 | MLVBM_Q7SVK7_3mutA_WS |
| GSSGSSGSSGSSGSS | 13,161 | MLVMS_P03355_3mutA_WS |
| EAAAKEAAAKEAAAKEAAAKEAAAK | 13,162 | MLVMS_P03355_3mut |
| GGSGSSGGG | 13,163 | PERV_Q4VFZ2_3mut |
| PAP | | MLVFF_P26809_3mut |
| GSSPAPEAAAK | 13,165 | MLVAV_P03356_3mutA |
| EAAAKGGGGSS | 13,166 | MLVMS_P03355_3mut |
| GGGEAAAKGGS | 13,167 | XMRV6_A1Z651_3mut |
| GGSGGGPAP | 13,168 | MLVBM_Q7SVK7_3mutA_WS |
| GSAGSAAGSGEF | 13,169 | BAEVM_P10272_3mutA |
| GSSEAAAK | 13,170 | MLVCB_P08361_3mut |
| PAPGSS | 13,171 | MLVMS_P03355_3mut |
| EAAAKEAAAKEAAAK | 13,172 | MLVAV_P03356_3mutA |
| GSAGSAAGSGEF | 13,173 | XMRV6_A1Z651_3mutA |
| GSSGSSGSSGSS | 13,174 | BAEVM_P10272_3mutA |
| AEAAAKEAAAKEAAAKEAAAKALEAEAAAKEAAAKEAAAKEAAAKA | 13,175 | KORV_Q9TTC1-Pro_3mut |
| GGGGSSEAAAK | 13,176 | WMSV_P03359_3mut |
| GSSGGGEAAAK | 13,177 | MLVBM_Q7SVK7_3mutA_WS |
| EAAAKPAP | 13,178 | MLVFF_P26809_3mutA |
| GGSPAPGGG | 13,179 | KORV_Q9TTC1_3mutA |
| PAPEAAAK | 13,180 | FLV_P10273_3mutA |
| GSSGSSGSS | 13,181 | MLVBM_Q7SVK7_3mutA_WS |
| GSSGGGEAAAK | 13,182 | FLV_P10273_3mutA |
| GGSPAP | 13,183 | MLVBM_Q7SVK7_3mutA_WS |
| GSAGSAAGSGEF | 13,184 | KORV_Q9TTC1-Pro_3mutA |
| PAPGGSEAAAK | 13,185 | MLVMS_P03355_PLV919 |
| GGSPAPEAAAK | 13,186 | MLVBM_Q7SVK7_3mutA_WS |
| GGGGGSPAP | 13,187 | MLVBM_Q7SVK7_3mutA_WS |
| EAAAKGSSPAP | 13,188 | WMSV_P03359_3mut |
| EAAAKGGGPAP | 13,189 | MLVBM_Q7SVK7_3mutA_WS |
| PAPGSS | 13,190 | KORV_Q9TTC1-Pro_3mutA |
| GGSGSSGGG | 13,191 | BAEVM_P10272_3mut |
| SGGSSGGSSGSETPGTSESATPESSGGSSGGSS | 13,192 | FFV_093209-Pro_2mut |
| GGSGGSGGSGGSGGSGGS | 13,193 | WMSV_P03359_3mutA |
| GGSGGSGGS | 13,194 | PERV_Q4VFZ2_3mutA_WS |
| GGGGG | 13,195 | PERV_Q4VFZ2_3mutA_WS |
| GGGPAP | 13,196 | FLV_P10273_3mutA |
| PAPGGSGGG | 13,197 | XMRV6_A1Z651_3mutA |
| GGGGSEAAAKGGGGS | 13,198 | XMRV6_A1Z651_3mut |
| EAAAKGSSGGG | 13,199 | KORV_Q9TTC1-Pro_3mutA |
| GSSGGSEAAAK | 13,200 | WMSV_P03359_3mut |
| EAAAKGGSGSS | 13,201 | PERV_Q4VFZ2_3mut |
| PAPAPAPAPAP | 13,202 | PERV_Q4VFZ2_3mut |
| GGGGSGGGGSGGGGSGGGGSGGGGSGGGGS | 13,203 | MLVMS_P03355_3mutA_WS |
| GGGGGGG | 13,204 | KORV_Q9TTC1_3mutA |
| EAAAK | 13,205 | KORV_Q9TTC1-Pro_3mutA |
| GGGEAAAKGGS | 13,206 | KORV_Q9TTC1-Pro_3mutA |
| GGGEAAAKGGS | 13,207 | PERV_Q4VFZ2_3mutA_WS |
| GGGGGSPAP | 13,208 | XMRV6_A1Z651_3mut |
| GGGGSGGGGSGGGGSGGGGS | 13,209 | MLVFF_P26809_3mut |
| GGGGGGG | 13,210 | MLVFF_P26809_3mut |
| PAPAPAPAPAPAP | 13,211 | AVIRE_P03360_3mutA |
| GSSPAPGGG | 13,212 | FLV_P10273_3mutA |
| GGGGGSPAP | 13,213 | MLVMS_P03355_3mutA_WS |
| GGGGSGGGGSGGGGS | 13,214 | MLVMS_P03355_3mut |
| GGGGGGGGSGGGGS | 13,215 | KORV_Q9TTC1_3mut |
| GSSEAAAKGGS | 13,216 | MLVAV_P03356_3mutA |
| GSSGSSGSSGSSGSS | 13,217 | MLVMS_P03355_3mut |
| EAAAKGGGGGS | 13,218 | PERV_Q4VFZ2_3mutA_WS |
| GSSGGGGGS | 13,219 | PERV_Q4VFZ2_3mut |
| GGGEAAAKPAP | 13,220 | MLVMS_P03355_3mut |
| GSSGGSPAP | 13,221 | PERV_Q4VFZ2_3mutA_WS |
| GSSGGGPAP | 13,222 | BAEVM_P10272_3mutA |
| GGGGGSGSS | 13,223 | MLVMS_P03355_PLV919 |
| AEAAAKEAAAKEAAAKEAAAKALEAEAAAKEAAAKEAAAKEAAAKA | 13,224 | BAEVM_P10272_3mut |
| PAPEAAAK | 13,225 | MLVMS_P03355_3mut |
| GGGGSGGGGSGGGGS | 13,226 | FLV_P10273_3mutA |
| GGSGSSGGG | 13,227 | WMSV_P03359_3mutA |
| EAAAKGGS | 13,228 | PERV_Q4VFZ2_3mut |
| EAAAKGSSPAP | 13,229 | MLVCB_P08361_3mut |
| EAAAKGGSGSS | 13,230 | WMSV_P03359_3mutA |
| GSSGSS | 13,231 | PERV_Q4VFZ2_3mutA_WS |
| PAPAPAPAP | 13,232 | MLVMS_P03355_PLV919 |
| GGSGGG | 13,233 | PERV_Q4VFZ2_3mutA_WS |
| GSS | | MLVBM_Q7SVK7_3mutA_WS |
| PAP | | KORV_Q9TTC1-Pro_3mutA |
| GGSGSSEAAAK | 13,236 | MLVFF_P26809_3mut |
| PAPEAAAKGSS | 13,237 | KORV_Q9TTC1-Pro_3mutA |
| GGSGGS | 13,238 | MLVCB_P08361_3mutA |
| GGGGGGG | 13,239 | PERV_Q4VFZ2_3mutA_WS |
| GGSPAPEAAAK | 13,240 | MLVBM_Q7SVK7_3mut |
| EAAAKEAAAKEAAAKEAAAKEAAAKEAAAK | 13,241 | KORV_Q9TTC1_3mutA |
| GGSPAP | 13,242 | MLVMS_P03355_3mut |
| GGSEAAAKGGG | 13,243 | PERV_Q4VFZ2_3mut |
| GGGGSGGGGS | 13,244 | FLV_P10273_3mutA |
| GGGEAAAK | 13,245 | BAEVM_P10272_3mutA |
| GGGGSGGGGSGGGGSGGGGSGGGGSGGGGS | 13,246 | SFV3L_P27401_2mut |
| GGSEAAAKPAP | 13,247 | KORV_Q9TTC1-Pro_3mutA |
| GSSGGGEAAAK | 13,248 | MLVMS_P03355_PLV919 |
| GGGGGSEAAAK | 13,249 | MLVMS_P03355_PLV919 |
| EAAAKGGSGGG | 13,250 | MLVMS_P03355_3mutA_WS |
| GGGGSSPAP | 13,251 | MLVAV_P03356_3mutA |
| EAAAKEAAAK | 13,252 | MLVMS_P03355_3mutA_WS |
| AEAAAKEAAAKEAAAKEAAAKALEAEAAAKEAAAKEAAAKEAAAKA | 13,253 | SFV3L_P27401_2mut |
| GSSGSSGSSGSSGSS | 13,254 | MLVMS_P03355_PLV919 |
| GSSGGG | 13,255 | KORV_Q9TTC1-Pro_3mutA |
| GSSGGS | 13,256 | MLVFF_P26809_3mutA |
| GGGGSGGGGS | 13,257 | XMRV6_A1Z651_3mutA |
| PAPGSS | 13,258 | MLVBM_Q7SVK7_3mutA_WS |
| GGGPAPEAAAK | 13,259 | XMRV6_A1Z651_3mutA |
| EAAAKGGS | 13,260 | MLVFF_P26809_3mut |
| GSS | | KORV_Q9TTC1_3mutA |
| GGGG | 13,262 | PERV_Q4VFZ2_3mut |
| GGGGGSEAAAK | 13,263 | AVIRE_P03360_3mutA |
| GSSGSSGSSGSSGSS | 13,264 | MLVMS_P03355_PLV919 |
| PAPGGSGGG | 13,265 | PERV_Q4VFZ2_3mut |
| GGGPAP | 13,266 | PERV_Q4VFZ2_3mut |
| GGGPAPEAAAK | 13,267 | AVIRE_P03360_3mutA |
| GGGEAAAK | 13,268 | MLVCB_P08361_3mut |
| GGG | | MLVFF_P26809_3mutA |
| EAAAKPAPGSS | 13,270 | XMRV6_A1Z651_3mutA |
| GGSGSSEAAAK | 13,271 | PERV_Q4VFZ2_3mutA_WS |
| EAAAKGSS | 13,272 | MLVMS_P03355_3mut |
| GGSGSSEAAAK | 13,273 | BAEVM_P10272_3mut |
| GGSGGG | 13,274 | MLVBM_Q7SVK7_3mutA_WS |
| GGGPAP | 13,275 | MLVMS_P03355_PLV919 |
| GGSPAPGGG | 13,276 | PERV_Q4VFZ2_3mutA_WS |
| GGGGGSEAAAK | 13,277 | MLVFF_P26809_3mutA |
| EAAAKGSSGGS | 13,278 | MLVBM_Q7SVK7_3mut |
| PAPAP | 13,279 | XMRV6_A1Z651_3mut |
| GSSPAPGGS | 13,280 | MLVBM_Q7SVK7_3mutA_WS |
| GSSEAAAKGGG | 13,281 | WMSV_P03359_3mutA |
| EAAAKGGGGGS | 13,282 | PERV_Q4VFZ2_3mut |
| GSSGSSGSSGSSGSS | 13,283 | MLVCB_P08361_3mutA |
| EAAAKGGGGSS | 13,284 | PERV_Q4VFZ2_3mut |
| EAAAKGSS | 13,285 | PERV_Q4VFZ2_3mut |
| EAAAKEAAAKEAAAKEAAAKEAAAKEAAAK | 13,286 | AVIRE_P03360_3mutA |
| EAAAKGGS | 13,287 | MLVCB_P08361_3mut |
| GSSGGSEAAAK | 13,288 | MLVAV_P03356_3mutA |
| EAAAKPAPGGS | 13,289 | PERV_Q4VFZ2_3mut |
| GGSGGS | 13,290 | MLVAV_P03356_3mutA |
| EAAAKGSSGGG | 13,291 | AVIRE_P03360_3mutA |
| GGSGGSGGSGGS | 13,292 | PERV_Q4VFZ2_3mut |
| GGGGGGGG | 13,293 | KORV_Q9TTC1_3mutA |
| GGSGSSEAAAK | 13,294 | MLVCB_P08361_3mutA |
| EAAAKGGG | 13,295 | MLVBM_Q7SVK7_3mutA_WS |
| GGGGSGGGGSGGGGS | 13,296 | MLVCB_P08361_3mut |
| GGSGGSGGSGGS | 13,297 | PERV_Q4VFZ2_3mutA_WS |
| PAPAPAPAPAP | 13,298 | WMSV_P03359_3mut |
| EAAAKEAAAKEAAAKEAAAK | 13,299 | PERV_Q4VFZ2_3mut |
| GGSGGSGGS | 13,300 | XMRV6_A1Z651_3mutA |
| PAPGGGGSS | 13,301 | BAEVM_P10272_3mutA |
| GSSEAAAKGGS | 13,302 | MLVCB_P08361_3mut |
| GSSGGGPAP | 13,303 | MLVCB_P08361_3mutA |
| GGSGSS | 13,304 | MLVBM_Q7SVK7_3mutA_WS |
| GGGGGSEAAAK | 13,305 | MLVAV_P03356_3mutA |
| GSSEAAAK | 13,306 | PERV_Q4VFZ2_3mutA_WS |
| GGGGGSGSS | 13,307 | MLVBM_Q7SVK7_3mutA_WS |
| EAAAKGGSGSS | 13,308 | MLVFF_P26809_3mut |
| PAP | | FLV_P10273_3mutA |
| GGGGG | 13,310 | MLVMS_P03355_3mutA_WS |
| EAAAK | 13,311 | PERV_Q4VFZ2_3mut |
| GSS | | FLV_P10273_3mutA |
| PAPAPAPAPAPAP | 13,313 | KORV_Q9TTC1-Pro_3mutA |
| EAAAKEAAAKEAAAKEAAAK | 13,314 | MLVCB_P08361_3mut |
| EAAAKGGGGSEAAAK | 13,315 | XMRV6_A1Z651_3mut |
| PAPGGSGGG | 13,316 | MLVBM_Q7SVK7_3mutA_WS |
| GGSGGGPAP | 13,317 | WMSV_P03359_3mutA |
| GGGGSSEAAAK | 13,318 | MLVBM_Q7SVK7_3mutA_WS |
| PAPGGGGSS | 13,319 | MLVCB_P08361_3mut |
| GGSGGSGGSGGS | 13,320 | PERV_Q4VFZ2_3mutA_WS |
| PAPGGSGGG | 13,321 | MLVMS_P03355_3mutA_WS |
| GSSPAPGGS | 13,322 | MLVCB_P08361_3mutA |
| GSSGSSGSS | 13,323 | MLVFF_P26809_3mut |
| PAPGGGGGS | 13,324 | MLVBM_Q7SVK7_3mutA_WS |
| GSSPAP | 13,325 | PERV_Q4VFZ2_3mut |
| GGSGGG | 13,326 | KORV_Q9TTC1-Pro_3mut |
| EAAAKGGGGSEAAAK | 13,327 | PERV_Q4VFZ2_3mutA_WS |
| GGSPAPEAAAK | 13,328 | PERV_Q4VFZ2_3mutA_WS |
| EAAAKPAP | 13,329 | BAEVM_P10272_3mut |
| GGGGSGGGGSGGGGSGGGGSGGGGSGGGGS | 13,330 | MLVMS_P03355_3mut |
| EAAAKGGGGSS | 13,331 | MLVFF_P26809_3mut |
| EAAAKEAAAK | 13,332 | MLVCB_P08361_3mut |
| GSSEAAAKGGS | 13,333 | PERV_Q4VFZ2_3mut |
| GGSPAP | 13,334 | KORV_Q9TTC1-Pro_3mutA |
| EAAAKEAAAKEAAAKEAAAK | 13,335 | MLVMS_P03355_3mutA_WS |
| GSSGSSGSSGSSGSS | 13,336 | BAEVM_P10272_3mut |
| PAPEAAAK | 13,337 | MLVMS_P03355_3mut |
| GSSGGSPAP | 13,338 | PERV_Q4VFZ2 |
| GGGPAPGGS | 13,339 | BAEVM_P10272_3mutA |
| EAAAKPAPGGS | 13,340 | MLVMS_P03355_PLV919 |
| GGGGSGGGGS | 13,341 | PERV_Q4VFZ2 |
| GGGEAAAK | 13,342 | KORV_Q9TTC1-Pro_3mut |
| EAAAKGGGGGS | 13,343 | FLV_P10273_3mutA |
| GGSPAPGSS | 13,344 | MLVMS_P03355_3mut |
| GSSPAPEAAAK | 13,345 | MLVMS_P03355_3mutA_WS |
| GSAGSAAGSGEF | 13,346 | MLVBM_Q7SVK7_3mutA_WS |
| EAAAK | 13,347 | BAEVM_P10272_3mutA |
| EAAAKGGGGSS | 13,348 | BAEVM_P10272_3mutA |
| GGG | | WMSV_P03359_3mut |
| GGSGSSPAP | 13,350 | BAEVM_P10272_3mut |
| GGSEAAAKPAP | 13,351 | MLVBM_Q7SVK7_3mutA_WS |
| EAAAKGGSGSS | 13,352 | MLVCB_P08361_3mut |
| PAPGSS | 13,353 | MLVAV_P03356_3mutA |
| PAPEAAAKGGG | 13,354 | MLVCB_P08361_3mutA |
| AEAAAKEAAAKEAAAKEAAAKALEAEAAAKEAAAKEAAAKEAAAKA | 13,355 | FOAMV_P14350-Pro_2mut |
| GSSGSSGSS | 13,356 | PERV_Q4VFZ2_3mut |
| PAPGGG | 13,357 | MLVMS_P03355_3mut |
| PAPGGS | 13,358 | PERV_Q4VFZ2_3mut |
| GSSGGG | 13,359 | MLVMS_P03355_PLV919 |
| GSSGSSGSSGSSGSSGSS | 13,360 | WMSV_P03359_3mut |
| PAP | | AVIRE_P03360_3mutA |
| EAAAKGSSPAP | 13,362 | MLVBM_Q7SVK7_3mutA_WS |
| GSSGSSGSSGSS | 13,363 | MLVMS_P03355_PLV919 |
| GGGGSGGGGSGGGGSGGGGSGGGGS | 13,364 | AVIRE_P03360 |
| GGGGS | 13,365 | PERV_Q4VFZ2_3mut |
| EAAAKGSSGGG | 13,366 | MLVBM_Q7SVK7_3mutA_WS |
| GGGGGG | 13,367 | KORV_Q9TTC1-Pro_3mut |
| GGSGSSEAAAK | 13,368 | PERV_Q4VFZ2_3mut |
| GSSPAPEAAAK | 13,369 | MLVBM_Q7SVK7_3mutA_WS |
| GGGGSGGGGS | 13,370 | MLVBM_Q7SVK7_3mutA_WS |
| GSSGGGGGS | 13,371 | MLVAV_P03356_3mutA |
| GSAGSAAGSGEF | 13,372 | WMSV_P03359_3mutA |
| GGGEAAAKGSS | 13,373 | BAEVM_P10272_3mutA |
| AEAAAKEAAAKEAAAKEAAAKALEAEAAAKEAAAKEAAAKEAAAKA | 13,374 | FFV_093209-Pro_2mut |
| PAPGGSGGG | 13,375 | MLVCB_P08361_3mutA |
| EAAAKEAAAKEAAAKEAAAKEAAAK | 13,376 | SFV3L_P27401_2mut |
| GGSGSSPAP | 13,377 | MLVMS_P03355_PLV919 |
| GGGGGG | 13,378 | PERV_Q4VFZ2_3mut |
| EAAAKEAAAKEAAAKEAAAKEAAAK | 13,379 | PERV_Q4VFZ2_3mut |
| EAAAKGSSPAP | 13,380 | MLVFF_P26809_3mut |
| GGGPAPGGS | 13,381 | MLVBM_Q7SVK7_3mutA_WS |
| AEAAAKEAAAKEAAAKEAAAKALEAEAAAKEAAAKEAAAKEAAAKA | 13,382 | SFV3L_P27401 |
| PAP | | PERV_Q4VFZ2_3mut |
| EAAAKGGS | 13,384 | MLVMS_P03355_PLV919 |
| GSSGGSEAAAK | 13,385 | WMSV_P03359_3mutA |
| GGSGSSEAAAK | 13,386 | KORV_Q9TTC1-Pro_3mutA |
| EAAAKEAAAKEAAAK | 13,387 | PERV_Q4VFZ2 |
| GGSGGGEAAAK | 13,388 | MLVMS_P03355_3mutA_WS |
| GGGGSGGGGSGGGGSGGGGS | 13,389 | BAEVM_P10272_3mut |
| EAAAKGSS | 13,390 | XMRV6_A1Z651_3mutA |
| GSSGGGGGS | 13,391 | WMSV_P03359_3mutA |
| GSSGSSGSSGSSGSSGSS | 13,392 | MLVFF_P26809_3mutA |
| GGSGSS | 13,393 | MLVAV_P03356_3mutA |
| EAAAKGGGGSEAAAK | 13,394 | MLVMS_P03355_PLV919 |
| EAAAKGGGPAP | 13,395 | PERV_Q4VFZ2 |
| GGSEAAAKGGG | 13,396 | MLVAV_P03356_3mutA |
| EAAAKEAAAKEAAAKEAAAKEAAAKEAAAK | 13,397 | MLVBM_Q7SVK7_3mut |
| EAAAKEAAAKEAAAKEAAAKEAAAKEAAAK | 13,398 | KORV_Q9TTC1-Pro_3mutA |
| GSSPAPEAAAK | 13,399 | MLVFF_P26809_3mutA |
| GGGGSEAAAKGGGGS | 13,400 | PERV_Q4VFZ2_3mut |
| GSSGSSGSSGSS | 13,401 | PERV_Q4VFZ2_3mut |
| GGSEAAAK | 13,402 | MLVFF_P26809_3mutA |
| GGGGGGGG | 13,403 | MLVMS_P03355_3mut |
| GSSGGG | 13,404 | XMRV6_A1Z651_3mutA |
| EAAAKGGS | 13,405 | BAEVM_P10272_3mutA |
| GGGGS | 13,406 | BAEVM_P10272_3mutA |
| GGSEAAAKGGG | 13,407 | KORV_Q9TTC1-Pro_3mutA |
| GGSGSSGGG | 13,408 | KORV_Q9TTC1_3mutA |
| GGSGSSEAAAK | 13,409 | WMSV_P03359_3mut |
| EAAAKGGSGSS | 13,410 | MLVBM_Q7SVK7_3mutA_WS |
| GGS | | BAEVM_P10272_3mutA |
| GGGPAPGSS | 13,412 | WMSV_P03359_3mutA |
| GSSGSSGSSGSSGSS | 13,413 | AVIRE_P03360_3mut |
| GGGEAAAKPAP | 13,414 | XMRV6_A1Z651_3mut |
| GSSGGG | 13,415 | MLVFF_P26809_3mutA |
| GGSPAPGSS | 13,416 | PERV_Q4VFZ2_3mut |
| PAPGGS | 13,417 | MLVCB_P08361_3mut |
| PAPAPAPAPAP | 13,418 | KORV_Q9TTC1_3mutA |
| GSSGGS | 13,419 | MLVCB_P08361_3mutA |
| GSSGGSEAAAK | 13,420 | PERV_Q4VFZ2_3mut |
| EAAAKGSSGGS | 13,421 | MLVMS_P03355_PLV919 |
| EAAAKGGG | 13,422 | WMSV_P03359_3mut |
| PAPGGGGGS | 13,423 | BAEVM_P10272_3mutA |
| GGGGSEAAAKGGGGS | 13,424 | WMSV_P03359_3mutA |
| EAAAKEAAAKEAAAKEAAAKEAAAKEAAAK | 13,425 | MLVMS_P03355_3mutA_WS |
| GGS | | KORV_Q9TTC1-Pro_3mutA |
| GSSGGSPAP | 13,427 | BAEVM_P10272_3mutA |
| GGG | | MLVMS_P03355_PLV919 |
| PAPGSS | 13,429 | KORV_Q9TTC1-Pro_3mut |
| GGSEAAAKGGG | 13,430 | FLV_P10273_3mutA |
| GGSEAAAKPAP | 13,431 | PERV_Q4VFZ2_3mutA_WS |
| GGGGSSPAP | 13,432 | XMRV6_A1Z651_3mutA |
| EAAAKEAAAKEAAAKEAAAKEAAAK | 13,433 | PERV_Q4VFZ2_3mutA_WS |
| GGGG | 13,434 | PERV_Q4VFZ2_3mutA_WS |
| GGSEAAAKPAP | 13,435 | MLVMS_P03355_3mut |
| PAPGSSGGG | 13,436 | MLVMS_P03355_3mutA_WS |
| PAPEAAAKGGS | 13,437 | AVIRE_P03360_3mut |
| GGGGSSPAP | 13,438 | MLVMS_P03355_3mutA_WS |
| GGGGSGGGGSGGGGSGGGGS | 13,439 | PERV_Q4VFZ2_3mut |
| GGGEAAAK | 13,440 | MLVMS_P03355_3mut |
| GGGGSS | 13,441 | MLVFF_P26809_3mut |
| GGSPAPGSS | 13,442 | XMRV6_A1Z651_3mut |
| GGGGS | 13,443 | KORV_Q9TTC1-Pro_3mutA |
| EAAAKGSSGGS | 13,444 | FLV_P10273_3mutA |
| GSS | | MLVMS_P03355_PLV919 |
| GGGG | 13,446 | MLVMS_P03355_PLV919 |
| GSSGGS | 13,447 | MLVMS_P03355_PLV919 |
| GGSGGSGGSGGS | 13,448 | MLVMS_P03355_3mut |
| PAPEAAAKGGS | 13,449 | MLVMS_P03355_3mut |
| EAAAKGSSGGG | 13,450 | BAEVM_P10272_3mutA |
| GSSEAAAK | 13,451 | KORV_Q9TTC1-Pro_3mutA |
| GSAGSAAGSGEF | 13,452 | KORV_Q9TTC1_3mutA |
| GGGGGSEAAAK | 13,453 | MLVCB_P08361_3mut |
| GGGG | 13,454 | WMSV_P03359_3mut |
| GGGGSSEAAAK | 13,455 | MLVMS_P03355_PLV919 |
| PAPGGG | 13,456 | WMSV_P03359_3mutA |
| EAAAKGGSGGG | 13,457 | MLVAV_P03356_3mutA |
| GGGPAPGGS | 13,458 | MLVMS_P03355_3mut |
| EAAAKPAP | 13,459 | PERV_Q4VFZ2_3mutA_WS |
| GSSGSSGSS | 13,460 | KORV_Q9TTC1-Pro_3mutA |
| GSSPAPGGS | 13,461 | XMRV6_A1Z651_3mut |
| GGGGGSPAP | 13,462 | BAEVM_P10272_3mutA |
| GGSGSSGGG | 13,463 | PERV_Q4VFZ2_3mutA_WS |
| GGGEAAAKGSS | 13,464 | AVIRE_P03360_3mut |
| GSSEAAAK | 13,465 | FLV_P10273_3mutA |
| EAAAK | 13,466 | MLVMS_P03355_3mut |
| EAAAKGGSGSS | 13,467 | WMSV_P03359_3mut |
| GSSEAAAKGGG | 13,468 | PERV_Q4VFZ2_3mut |
| PAPGSSGGG | 13,469 | BAEVM_P10272_3mutA |
| EAAAKGGGGGS | 13,470 | MLVMS_P03355_3mut |
| GGSEAAAKPAP | 13,471 | AVIRE_P03360_3mut |
| GGGPAPGGS | 13,472 | XMRV6_A1Z651_3mut |
| GGGGS | 13,473 | KORV_Q9TTC1_3mutA |
| GGSGGSGGSGGSGGS | 13,474 | XMRV6_A1Z651_3mut |
| GGGPAP | 13,475 | KORV_Q9TTC1-Pro_3mut |
| EAAAKPAP | 13,476 | MLVBM_Q7SVK7_3mutA_WS |
| GGSEAAAK | 13,477 | MLVMS_P03355_PLV919 |
| GSSEAAAKPAP | 13,478 | KORV_Q9TTC1-Pro_3mutA |
| GGSGSS | 13,479 | MLVMS_P03355_3mut |
| EAAAKPAPGGG | 13,480 | PERV_Q4VFZ2_3mut |
| GGSPAPEAAAK | 13,481 | KORV_Q9TTC1_3mutA |
| GGSEAAAKGGG | 13,482 | AVIRE_P03360_3mutA |
| GGGGSEAAAKGGGGS | 13,483 | MLVMS_P03355_PLV919 |
| GSSGGGEAAAK | 13,484 | KORV_Q9TTC1-Pro_3mutA |
| EAAAKGGGPAP | 13,485 | WMSV_P03359_3mut |
| GSSPAP | 13,486 | XMRV6_A1Z651_3mutA |
| AEAAAKEAAAKEAAAKEAAAKALEAEAAAKEAAAKEAAAKEAAAKA | 13,487 | SFV3L_P27401-Pro |
| GGSEAAAKGSS | 13,488 | MLVMS_P03355_PLV919 |
| GSSGGSEAAAK | 13,489 | KORV_Q9TTC1-Pro_3mutA |
| GGSEAAAKGSS | 13,490 | KORV_Q9TTC1-Pro_3mutA |
| EAAAKGGG | 13,491 | AVIRE_P03360_3mutA |
| GSSGGSEAAAK | 13,492 | BAEVM_P10272_3mutA |
| GGGGSEAAAKGGGGS | 13,493 | KORV_Q9TTC1-Pro_3mut |
| PAPGSSEAAAK | 13,494 | MLVMS_P03355_3mut |
| PAPEAAAK | 13,495 | WMSV_P03359_3mut |
| PAPGGSGSS | 13,496 | PERV_Q4VFZ2_3mutA_WS |
| PAPGSS | 13,497 | BAEVM_P10272_3mut |
| PAPGGGGGS | 13,498 | MLVMS_P03355_3mut |
| EAAAKPAPGSS | 13,499 | MLVBM_Q7SVK7_3mutA_WS |
| GSSPAPGGS | 13,500 | MLVMS_P03355_PLV919 |
| GGSGSSEAAAK | 13,501 | MLVMS_P03355_3mut |
| GGGGGG | 13,502 | KORV_Q9TTC1-Pro_3mutA |
| EAAAKEAAAKEAAAKEAAAK | 13,503 | MLVBM_Q7SVK7_3mut |
| GGSPAPGSS | 13,504 | MLVMS_P03355_PLV919 |
| PAPAPAPAPAP | 13,505 | MLVCB_P08361_3mut |
| GGSGSSPAP | 13,50€ | WMSV_P03359_3mutA |
| EAAAKGGSGGG | 13,507 | PERV_Q4VFZ2_3mutA_WS |
| GSSGSSGSSGSSGSS | 13,508 | PERV_Q4VFZ2_3mut |
| AEAAAKEAAAKEAAAKEAAAKALEAEAAAKEAAAKEAAAKEAAAKA | 13,509 | KORV_Q9TTC1_3mutA |
| GSSGGGEAAAK | 13,510 | WMSV_P03359_3mutA |
| GSSGGSEAAAK | 13,511 | FLV_P10273_3mutA |
| GGGGGGGG | 13,512 | PERV_Q4VFZ2_3mut |
| PAPGGSEAAAK | 13,513 | FLV_P10273_3mutA |
| GGGGSSPAP | 13,514 | BAEVM_P10272_3mutA |
| PAPAPAPAP | 13,515 | WMSV_P03359_3mut |
| GGSEAAAKPAP | 13,516 | PERV_Q4VFZ2_3mut |
| PAPGGSGGG | 13,517 | BAEVM_P10272_3mutA |
| EAAAKEAAAKEAAAKEAAAKEAAAKEAAAK | 13,518 | MLVMS_P03355_3mut |
| GGGGSGGGGSGGGGS | 13,519 | PERV_Q4VFZ2_3mut |
| GGSGGGPAP | 13,520 | PERV_Q4VFZ2_3mut |
| GGGPAPEAAAK | 13,521 | MLVFF_P26809_3mut |
| GGGGGSGSS | 13,522 | MLVMS_P03355_3mutA_WS |
| GSS | | MLVCB_P08361_3mut |
| GGGGGSPAP | 13,524 | MLVMS_P03355_PLV919 |
| GGSPAP | 13,525 | MLVAV_P03356_3mutA |
| GGGPAPGGS | 13,526 | KORV_Q9TTC1-Pro_3mutA |
| PAPGSSGGG | 13,527 | FLV_P10273_3mutA |
| PAPGSSGGG | 13,528 | WMSV_P03359_3mutA |
| PAPGGS | 13,529 | MLVBM_Q7SVK7_3mutA_WS |
| GGGEAAAKGSS | 13,530 | PERV_Q4VFZ2_3mutA_WS |
| GGSEAAAKGSS | 13,531 | MLVBM_Q7SVK7_3mutA_WS |
| PAPGGSEAAAK | 13,532 | MLVCB_P08361_3mut |
| GGSEAAAKGGG | 13,533 | XMRV6_A1Z651_3mutA |
| GGSGGGGSS | 13,534 | WMSV_P03359_3mut |
| GGGEAAAKPAP | 13,535 | KORV_Q9TTC1_3mutA |
| EAAAKGSS | 13,536 | KORV_Q9TTC1-Pro_3mut |
| PAPEAAAKGSS | 13,537 | MLVFF_P26809_3mut |
| GSAGSAAGSGEF | 13,538 | PERV_Q4VFZ2_3mut |
| EAAAKGGGGGS | 13,539 | WMSV_P03359_3mut |
| EAAAKGSSPAP | 13,540 | WMSV_P03359_3mutA |
| GGGGSEAAAKGGGGS | 13,541 | XMRV6_A1Z651_3mutA |
| GSSEAAAKPAP | 13,542 | SFV3L_P27401-Pro_2mutA |
| 0 | 13,543 | PERV_Q4VFZ2_3mutA_WS |
| PAPGGS | 13,544 | BAEVM_P10272_3mut |
| PAP | | AVIRE_P03360_3mut |
| PAPAPAP | 13,546 | MLVBM_Q7SVK7_3mutA_WS |
| GGGG | 13,547 | PERV_Q4VFZ2_3mutA_WS |
| GSSGGSEAAAK | 13,548 | MLVBM_Q7SVK7_3mut |
| GGSGGGGSS | 13,549 | MLVFF_P26809_3mut |
| GGGGSSGGS | 13,550 | AVIRE_P03360_3mutA |
| GSSPAPGGG | 13,551 | PERV_Q4VFZ2_3mutA_WS |
| GGSEAAAKPAP | 13,552 | MLVMS_P03355_PLV919 |
| PAP | | KORV_Q9TTC1-Pro_3mut |
| GSSGGS | 13,554 | PERV_Q4VFZ2_3mut |
| GGGGG | 13,555 | PERV_Q4VFZ2_3mut |
| GSSGGGPAP | 13,556 | FLV_P10273_3mutA |
| GSSEAAAKGGG | 13,557 | KORV_Q9TTC1-Pro_3mut |
| EAAAKEAAAKEAAAKEAAAKEAAAKEAAAK | 13,558 | MLVCB_P08361_3mut |
| GGSEAAAKPAP | 13,559 | MLVCB_P08361_3mut |
| PAPAPAPAPAPAP | 13,560 | BAEVM_P10272_3mutA |
| GGGGSEAAAKGGGGS | 13,561 | MLVMS_P03355_3mut |
| EAAAKPAPGSS | 13,562 | MLVMS_P03355_3mut |
| GSSGSSGSSGSSGSS | 13,563 | MLVBM_Q7SVK7_3mutA_WS |
| PAPEAAAKGSS | 13,564 | MLVAV_P03356_3mut |
| AEAAAKEAAAKEAAAKEAAAKALEAEAAAKEAAAKEAAAKEAAAKA | 13,565 | AVIRE_P03360_3mut |
| AEAAAKEAAAKEAAAKEAAAKALEAEAAAKEAAAKEAAAKEAAAKA | 13,566 | PERV_Q4VFZ2_3mut |
| GGSEAAAKGGG | 13,567 | PERV_Q4VFZ2_3mutA_WS |
| GGSGGGGSS | 13,568 | MLVFF_P26809_3mutA |
| PAPEAAAKGSS | 13,569 | MLVCB_P08361_3mut |
| GGG | | PERV_Q4VFZ2_3mutA_WS |
| GGSGGGEAAAK | 13,571 | MLVMS_P03355_3mut |
| EAAAKGGGGSS | 13,572 | WMSV_P03359_3mut |
| GSSPAPGGG | 13,573 | WMSV_P03359_3mutA |
| EAAAKGSSGGG | 13,574 | PERV_Q4VFZ2_3mut |
| GGSGGGEAAAK | 13,575 | PERV_Q4VFZ2_3mutA_WS |
| GGSGGSGGSGGSGGS | 13,576 | PERV_Q4VFZ2_3mutA_WS |
| EAAAKPAPGGS | 13,577 | PERV_Q4VFZ2_3mutA_WS |
| GGGGGSEAAAK | 13,578 | PERV_Q4VFZ2_3mutA_WS |
| GSSPAP | 13,579 | MLVFF_P26809_3mut |
| GGGEAAAKPAP | 13,580 | AVIRE_P03360_3mut |
| GSSGGSEAAAK | 13,581 | MLVMS_P03355_PLV919 |
| EAAAKPAPGGS | 13,582 | WMSV_P03359_3mutA |
| PAPGGG | 13,583 | KORV_Q9TTC1_3mutA |
| EAAAKGSSPAP | 13,584 | KORV_Q9TTC1-Pro_3mut |
| GSSPAPEAAAK | 13,585 | MLVFF_P26809_3mut |
| GGSGGGEAAAK | 13,586 | MLVFF_P26809_3mutA |
| GSSGSSGSS | 13,587 | WMSV_P03359_3mutA |
| EAAAKGGS | 13,588 | BAEVM_P10272_3mut |
| EAAAKPAPGGS | 13,589 | KORV_Q9TTC1_3mutA |
| EAAAKPAPGGS | 13,590 | BAEVM_P10272_3mutA |
| GSSGGGGGS | 13,591 | PERV_Q4VFZ2_3mut |
| PAPGGGGSS | 13,592 | PERV_Q4VFZ2_3mut |
| GSSGSSGSS | 13,593 | WMSV_P03359_3mut |
| EAAAKEAAAKEAAAKEAAAK | 13,594 | WMSV_P03359_3mut |
| GGS | | AVIRE_P03360_3mut |
| EAAAKPAPGSS | 13,596 | MLVFF_P26809_3mut |
| EAAAKGGG | 13,597 | KORV_Q9TTC1_3mut |
| PAPGSSEAAAK | 13,598 | MLVMS_P03355_3mut |
| PAPGSSGGS | 13,599 | MLVMS_P03355_PLV919 |
| GSSPAPEAAAK | 13,600 | MLVMS_P03355_3mut |
| GSSGSSGSSGSSGSSGSS | 13,601 | WMSV_P03359_3mutA |
| GGGGS | 13,602 | BAEVM_P10272_3mut |
| GSSPAP | 13,603 | MLVMS_P03355_3mut |
| EAAAKGGGGSEAAAK | 13,604 | KORV_Q9TTC1-Pro_3mutA |
| EAAAKEAAAK | 13,605 | WMSV_P03359_3mutA |
| GGGGSSGGS | 13,606 | MLVCB_P08361_3mutA |
| PAPGGSEAAAK | 13,607 | BAEVM_P10272_3mut |
| EAAAKGGSPAP | 13,608 | MLVFF_P26809_3mut |
| GSSGGSGGG | 13,609 | MLVBM_Q7SVK7_3mutA_WS |
| GSSGGS | 13,610 | PERV_Q4VFZ2_3mut |
| PAPGGSGSS | 13,611 | PERV_Q4VFZ2_3mutA_WS |
| EAAAKGGSGSS | 13,612 | KORV_Q9TTC1-Pro_3mutA |
| PAPAP | 13,613 | MLVCB_P08361_3mut |
| EAAAKGSSPAP | 13,614 | PERV_Q4VFZ2_3mutA_WS |
| EAAAKPAPGGG | 13,615 | MLVMS_P03355_PLV919 |
| GGGGSGGGGSGGGGSGGGGSGGGGSGGGGS | 13,616 | MLVBM_Q7SVK7_3mut |
| EAAAKGGGGSS | 13,617 | MLVMS_P03355_PLV919 |
| PAPEAAAK | 13,618 | PERV_Q4VFZ2_3mut |
| EAAAKPAPGSS | 13,619 | BAEVM_P10272_3mutA |
| GGSPAP | 13,620 | PERV_Q4VFZ2_3mutA_WS |
| GGSGGS | 13,621 | BAEVM_P10272_3mutA |
| PAPEAAAKGSS | 13,622 | KORV_Q9TTC1_3mut |
| PAPGSS | 13,623 | MLVMS_P03355_PLV919 |
| PAPAPAPAPAP | 13,624 | MLVAV_P03356_3mutA |
| GGG | | XMRV6_A1Z651_3mutA |
| GGGPAP | 13,626 | PERV_Q4VFZ2_3mutA_WS |
| GSSPAPEAAAK | 13,627 | KORV_Q9TTC1_3mutA |
| PAP | | BAEVM_P10272_3mutA |
| GGSPAP | 13,629 | BAEVM_P10272_3mutA |
| PAPEAAAKGGS | 13,630 | MLVMS_P03355_PLV919 |
| PAPGSSGGS | 13,631 | PERV_Q4VFZ2_3mutA_WS |
| PAPAPAPAPAPAP | 13,632 | PERV_Q4VFZ2_3mut |
| EAAAKEAAAKEAAAK | 13,633 | MLVCB_P08361_3mut |
| GGSGGSGGSGGSGGS | 13,634 | MLVMS_P03355_PLV919 |
| EAAAKPAPGGS | 13,635 | MLVMS_P03355_3mut |
| GGSGGS | 13,636 | MLVMS_P03355_PLV919 |
| EAAAKPAP | 13,637 | MLVMS_P03355_3mutA_WS |
| GGSEAAAK | 13,638 | XMRV6_A1Z651_3mutA |
| GGSGGG | 13,639 | KORV_Q9TTC1_3mut |
| GGSGGGEAAAK | 13,640 | PERV_Q4VFZ2_3mut |
| PAPEAAAKGGG | 13,641 | AVIRE_P03360 |
| PAPAP | 13,642 | PERV_Q4VFZ2_3mut |
| GSS | | KORV_Q9TTC1-Pro_3mutA |
| EAAAKGSSGGG | 13,644 | MLVAV_P03356_3mutA |
| GGSPAPGSS | 13,645 | MLVBM_Q7SVK7_3mutA_WS |
| PAPEAAAK | 13,646 | MLVAV_P03356_3mut |
| EAAAKGGSPAP | 13,647 | BAEVM_P10272_3mutA |
| PAPAPAPAP | 13,648 | WMSV_P03359_3mutA |
| PAPGGSEAAAK | 13,649 | MLVMS_P03355_3mut |
| GGSGGSGGSGGS | 13,650 | WMSV_P03359_3mut |
| GGGGGSGSS | 13,651 | XMRV6_A1Z651_3mut |
| PAPGGSGGG | 13,652 | KORV_Q9TTC1_3mutA |
| GGS | | MLVMS_P03355_3mut |
| EAAAK | 13,654 | WMSV_P03359_3mut |
| GGGEAAAKGSS | 13,655 | MLVBM_Q7SVK7_3mutA_WS |
| GGSPAPGSS | 13,656 | MLVCB_P08361_3mut |
| GGSEAAAKPAP | 13,657 | PERV_Q4VFZ2_3mut |
| GGGGSGGGGSGGGGSGGGGSGGGGS | 13,658 | MLVCB_P08361_3mutA |
| GGSGSS | 13,659 | BAEVM_P10272_3mutA |
| GGGEAAAKGSS | 13,660 | WMSV_P03359_3mutA |
| EAAAKGGSPAP | 13,661 | WMSV_P03359_3mut |
| GSSPAPEAAAK | 13,662 | MLVMS_P03355_3mut |
| GGSGGSGGSGGS | 13,663 | MLVMS_P03355_PLV919 |
| GSSPAPEAAAK | 13,664 | WMSV_P03359_3mut |
| GSSGSSGSSGSS | 13,665 | PERV_Q4VFZ2 |
| GGSGSSEAAAK | 13,666 | WMSV_P03359_3mutA |
| GGSGGG | 13,667 | MLVFF_P26809_3mut |
| GGSPAPGGG | 13,668 | MLVFF_P26809_3mut |
| GGSGGSGGS | 13,669 | BAEVM_P10272_3mutA |
| GGGGSSEAAAK | 13,670 | MLVBM_Q7SVK7_3mut |
| GGSPAPGSS | 13,671 | MLVMS_P03355_3mut |
| EAAAKPAPGSS | 13,672 | AVIRE_P03360_3mut |
| GGGGSSGGS | 13,673 | FLV_P10273_3mutA |
| GGSPAPEAAAK | 13,674 | PERV_Q4VFZ2_3mut |
| GGSEAAAK | 13,675 | MLVMS_P03355_3mutA_WS |
| GSSGSSGSSGSS | 13,676 | MLVCB_P08361_3mutA |
| EAAAKEAAAKEAAAKEAAAKEAAAK | 13,677 | MLVMS_P03355_PLV919 |
| GGGGG | 13,678 | PERV_Q4VFZ2_3mut |
| GGSEAAAKGSS | 13,679 | MLVCB_P08361_3mutA |
| GSSGGG | 13,680 | MLVBM_Q7SVK7_3mutA_WS |
| PAPGSSGGG | 13,681 | KORV_Q9TTC1-Pro_3mutA |
| GGSGGS | 13,682 | BAEVM_P10272_3mut |
| EAAAKGGGGGS | 13,683 | MLVBM_Q7SVK7_3mutA_WS |
| GGSGSSPAP | 13,684 | MLVCB_P08361_3mut |
| PAPGSSGGG | 13,685 | KORV_Q9TTC1 |
| PAPGGSGGG | 13,686 | MLVMS_P03355_3mut |
| GGGG | 13,687 | WMSV_P03359_3mutA |
| EAAAKGGSPAP | 13,688 | MLVCB_P08361_3mut |
| GSSGSS | 13,689 | FLV_P10273_3mutA |
| GGSEAAAKPAP | 13,690 | SFV3L_P27401_2mut |
| EAAAKGSSGGS | 13,691 | MLVAV_P03356_3mutA |
| AEAAAKEAAAKEAAAKEAAAKALEAEAAAKEAAAKEAAAKEAAAKA | 13,692 | MLVAV_P03356_3mutA |
| EAAAKGGSGSS | 13,693 | PERV_Q4VFZ2_3mutA_WS |
| GGGGG | 13,694 | MLVCB_P08361_3mut |
| GGGEAAAK | 13,695 | BAEVM_P10272_3mut |
| GGSGGSGGSGGS | 13,696 | MLVCB_P08361_3mut |
| EAAAKEAAAKEAAAKEAAAKEAAAKEAAAK | 13,697 | PERV_Q4VFZ2 |
| PAPAPAPAPAP | 13,698 | MLVMS_P03355_3mutA_WS |
| EAAAKEAAAK | 13,699 | XMRV6_A1Z651_3mut |
| GSSGGSEAAAK | 13,700 | PERV_Q4VFZ2_3mutA_WS |
| PAPGGSEAAAK | 13,701 | KORV_Q9TTC1-Pro_3mutA |
| EAAAKGGGPAP | 13,702 | MLVBM_Q7SVK7_3mutA_WS |
| PAPGGSGSS | 13,703 | PERV_Q4VFZ2 |
| SGSETPGTSESATPES | 13,704 | MLVMS_P03355_3mut |
| GGSGGS | 13,705 | MLVMS_P03355_PLV919 |
| EAAAKGGS | 13,706 | FLV_P10273_3mut |
| GGSPAPGSS | 13,707 | MLVMS_P03355_3mutA_WS |
| EAAAKEAAAKEAAAKEAAAK | 13,708 | FFV_093209_2mut |
| GSSGGSGGG | 13,709 | MLVMS_P03355_3mutA_WS |
| PAPGSSEAAAK | 13,710 | WMSV_P03359_3mut |
| PAPAPAPAPAPAP | 13,711 | KORV_Q9TTC1_3mutA |
| GGGGSS | 13,712 | BAEVM_P10272_3mut |
| GGGGSEAAAKGGGGS | 13,713 | AVIRE_P03360_3mut |
| GSSPAPEAAAK | 13,714 | KORV_Q9TTC1-Pro_3mutA |
| PAPEAAAKGGG | 13,715 | MLVBM_Q7SVK7_3mut |
| EAAAKEAAAK | 13,716 | WMSV_P03359_3mut |
| EAAAK | 13,717 | SFV3L_P27401-Pro_2mutA |
| GSSGGSGGG | 13,718 | XMRV6_A1Z651_3mutA |
| GGGEAAAKPAP | 13,719 | WMSV_P03359_3mutA |
| GGSGGS | 13,720 | MLVFF_P26809_3mutA |
| EAAAKEAAAKEAAAKEAAAKEAAAKEAAAK | 13,721 | FOAMV_P14350_2mutA |
| GGGGG | 13,722 | MLVAV_P03356_3mutA |
| GSSGGSEAAAK | 13,723 | BAEVM_P10272_3mut |
| SGGSSGGSSGSETPGTSESATPESSGGSSGGSS | 13,724 | SFV1_P23074 |
| GGSGGGPAP | 13,725 | MLVCB_P08361_3mut |
| GGSGSS | 13,726 | PERV_Q4VFZ2_3mut |
| SGSETPGTSESATPES | 13,727 | MLVFF_P26809_3mut |
| EAAAKGGSPAP | 13,728 | MLVMS_P03355_3mut |
| PAPAP | 13,729 | PERV_Q4VFZ2_3mut |
| AEAAAKEAAAKEAAAKEAAAKALEAEAAAKEAAAKEAAAKEAAAKA | 13,730 | MLVBM_Q7SVK7_3mut |
| GGGGGS | 13,731 | BAEVM_P10272_3mutA |
| EAAAKEAAAK | 13,732 | AVIRE_P03360_3mut |
| GSSGGSEAAAK | 13,733 | PERV_Q4VFZ2_3mut |
| GGGEAAAK | 13,734 | WMSV_P03359_3mut |
| GSSGGGEAAAK | 13,735 | AVIRE_P03360_3mutA |
| GGG | | XMRV6_A1Z651_3mut |
| GGGGSEAAAKGGGGS | 13,737 | BAEVM_P10272_3mut |
| GGGG | 13,738 | MLVMS_P03355_3mut |
| GGSGGS | 13,739 | MLVMS_P03355_3mutA_WS |
| GGSGGGGSS | 13,740 | MLVBM_Q7SVK7_3mutA_WS |
| GSSPAPGGS | 13,741 | PERV_Q4VFZ2_3mut |
| GSSPAPEAAAK | 13,742 | PERV_Q4VFZ2_3mutA_WS |
| EAAAKGGS | 13,743 | WMSV_P03359_3mut |
| GGSGGSGGSGGS | 13,744 | PERV_Q4VFZ2_3mut |
| GGGGSSEAAAK | 13,745 | KORV_Q9TTC1-Pro_3mut |
| PAPAPAPAPAPAP | 13,746 | MLVAV_P03356_3mut |
| EAAAKGSSGGG | 13,747 | MLVMS_P03355_PLV919 |
| GGGGG | 13,748 | MLVBM_Q7SVK7_3mutA_WS |
| AEAAAKEAAAKEAAAKEAAAKALEAEAAAKEAAAKEAAAKEAAAKA | 13,749 | FFV_093209_2mutA |
| SGGSSGGSSGSETPGTSESATPESSGGSSGGSS | 13,750 | KORV_Q9TTC1-Pro_3mut |
| GGSPAPGGG | 13,751 | MLVMS_P03355_3mutA_WS |
| GGGEAAAKGGS | 13,752 | MLVMS_P03355_3mut |
| GGGEAAAK | 13,753 | PERV_Q4VFZ2_3mut |
| PAPEAAAKGGG | 13,754 | MLVMS_P03355_3mut |
| GSSGSSGSSGSSGSSGSS | 13,755 | BAEVM_P10272_3mutA |
| AEAAAKEAAAKEAAAKEAAAKALEAEAAAKEAAAKEAAAKEAAAKA | 13,756 | GALV_P21414_3mutA |
| EAAAKGGSPAP | 13,757 | FFV_093209-Pro |
| EAAAKEAAAK | 13,758 | MLVFF_P26809_3mut |
| GGGGSGGGGSGGGGSGGGGSGGGGSGGGGS | 13,759 | PERV_Q4VFZ2_3mutA_WS |
| GGSGGSGGSGGS | 13,760 | MLVAV_P03356_3mutA |
| EAAAKEAAAKEAAAKEAAAKEAAAK | 13,761 | SFV3L_P27401_2mutA |
| GSSGSSGSSGSSGSSGSS | 13,762 | BAEVM_P10272_3mut |
| GGGGS | 13,763 | MLVMS_P03355_PLV919 |
| AEAAAKEAAAKEAAAKEAAAKALEAEAAAKEAAAKEAAAKEAAAKA | 13,764 | SFV1_P23074 |
| GGGGSGGGGS | 13,765 | KORV_Q9TTC1-Pro_3mutA |
| GGGGSGGGGS | 13,766 | MLVMS_P03355_3mut |
| GGSGSS | 13,767 | KORV_Q9TTC1_3mutA |
| GSSPAPGGG | 13,768 | PERV_Q4VFZ2_3mut |
| GSSGGSPAP | 13,769 | PERV_Q4VFZ2_3mutA_WS |
| PAPGGS | 13,770 | PERV_Q4VFZ2_3mutA_WS |
| GGSPAPEAAAK | 13,771 | FOAMV_P14350_2mutA |
| GGGPAPGGS | 13,772 | SFV3L_P27401_2mut |
| PAPGSSGGG | 13,773 | MLVCB_P08361_3mut |
| GSSGGGEAAAK | 13,774 | AVIRE_P03360_3mut |
| GSSGGG | 13,775 | XMRV6_A1Z651_3mut |
| GSSGSS | 13,776 | PERV_Q4VFZ2_3mut |
| GSSGGG | 13,777 | MLVAV_P03356_3mutA |
| PAPGGGGGS | 13,778 | PERV_Q4VFZ2_3mut |
| GSSEAAAK | 13,779 | MLVMS_P03355_3mut |
| PAPGGG | 13,780 | FLV_P10273_3mutA |
| GGGGSGGGGS | 13,781 | PERV_Q4VFZ2_3mut |
| GSSGGS | 13,782 | MLVMS_P03355_PLV919 |
| GGGGSGGGGS | 13,783 | SFV3L_P27401_2mut |
| EAAAKGGSGSS | 13,784 | FLV_P10273_3mutA |
| GSSEAAAKGGS | 13,785 | MLVMS_P03355_3mutA_WS |
| PAPGSSEAAAK | 13,786 | SFV3L_P27401_2mutA |
| GGGGSGGGGS | 13,787 | SFV3L_P27401-Pro_2mutA |
| PAPGSSEAAAK | 13,788 | PERV_Q4VFZ2_3mut |
| PAPGSSEAAAK | 13,789 | PERV_Q4VFZ2 |
| GGSPAPGGG | 13,790 | AVIRE_P03360_3mut |
| GGGGGS | 13,791 | PERV_Q4VFZ2_3mutA_WS |
| GGGGSSGGS | 13,792 | PERV_Q4VFZ2_3mut |
| PAPAPAPAP | 13,793 | AVIRE_P03360_3mutA |
| GGSGGS | 13,794 | WMSV_P03359_3mutA |
| GGGPAPGGS | 13,795 | PERV_Q4VFZ2_3mut |
| GGSGGSGGSGGSGGS | 13,796 | MLVMS_P03355_PLV919 |
| GGSGGG | 13,797 | PERV_Q4VFZ2_3mut |
| EAAAKEAAAK | 13,798 | SFV3L_P27401_2mut |
| PAPGSS | 13,799 | XMRV6_A1Z651_3mut |
| GSSEAAAK | 13,800 | MLVFF_P26809_3mut |
| GGSPAPGGG | 13,801 | MLVMS_P03355_3mut |
| EAAAKGGG | 13,802 | WMSV_P03359_3mutA |
| GSSEAAAKGGS | 13,803 | PERV_Q4VFZ2_3mutA_WS |
| GSSGGSPAP | 13,804 | FFV_093209 |
| GGGGGS | 13,805 | KORV_Q9TTC1-Pro_3mut |
| GSSGGG | 13,806 | MLVCB_P08361_3mut |
| GSSGSS | 13,807 | MLVCB_P08361_3mutA |
| GGSEAAAKPAP | 13,808 | BAEVM_P10272_3mut |
| EAAAKGGGGSS | 13,809 | MLVCB_P08361_3mut |
| EAAAKPAPGGS | 13,810 | KORV_Q9TTC1-Pro_3mutA |
| GSSGSSGSSGSSGSS | 13,811 | MLVAV_P03356_3mutA |
| GGGGSEAAAKGGGGS | 13,812 | PERV_Q4VFZ2_3mutA_WS |
| GGSGSS | 13,813 | KORV_Q9TTC1-Pro_3mut |
| GSS | | SFV3L_P27401-Pro_2mutA |
| PAPAP | 13,815 | BAEVM_P10272_3mut |
| EAAAKPAP | 13,816 | BAEVM_P10272 |
| EAAAKEAAAKEAAAKEAAAKEAAAK | 13,817 | KORV_Q9TTC1-Pro_3mut |
| GGGGGGG | 13,818 | PERV_Q4VFZ2_3mutA_WS |
| GGGGS | 13,819 | MLVMS_P03355_3mut |
| GSSGGG | 13,820 | FLV_P10273_3mutA |
| PAPAPAPAPAP | 13,821 | FLV_P10273_3mut |
| EAAAKEAAAKEAAAK | 13,822 | WMSV_P03359_3mutA |
| GSSGGS | 13,823 | MLVBM_Q7SVK7_3mutA_WS |
| EAAAKPAPGGG | 13,824 | MLVMS_P03355_3mut |
| GSSPAPGGS | 13,825 | WMSV_P03359_3mut |
| PAPGSSGGG | 13,826 | PERV_Q4VFZ2_3mutA_WS |
| GSSGGG | 13,827 | AVIRE_P03360_3mutA |
| PAPGGSGSS | 13,828 | MLVFF_P26809_3mut |
| PAPGSS | 13,829 | PERV_Q4VFZ2_3mut |
| GGGGGSGSS | 13,830 | WMSV_P03359_3mutA |
| EAAAKGGGGSS | 13,831 | MLVBM_Q7SVK7_3mutA_WS |
| GGGGGGG | 13,832 | BAEVM_P10272_3mut |
| PAPEAAAKGSS | 13,833 | MLVMS_P03355_3mut |
| GGSGGGEAAAK | 13,834 | MLVMS_P03355_PLV919 |
| EAAAKGGGGGS | 13,835 | MLVCB_P08361_3mut |
| PAPGGS | 13,836 | KORV_Q9TTC1-Pro_3mut |
| GGGG | 13,837 | FLV_P10273_3mutA |
| EAAAKGGSGSS | 13,838 | MLVBM_Q7SVK7_3mutA_WS |
| GGGGSSGGS | 13,839 | MLVMS_P03355_3mutA_WS |
| GGGGGGGG | 13,840 | WMSV_P03359_3mut |
| GGSGSSGGG | 13,841 | MLVMS_P03355_PLV919 |
| GSSEAAAKGGS | 13,842 | KORV_Q9TTC1-Pro_3mutA |
| EAAAKPAPGSS | 13,843 | MLVCB_P08361_3mut |
| GGSPAPGSS | 13,844 | KORV_Q9TTC1_3mutA |
| PAPGSSGGG | 13,845 | BAEVM_P10272_3mut |
| EAAAKPAPGSS | 13,846 | WMSV_P03359_3mut |
| GGSPAPEAAAK | 13,847 | XMRV6_A1Z651_3mutA |
| GSSPAP | 13,848 | FLV_P10273_3mutA |
| GSS | | BAEVM_P10272_3mutA |
| EAAAKPAPGGS | 13,850 | FLV_P10273_3mutA |
| GGSGSSPAP | 13,851 | FLV_P10273_3mutA |
| PAPGSSGGS | 13,852 | MLVMS_P03355_3mut |
| GSAGSAAGSGEF | 13,853 | PERV_Q4VFZ2_3mutA_WS |
| GSSGGSEAAAK | 13,854 | KORV_Q9TTC1_3mutA |
| GSSGGS | 13,855 | MLVMS_P03355_3mutA_WS |
| EAAAKGGGGSEAAAK | 13,856 | SFV3L_P27401_2mut |
| GSSGGS | 13,857 | PERV_Q4VFZ2_3mutA_WS |
| GGSPAPEAAAK | 13,858 | FLV_P10273_3mut |
| GGSEAAAKGSS | 13,859 | PERV_Q4VFZ2_3mutA_WS |
| GSSPAPEAAAK | 13,860 | PERV_Q4VFZ2_3mutA_WS |
| GGSGSSGGG | 13,861 | PERV_Q4VFZ2_3mut |
| GGGG | 13,862 | AVIRE_P03360_3mutA |
| GGSEAAAKPAP | 13,863 | WMSV_P03359_3mut |
| GSSGGSPAP | 13,864 | MLVAV_P03356_3mutA |
| GSSGGSEAAAK | 13,865 | MLVMS_P03355_3mut |
| PAPEAAAKGGS | 13,866 | KORV_Q9TTC1-Pro_3mut |
| GGSPAP | 13,867 | PERV_Q4VFZ2_3mutA_WS |
| GGSEAAAK | 13,868 | MLVAV_P03356_3mutA |
| EAAAKGGGGSEAAAK | 13,869 | KORV_Q9TTC1-Pro_3mut |
| SGGSSGGSSGSETPGTSESATPESSGGSSGGSS | 13,870 | MLVMS_P03355_PLV919 |
| GSSEAAAK | 13,871 | KORV_Q9TTC1_3mutA |
| GGG | | AVIRE_P03360 |
| GGSEAAAKGSS | 13,873 | MLVBM_Q7SVK7_3mut |
| GGSEAAAKGSS | 13,874 | MLVMS_P03355_3mut |
| GGSPAPEAAAK | 13,875 | MLVCB_P08361_3mut |
| GGSGGGEAAAK | 13,876 | MLVCB_P08361_3mut |
| GGSEAAAKPAP | 13,877 | MLVMS_P03355_3mutA_WS |
| EAAAKGGSGSS | 13,878 | KORV_Q9TTC1-Pro_3mut |
| GGGEAAAKGGS | 13,879 | MLVCB_P08361_3mut |
| EAAAKGGGGSEAAAK | 13,880 | FLV_P10273_3mutA |
| GGSPAP | 13,881 | MLVFF_P26809_3mut |
| GGGGSSGGS | 13,882 | XMRV6_A1Z651_3mutA |
| PAP | | MLVCB_P08361_3mut |
| GGS | | SFV3L_P27401-Pro_2mutA |
| GGGGSGGGGS | 13,885 | MLVMS_P03355_3mut |
| GGGEAAAKGGS | 13,886 | MLVAV_P03356_3mutA |
| GSSGSSGSSGSSGSSGSS | 13,887 | MLVMS_P03355_PLV919 |
| PAPGSS | 13,888 | MLVCB_P08361_3mut |
| GGSGGSGGS | 13,889 | MLVMS_P03355_PLV919 |
| PAPGGSGGG | 13,890 | FLV_P10273_3mutA |
| GGGGSGGGGSGGGGS | 13,891 | FLV_P10273_3mut |
| GGSGSSGGG | 13,892 | KORV_Q9TTC1-Pro_3mutA |
| GGSGGSGGS | 13,893 | GALV_P21414_3mutA |
| GGGEAAAKGGS | 13,894 | WMSV_P03359_3mut |
| SGSETPGTSESATPES | 13,895 | KORV_Q9TTC1_3mutA |
| EAAAKGGGGGS | 13,896 | KORV_Q9TTC1-Pro_3mut |
| EAAAKGSSPAP | 13,897 | BAEVM_P10272_3mut |
| GGGG | 13,898 | MLVCB_P08361_3mut |
| GGGGSGGGGSGGGGSGGGGSGGGGS | 13,899 | MLVBM_Q7SVK7_3mut |
| GSSGGSGGG | 13,900 | MLVMS_P03355_PLV919 |
| GGSGSS | 13,901 | MLVFF_P26809_3mut |
| EAAAKGGS | 13,902 | AVIRE_P03360_3mutA |
| GSSEAAAKGGS | 13,903 | MLVBM_Q7SVK7_3mutA_WS |
| EAAAKPAPGGG | 13,904 | WMSV_P03359_3mut |
| PAPGSSGGG | 13,905 | MLVCB_P08361_3mutA |
| GGGGSSEAAAK | 13,906 | KORV_Q9TTC1-Pro_3mutA |
| GSSEAAAKPAP | 13,907 | BAEVM_P10272_3mutA |
| PAPGGGEAAAK | 13,908 | MLVBM_Q7SVK7_3mutA_WS |
| GGSGGGEAAAK | 13,909 | MLVCB_P08361_3mutA |
| GGGGSGGGGSGGGGSGGGGSGGGGSGGGGS | 13,910 | FFV_093209 |
| EAAAKGGGGGS | 13,911 | GALV_P21414_3mutA |
| GGSPAPGGG | 13,912 | MLVMS_P03355_3mut |
| GSSGSSGSS | 13,913 | FLV_P10273_3mutA |
| EAAAK | 13,914 | MLVBM_Q7SVK7_3mut |
| GGGGSSGGS | 13,915 | MLVMS_P03355_3mut |
| GGSGSSPAP | 13,916 | PERV_Q4VFZ2_3mut |
| EAAAKEAAAKEAAAKEAAAK | 13,917 | BAEVM_P10272_3mut |
| GGGPAPGSS | 13,918 | MLVMS_P03355_3mut |
| GSSPAPGGS | 13,919 | PERV_Q4VFZ2_3mutA_WS |
| PAPAP | 13,920 | FLV_P10273_3mutA |
| PAPAPAPAP | 13,921 | PERV_Q4VFZ2_3mut |
| GGGGGSEAAAK | 13,922 | GALV_P21414_3mutA |
| GGGGGSGSS | 13,923 | BAEVM_P10272_3mutA |
| GGGEAAAKGSS | 13,924 | KORV_Q9TTC1_3mutA |
| GGGGGSPAP | 13,925 | AVIRE_P03360_3mut |
| GGGGGSEAAAK | 13,926 | SFV3L_P27401_2mutA |
| GGS | | KORV_Q9TTC1_3mutA |
| GGGGGGG | 13,928 | PERV_Q4VFZ2_3mut |
| SGSETPGTSESATPES | 13,929 | SFV3L_P27401_2mutA |
| EAAAKGGSGGG | 13,930 | MLVMS_P03355_3mut |
| GGGGS | 13,931 | MLVFF_P26809_3mut |
| EAAAKGSSGGG | 13,932 | BAEVM_P10272_3mut |
| EAAAKPAPGGS | 13,933 | MLVF5_P26810_3mutA |
| SGGSSGGSSGSETPGTSESATPESSGGSSGGSS | 13,934 | SFV3L_P27401_2mutA |
| GGSPAPGGG | 13,935 | WMSV_P03359_3mutA |
| GSAGSAAGSGEF | 13,936 | MLVFF_P26809_3mut |
| GGGGSSGGS | 13,937 | MLVMS_P03355_3mutA_WS |
| GGGGGGG | 13,938 | MLVCB_P08361_3mut |
| GSSEAAAK | 13,939 | WMSV_P03359_3mut |
| PAPGSS | 13,940 | FLV_P10273_3mutA |
| GSSGGG | 13,941 | PERV_Q4VFZ2_3mutA_WS |
| PAPGGG | 13,942 | MLVFF_P26809_3mut |
| GGGGGSPAP | 13,943 | MLVMS_P03355_3mut |
| GGSEAAAK | 13,944 | XMRV6_A1Z651_3mut |
| GSSGGG | 13,945 | PERV_Q4VFZ2_3mut |
| GGSGGSGGSGGS | 13,946 | MLVMS_P03355_3mut |
| PAPAP | 13,947 | AVIRE_P03360_3mut |
| GGSEAAAK | 13,948 | PERV_Q4VFZ2_3mut |
| GGGGS | 13,949 | MLVMS_P03355_PLV919 |
| GGGG | 13,950 | BAEVM_P10272_3mutA |
| EAAAKGGGGSS | 13,951 | MLVCB_P08361_3mutA |
| EAAAKEAAAKEAAAK | 13,952 | GALV_P21414_3mutA |
| PAPGGGEAAAK | 13,953 | KORV_Q9TTC1 |
| EAAAKGGSPAP | 13,954 | MLVMS_P03355_3mut |
| GGSGSSEAAAK | 13,955 | MLVMS_P03355_3mut |
| GGSPAPEAAAK | 13,956 | FLV_P10273_3mutA |
| GGGGGGG | 13,957 | PERV_Q4VFZ2_3mut |
| EAAAKEAAAKEAAAKEAAAKEAAAKEAAAK | 13,958 | SFV1_P23074_2mutA |
| EAAAKGSSGGS | 13,959 | MLVMS_P03355_3mut |
| GSSEAAAKPAP | 13,960 | MLVFF_P26809_3mut |
| GGGGSS | 13,961 | FLV_P10273_3mutA |
| EAAAKGGSGGG | 13,962 | AVIRE_P03360_3mutA |
| GGSGGS | 13,963 | PERV_Q4VFZ2_3mutA_WS |
| GGGGGSPAP | 13,964 | AVIRE_P03360_3mutA |
| EAAAKEAAAKEAAAK | 13,965 | XMRV6_A1Z651_3mut |
| PAPEAAAKGGS | 13,966 | FLV_P10273_3mutA |
| GSSGGSEAAAK | 13,967 | MLVCB_P08361_3mut |
| EAAAKGGSGGG | 13,968 | MLVMS_P03355 |
| GGSGGGPAP | 13,969 | MLVMS_P03355_3mut |
| GGS | | XMRV6_A1Z651_3mut |
| GGSEAAAKPAP | 13,971 | MLVFF_P26809_3mut |
| EAAAKGGG | 13,972 | MLVMS_P03355_PLV919 |
| GSSGSSGSSGSS | 13,973 | WMSV_P03359_3mut |
| GGSGSSPAP | 13,974 | PERV_Q4VFZ2_3mut |
| GGGEAAAK | 13,975 | MLVMS_P03355_3mutA_WS |
| GSSPAPGGS | 13,976 | KORV_Q9TTC1-Pro_3mutA |
| GSSEAAAKGGG | 13,977 | SFV3L_P27401_2mut |
| EAAAKPAPGGS | 13,978 | MLVCB_P08361_3mut |
| GGSGGGEAAAK | 13,979 | PERV_Q4VFZ2 |
| GGSGSS | 13,980 | MLVCB_P08361_3mut |
| GGSGGGEAAAK | 13,981 | MLVBM_Q7SVK7_3mutA_WS |
| GGSGGSGGSGGSGGSGGS | 13,982 | FLV_P10273_3mut |
| PAPEAAAKGSS | 13,983 | MLVMS_P03355_3mut |
| EAAAKGSSGGS | 13,984 | WMSV_P03359_3mutA |
| GGSGSSEAAAK | 13,985 | MLVCB_P08361_3mut |
| GGSGSSEAAAK | 13,986 | KORV_Q9TTC1_3mutA |
| GSSGGSGGG | 13,987 | MLVMS_P03355_PLV919 |
| EAAAKGGSGGG | 13,988 | SFV3L_P27401-Pro_2mutA |
| GGSGGS | 13,989 | AVIRE_P03360_3mutA |
| GSAGSAAGSGEF | 13,990 | MLVMS_P03355_PLV919 |
| GGSGSS | 13,991 | GALV_P21414_3mutA |
| GGGG | 13,992 | MLVFF_P26809_3mutA |
| GGGGSGGGGSGGGGSGGGGS | 13,993 | WMSV_P03359_3mut |
| SGSETPGTSESATPES | 13,994 | BAEVM_P10272_3mut |
| EAAAKEAAAKEAAAKEAAAK | 13,995 | FOAMV_P14350_2mutA |
| GGGEAAAKGGS | 13,996 | FLV_P10273_3mutA |
| GSSGGSEAAAK | 13,997 | MLVFF_P26809_3mut |
| EAAAKGGGGSS | 13,998 | MLVAV_P03356_3mut |
| PAPGGSEAAAK | 13,999 | KORV_Q9TTC1-Pro_3mut |
| EAAAK | 14,000 | XMRV6_A1Z651_3mut |
| GSSGSSGSSGSSGSSGSS | 14,001 | PERV_Q4VFZ2_3mut |
| GGGG | 14,002 | MLVCB_P08361_3mutA |
| GSSGSS | 14,003 | WMSV_P03359_3mutA |
| GSSGGSPAP | 14,004 | AVIRE_P03360_3mut |
| GGSGGSGGS | 14,005 | MLVCB_P08361_3mut |
| EAAAKGGGPAP | 14,006 | FLV_P10273_3mutA |
| GGGGSGGGGS | 14,007 | MLVCB_P08361_3mut |
| GGSEAAAKGSS | 14,008 | PERV_Q4VFZ2_3mutA_WS |
| EAAAKEAAAKEAAAKEAAAKEAAAKEAAAK | 14,009 | SFV3L_P27401_2mutA |
| GGSGSSEAAAK | 14,010 | PERV_Q4VFZ2_3mutA_WS |
| EAAAKEAAAKEAAAKEAAAK | 14,011 | SFV3L_P27401-Pro_2mutA |
| GSSEAAAKGGS | 14,012 | FLV_P10273_3mutA |
| GGSGSS | 14,013 | PERV_Q4VFZ2 |
| GGSGSSEAAAK | 14,014 | SFV3L_P27401-Pro_2mutA |
| GSSGSSGSS | 14,015 | XMRV6_A1Z651_3mutA |
| EAAAKGSSPAP | 14,016 | KORV_Q9TTC1_3mutA |
| EAAAKPAP | 14,017 | FLV_P10273_3mutA |
| GGSGSSEAAAK | 14,018 | KORV_Q9TTC1-Pro_3mut |
| GGGGSGGGGSGGGGSGGGGSGGGGSGGGGS | 14,019 | KORV_Q9TTC1_3mutA |
| GGGGSGGGGSGGGGS | 14,020 | KORV_Q9TTC1-Pro_3mutA |
| GGGGGGG | 14,021 | FLV_P10273_3mut |
| EAAAKGSS | 14,022 | WMSV_P03359_3mut |
| EAAAKGGGPAP | 14,023 | MLVCB_P08361_3mut |
| GSSGSS | 14,024 | MLVBM_Q7SVK7_3mutA_WS |
| EAAAKGGGGGS | 14,025 | MLVFF_P26809_3mut |
| GGSGGGEAAAK | 14,026 | FLV_P10273_3mutA |
| PAPGSS | 14,027 | MLVFF_P26809_3mutA |
| PAPGSS | 14,028 | BAEVM_P10272_3mutA |
| GGSPAPGSS | 14,029 | AVIRE_P03360_3mut |
| GGGGSSEAAAK | 14,030 | MLVMS_P03355_3mut |
| GSSGGGGGS | 14,031 | FFV_093209-Pro |
| EAAAKGSSPAP | 14,032 | PERV_Q4VFZ2_3mut |
| GSSPAPGGS | 14,033 | PERV_Q4VFZ2_3mut |
| GGGGGG | 14,034 | BAEVM_P10272_3mut |
| EAAAKGGGGSS | 14,035 | PERV_Q4VFZ2_3mutA_WS |
| PAPGGSEAAAK | 14,036 | KORV_Q9TTC1_3mutA |
| SGGSSGGSSGSETPGTSESATPESSGGSSGGSS | 14,037 | MLVMS_P03355_3mutA_WS |
| GSSGSSGSSGSS | 14,038 | MLVMS_P03355_3mut |
| EAAAKGSSGGG | 14,039 | MLVMS_P03355_PLV919 |
| GGSEAAAKPAP | 14,040 | AVIRE_P03360_3mutA |
| GSSGSSGSSGSSGSS | 14,041 | WMSV_P03359_3mutA |
| GGGEAAAKPAP | 14,042 | FLV_P10273_3mutA |
| PAPGSSGGG | 14,043 | KORV_Q9TTC1_3mutA |
| GSSGSS | 14,044 | MLVMS_P03355_3mutA_WS |
| PAPEAAAK | 14,045 | BAEVM_P10272_3mut |
| GGGPAPGSS | 14,046 | PERV_Q4VFZ2 |
| GSSGGSPAP | 14,047 | MLVFF_P26809_3mut |
| GGGGSS | 14,048 | SFV3L_P27401_2mut |
| PAPEAAAKGSS | 14,049 | SFV3L_P27401_2mut |
| GGSGGGPAP | 14,050 | XMRV6_A1Z651_3mutA |
| PAPGGS | 14,051 | BAEVM_P10272_3mutA |
| EAAAKGGGGGS | 14,052 | AVIRE_P03360_3mut |
| GSSGGSPAP | 14,053 | KORV_Q9TTC1-Pro_3mutA |
| GSSGGGGGS | 14,054 | WMSV_P03359_3mut |
| GGGEAAAKGGS | 14,055 | AVIRE_P03360_3mut |
| GGGEAAAKGSS | 14,056 | BAEVM_P10272_3mut |
| PAPEAAAKGSS | 14,057 | MLVAV_P03356_3mutA |
| GSSGSSGSSGSSGSS | 14,058 | MLVCB_P08361_3mut |
| GGSPAPGSS | 14,059 | FLV_P10273_3mutA |
| EAAAKGSSPAP | 14,060 | BAEVM_P10272_3mutA |
| GGSGGSGGSGGSGGSGGS | 14,061 | PERV_Q4VFZ2 |
| GGGGSSEAAAK | 14,062 | FLV_P10273_3mutA |
| GGGGSSPAP | 14,063 | FFV_093209 |
| GSSGGSPAP | 14,064 | MLVMS_P03355_3mut |
| GGGPAPGSS | 14,065 | MLVMS_P03355_PLV919 |
| PAPGSSGGS | 14,066 | PERV_Q4VFZ2_3mut |
| GGGGGSPAP | 14,067 | MLVFF_P26809_3mut |
| SGSETPGTSESATPES | 14,068 | MLVMS_P03355_3mutA_WS |
| GSSGSSGSSGSSGSS | 14,069 | KORV_Q9TTC1_3mutA |
| GSSPAPGGG | 14,070 | WMSV_P03359_3mut |
| PAPAPAPAPAPAP | 14,071 | SFV3L_P27401_2mutA |
| GGGPAPGGS | 14,072 | MLVMS_P03355_3mut |
| PAPGGSEAAAK | 14,073 | WMSV_P03359_3mut |
| GGGGSSEAAAK | 14,074 | FFV_093209-Pro |
| GGSPAPGGG | 14,075 | FLV_P10273_3mutA |
| GSSPAPEAAAK | 14,076 | AVIRE_P03360_3mut |
| GGGEAAAK | 14,077 | FLV_P10273_3mutA |
| PAPEAAAKGGG | 14,078 | MLVCB_P08361_3mut |
| GGSPAPGGG | 14,079 | MLVCB_P08361_3mut |
| GGSGGGGSS | 14,080 | BAEVM_P10272_3mutA |
| GSSPAPEAAAK | 14,081 | MLVCB_P08361_3mut |
| GGSPAPGGG | 14,082 | KORV_Q9TTC1-Pro_3mutA |
| PAPGGSGSS | 14,083 | KORV_Q9TTC1_3mutA |
| GSSPAP | 14,084 | KORV_Q9TTC1-Pro_3mutA |
| SGSETPGTSESATPES | 14,085 | MLVMS_P03355 |
| GSSGSSGSS | 14,086 | MLVAV_P03356_3mutA |
| PAPGSSGGS | 14,087 | PERV_Q4VFZ2_3mutA_WS |
| PAPGGS | 14,088 | KORV_Q9TTC1-Pro_3mutA |
| PAPEAAAKGGG | 14,089 | SFV3L_P27401-Pro_2mutA |
| GGSGGSGGS | 14,090 | BAEVM_P10272_3mut |
| PAPGGS | 14,091 | MLVFF_P26809_3mut |
| GSSGGSPAP | 14,092 | MLVMS_P03355_PLV919 |
| GSSGGGGGS | 14,093 | FLV_P10273_3mutA |
| GGGGGSPAP | 14,094 | KORV_Q9TTC1-Pro_3mut |
| EAAAKPAPGSS | 14,095 | SFV3L_P27401-Pro_2mutA |
| EAAAKGGSPAP | 14,096 | KORV_Q9TTC1-Pro |
| GGGPAPEAAAK | 14,097 | MLVMS_P03355_PLV919 |
| GGSEAAAKGSS | 14,098 | MLVMS_P03355 |
| PAPEAAAKGSS | 14,099 | KORV_Q9TTC1_3mutA |
| PAPEAAAKGGS | 14,100 | WMSV_P03359_3mutA |
| GSSGGG | 14,101 | PERV_Q4VFZ2_3mutA_WS |
| EAAAKGGGGSS | 14,102 | MLVMS_P03355_PLV919 |
| EAAAKGGSPAP | 14,103 | AVIRE_P03360_3mutA |
| GGGGSSGGS | 14,104 | MLVMS_P03355_PLV919 |
| PAPEAAAKGSS | 14,105 | PERV_Q4VFZ2_3mutA_WS |
| EAAAKGGGGGS | 14,106 | BAEVM_P10272_3mut |
| GSSGGGGGS | 14,107 | MLVMS_P03355_3mut |
| PAPAPAPAP | 14,108 | KORV_Q9TTC1_3mutA |
| GGSGGSGGSGGS | 14,109 | MLVAV_P03356_3mut |
| PAPAPAPAP | 14,110 | SFV3L_P27401_2mut |
| GSSEAAAKPAP | 14,111 | MLVMS_P03355_3mut |
| GGSGGGEAAAK | 14,112 | SFV3L_P27401_2mutA |
| GSSGGSGGG | 14,113 | MLVMS_P03355_3mutA_WS |
| GGGGGSPAP | 14,114 | MLVCB_P08361_3mutA |
| GGGEAAAKGSS | 14,115 | XMRV6_A1Z651_3mutA |
| GGGGSSPAP | 14,116 | BAEVM_P10272_3mut |
| GGSGGG | 14,117 | PERV_Q4VFZ2_3mut |
| GGGGSS | 14,118 | MLVBM_Q7SVK7_3mutA_WS |
| EAAAKGSSGGS | 14,119 | PERV_Q4VFZ2_3mutA_WS |
| GSSGGGGGS | 14,120 | PERV_Q4VFZ2 |
| EAAAKGSSGGS | 14,121 | PERV_Q4VFZ2_3mut |
| EAAAKEAAAK | 14,122 | MLVAV_P03356_3mut |
| GSSGGGEAAAK | 14,123 | MLVAV_P03356_3mut |
| GSSPAPGGG | 14,124 | XMRV6_A1Z651_3mut |
| GGGGSGGGGSGGGGS | 14,125 | PERV_Q4VFZ2_3mut |
| EAAAKEAAAKEAAAKEAAAK | 14,126 | KORV_Q9TTC1_3mutA |
| EAAAKGGSGSS | 14,127 | MLVBM_Q7SVK7_3mut |
| PAPEAAAK | 14,128 | BLVJ_P03361 |
| GSSGGG | 14,129 | FFV_093209-Pro |
| GGSGGGEAAAK | 14,130 | KORV_Q9TTC1-Pro_3mutA |
| EAAAK | 14,131 | FLV_P10273_3mutA |
| GGGGSSPAP | 14,132 | MLVMS_P03355_3mut |
| GSS | | SFV3L_P27401-Pro_2mut |
| PAPEAAAKGSS | 14,134 | BAEVM_P10272_3mut |
| GGGGGSPAP | 14,135 | PERV_Q4VFZ2_3mut |
| GSSGSSGSS | 14,136 | BAEVM_P10272_3mutA |
| GGGGSGGGGSGGGGSGGGGS | 14,137 | SFV1_P23074_2mut |
| GGGGSSEAAAK | 14,138 | SFV3L_P27401_2mutA |
| GGGGSGGGGSGGGGSGGGGS | 14,139 | FOAMV_P14350-Pro_2mut |
| PAPGSSEAAAK | 14,140 | MLVBM_Q7SVK7_3mutA_WS |
| GGGGGSGSS | 14,141 | MLVFF_P26809_3mutA |
| GGSEAAAKGGG | 14,142 | MLVBM_Q7SVK7_3mut |
| PAPGSSGGG | 14,143 | PERV_Q4VFZ2 |
| GGS | | PERV_Q4VFZ2_3mutA_WS |
| EAAAKGGSGSS | 14,145 | FLV_P10273_3mut |
| GGGEAAAK | 14,146 | WMSV_P03359_3mutA |
| GGSEAAAKPAP | 14,147 | MLVBM_Q7SVK7_3mut |
| SGSETPGTSESATPES | 14,148 | FOAMV_P14350-Pro_2mutA |
| EAAAKPAPGGS | 14,149 | AVIRE_P03360_3mut |
| EAAAKGGGGGS | 14,150 | KORV_Q9TTC1-Pro_3mutA |
| GGGGS | 14,151 | PERV_Q4VFZ2_3mut |
| GGSEAAAKGSS | 14,152 | MLVFF_P26809_3mutA |
| GGSEAAAKGGG | 14,153 | AVIRE_P03360 |
| GGSGGSGGSGGSGGSGGS | 14,154 | SFV3L_P27401_2mut |
| GGSEAAAKGSS | 14,155 | SFV3L_P27401-Pro_2mutA |
| GGGEAAAKPAP | 14,156 | MLVCB_P08361_3mut |
| GGSEAAAK | 14,157 | MLVMS_P03355_PLV919 |
| GGSPAPGSS | 14,158 | KORV_Q9TTC1-Pro_3mutA |
| GSSPAPEAAAK | 14,159 | WMSV_P03359_3mutA |
| GGSGSS | 14,160 | KORV_Q9TTC1-Pro_3mutA |
| PAPGGGGGS | 14,161 | AVIRE_P03360_3mut |
| PAPEAAAKGSS | 14,162 | FFV_093209-Pro |
| GGSGGGEAAAK | 14,163 | WMSV_P03359_3mut |
| PAPGGG | 14,164 | MLVMS_P03355_3mut |
| EAAAKGGG | 14,165 | FLV_P10273_3mutA |
| GSSGSSGSSGSS | 14,166 | MLVCB_P08361_3mut |
| EAAAKGGSGGG | 14,167 | FFV_093209 |
| GSSPAPGGS | 14,168 | PERV_Q4VFZ2_3mutA_WS |
| GSSPAPGGS | 14,169 | MLVCB_P08361_3mut |
| GGGPAP | 14,170 | WMSV_P03359_3mutA |
| GGGPAP | 14,171 | KORV_Q9TTC1_3mutA |
| GGSPAPGSS | 14,172 | KORV_Q9TTC1-Pro_3mut |
| PAPAP | 14,173 | MLVMS_P03355_3mut |
| GGGGGGG | 14,174 | MLVMS_P03355_3mut |
| GGGGG | 14,175 | KORV_Q9TTC1-Pro_3mut |
| GSAGSAAGSGEF | 14,176 | FOAMV_P14350_2mutA |
| PAPAP | 14,177 | KORV_Q9TTC1-Pro_3mutA |
| GGSEAAAKGGG | 14,178 | SFV3L_P27401-Pro_2mutA |
| PAPAP | 14,179 | WMSV_P03359_3mut |
| GGGGSGGGGSGGGGS | 14,180 | SFV3L_P27401_2mut |
| PAPGGS | 14,181 | KORV_Q9TTC1_3mutA |
| GGGEAAAKPAP | 14,182 | FLV_P10273_3mut |
| GGGGGS | 14,183 | MLVAV_P03356_3mutA |
| GSSEAAAKGGG | 14,184 | WMSV_P03359_3mut |
| EAAAKGGGGSS | 14,185 | GALV_P21414_3mutA |
| GSSGGS | 14,186 | MLVAV_P03356_3mutA |
| GSSGGG | 14,187 | MLVBM_Q7SVK7_3mut |
| PAPAPAP | 14,188 | SFV3L_P27401-Pro_2mutA |
| GGGG | 14,189 | KORV_Q9TTC1_3mutA |
| EAAAKPAPGGS | 14,190 | MLVFF_P26809_3mut |
| GGGGSGGGGS | 14,191 | XMRV6_A1Z651_3mut |
| EAAAKGGG | 14,192 | MLVCB_P08361_3mut |
| GGGGSSPAP | 14,193 | KORV_Q9TTC1_3mutA |
| GSSEAAAKGGG | 14,194 | KORV_Q9TTC1-Pro_3mutA |
| GGGGG | 14,195 | BLVJ_P03361_2mutB |
| GGGEAAAKGSS | 14,196 | FFV_O93209-Pro |
| GSSGSSGSS | 14,197 | BAEVM_P10272_3mut |
| GSSGGSPAP | 14,198 | PERV_Q4VFZ2_3mut |
| EAAAKGGS | 14,199 | KORV_Q9TTC1_3mut |
| GGSPAPEAAAK | 14,200 | AVIRE_P03360_3mut |
| GGSEAAAK | 14,201 | WMSV_P03359_3mut |
| GSSGGS | 14,202 | KORV_Q9TTC1-Pro_3mutA |
| GGGPAPEAAAK | 14,203 | KORV_Q9TTC1_3mutA |
| PAPGSS | 14,204 | WMSV_P03359_3mutA |
| GGSEAAAKGSS | 14,205 | FLV_P10273_3mutA |
| EAAAKEAAAKEAAAKEAAAKEAAAK | 14,206 | SFV3L_P27401 |
| GSSEAAAKGGG | 14,207 | SFV3L_P27401-Pro_2mutA |
| GGGGSEAAAKGGGGS | 14,208 | KORV_Q9TTC1-Pro_3mutA |
| GGSGGSGGS | 14,209 | WMSV_P03359_3mut |
| GGGGGSGSS | 14,210 | KORV_Q9TTC1-Pro |
| GGGGSGGGGSGGGGSGGGGS | 14,211 | MLVMS_P03355_3mut |
| EAAAKGGG | 14,212 | PERV_Q4VFZ2 |
| GGSEAAAKGGG | 14,213 | KORV_Q9TTC1-Pro_3mut |
| GSSGGSGGG | 14,214 | PERV_Q4VFZ2_3mutA_WS |
| GGGGGS | 14,215 | PERV_Q4VFZ2_3mut |
| GSAGSAAGSGEF | 14,216 | PERV_Q4VFZ2 |
| PAPEAAAKGSS | 14,217 | BAEVM_P10272_3mutA |
| GSSPAPGGG | 14,218 | MLVCB_P08361_3mut |
| GGGGSSPAP | 14,219 | KORV_Q9TTC1-Pro_3mutA |
| PAPGGSGGG | 14,220 | MLVFF_P26809_3mut |
| GSSPAP | 14,221 | KORV_Q9TTC1_3mutA |
| PAPGSS | 14,222 | SFV3L_P27401-Pro_2mut |
| GGSGGGGSS | 14,223 | MLVMS_P03355_PLV919 |
| GSSGGS | 14,224 | WMSV_P03359_3mutA |
| EAAAKGGGGGS | 14,225 | PERV_Q4VFZ2 |
| GGGGG | 14,226 | KORV_Q9TTC1_3mutA |
| EAAAKGSS | 14,227 | MLVMS_P03355_PLV919 |
| EAAAKEAAAKEAAAKEAAAKEAAAK | 14,228 | FLV_P10273_3mut |
| EAAAKEAAAKEAAAKEAAAK | 14,229 | SFV3L_P27401-Pro_2mut |
| GSAGSAAGSGEF | 14,230 | SFV3L_P27401_2mutA |
| GGGPAPGGS | 14,231 | FLV_P10273_3mutA |
| GGSEAAAKGGG | 14,232 | MLVCB_P08361_3mut |
| PAPGGGEAAAK | 14,233 | BAEVM_P10272_3mut |
| EAAAKPAPGSS | 14,234 | FOAMV_P14350_2mut |
| GGSEAAAK | 14,235 | KORV_Q9TTC1_3mutA |
| GGSGSS | 14,236 | AVIRE_P03360 |
| GGSPAPEAAAK | 14,237 | MLVMS_P03355_PLV919 |
| GGGGS | 14,238 | XMRV6_A1Z651_3mut |
| GGSPAPGGG | 14,239 | XMRV6_A1Z651_3mut |
| EAAAKPAPGGS | 14,240 | PERV_Q4VFZ2 |
| GSSPAP | 14,241 | BAEVM_P10272_3mut |
| GGSGSSGGG | 14,242 | FLV_P10273_3mutA |
| PAPGGG | 14,243 | PERV_Q4VFZ2_3mutA_WS |
| GSSGGSEAAAK | 14,244 | MLVBM_Q7SVK7_3mut |
| GGSEAAAK | 14,245 | MLVMS_P03355_3mut |
| GGGPAPGGS | 14,246 | MLVFF_P26809_3mut |
| GSAGSAAGSGEF | 14,247 | MLVBM_Q7SVK7_3mutA_WS |
| EAAAKPAPGGS | 14,248 | SFVCP_Q87040 |
| PAPGGG | 14,249 | PERV_Q4VFZ2_3mutA_WS |
| GSSPAPEAAAK | 14,250 | MLVBM_Q7SVK7 |
| PAPEAAAK | 14,251 | MLVBM_Q7SVK7_3mut |
| PAPGGGGGS | 14,252 | AVIRE_P03360_3mutA |
| GGSEAAAKPAP | 14,253 | MLVBM_Q7SVK7_3mut |
| EAAAKGSS | 14,254 | WMSV_P03359_3mutA |
| GGGEAAAK | 14,255 | MLVFF_P26809_3mutA |
| EAAAKEAAAKEAAAK | 14,256 | MLVMS_P03355_3mut |
| PAPEAAAKGGG | 14,257 | BAEVM_P10272_3mut |
| PAPAPAP | 14,258 | MLVCB_P08361_3mut |
| EAAAKPAPGGS | 14,259 | BAEVM_P10272_3mut |
| GGGGSGGGGS | 14,260 | FLV_P10273_3mut |
| GGGGSEAAAKGGGGS | 14,261 | KORV_Q9TTC1_3mut |
| EAAAK | 14,262 | FLV_P10273_3mut |
| PAPAPAP | 14,263 | WMSV_P03359_3mut |
| GGGGSEAAAKGGGGS | 14,264 | FFV_093209-Pro |
| GGSPAPEAAAK | 14,265 | MLVMS_P03355_3mut |
| GGSGSSGGG | 14,266 | XMRV6_A1Z651_3mut |
| GGSPAPGSS | 14,267 | PERV_Q4VFZ2_3mut |
| SGGSSGGSSGSETPGTSESATPESSGGSSGGSS | 14,268 | SFV3L_P27401-Pro_2mutA |
| EAAAKGGGPAP | 14,269 | BAEVM_P10272_3mutA |
| GSSGGSEAAAK | 14,270 | MLVMS_P03355_3mutA_WS |
| SGSETPGTSESATPES | 14,271 | PERV_Q4VFZ2_3mutA_WS |
| EAAAKEAAAKEAAAKEAAAKEAAAK | 14,272 | KORV_Q9TTC1-Pro_3mutA |
| GSSGSSGSS | 14,273 | KORV_Q9TTC1_3mutA |
| GSSPAPGGG | 14,274 | SFV3L_P27401-Pro_2mutA |
| GSSGGGEAAAK | 14,275 | KORV_Q9TTC1_3mutA |
| GGSGGGGSS | 14,276 | PERV_Q4VFZ2_3mutA_WS |
| GSSGGGEAAAK | 14,277 | MLVCB_P08361_3mut |
| GSSEAAAKGGG | 14,278 | MLVCB_P08361_3mut |
| GGSGGGGSS | 14,279 | KORV_Q9TTC1_3mutA |
| GGSGSSPAP | 14,280 | PERV_Q4VFZ2_3mutA_WS |
| GSSPAP | 14,281 | MLVMS_P03355_3mut |
| GGGGSSEAAAK | 14,282 | AVIRE_P03360 |
| GGS | | WMSV_P03359_3mut |
| EAAAKEAAAK | 14,284 | PERV_Q4VFZ2_3mut |
| PAPAPAPAP | 14,285 | MLVAV_P03356_3mut |
| GGSEAAAKGGG | 14,286 | KORV_Q9TTC1_3mutA |
| PAPGGG | 14,287 | MLVAV_P03356_3mut |
| EAAAKGSS | 14,288 | BAEVM_P10272_3mut |
| GGGGSGGGGS | 14,289 | WMSV_P03359_3mutA |
| GGSGGSGGS | 14,290 | SFV3L_P27401_2mut |
| EAAAK | 14,291 | MLVCB_P08361_3mut |
| GGGGSSGGS | 14,292 | WMSV_P03359_3mutA |
| GGGPAPEAAAK | 14,293 | MLVAV_P03356_3mutA |
| EAAAKEAAAKEAAAK | 14,294 | FFV_093209 |
| GSSEAAAKGGG | 14,295 | MLVBM_Q7SVK7_3mut |
| GGGPAPGGS | 14,296 | FLV_P10273_3mut |
| GGSEAAAKGGG | 14,297 | WMSV_P03359_3mut |
| EAAAKGGGGGS | 14,298 | XMRV6_A1Z651_3mutA |
| EAAAKGGSGGG | 14,299 | FLV_P10273_3mutA |
| GGSEAAAKGGG | 14,300 | SFV3L_P27401_2mutA |
| GGGGS | 14,301 | PERV_Q4VFZ2_3mutA_WS |
| GSSGGS | 14,302 | MLVMS_P03355_3mut |
| GSSGSS | 14,303 | MLVAV_P03356_3mutA |
| GGSPAPGGG | 14,304 | MLVBM_Q7SVK7_3mutA_WS |
| GSSGGGGGS | 14,305 | MLVF5_P26810_3mut |
| PAPAPAPAP | 14,306 | MLVCB_P08361_3mut |
| PAPAP | 14,307 | PERV_Q4VFZ2_3mutA_WS |
| PAPGSSGGS | 14,308 | KORV_Q9TTC1_3mut |
| PAPGSSGGG | 14,309 | PERV_Q4VFZ2_3mut |
| GGGEAAAK | 14,310 | MLVMS_P03355_PLV919 |
| GGSGGSGGSGGSGGS | 14,311 | SFV3L_P27401-Pro_2mutA |
| GGSGGG | 14,312 | FLV_P10273_3mut |
| PAPEAAAKGGG | 14,313 | MLVFF_P26809_3mut |
| PAP | | PERV_Q4VFZ2_3mutA_WS |
| PAPGGSGSS | 14,315 | FFV_093209_2mut |
| EAAAKEAAAKEAAAKEAAAKEAAAKEAAAK | 14,316 | FFV_093209-Pro_2mut |
| GSSGSSGSSGSS | 14,317 | FFV_O93209-Pro |
| GSSGSSGSSGSSGSS | 14,318 | FLV_P10273_3mutA |
| GGGEAAAKPAP | 14,319 | PERV_Q4VFZ2 |
| PAPGSSGGG | 14,320 | SFV3L_P27401_2mut |
| PAPGGSGSS | 14,321 | KORV_Q9TTC1-Pro_3mut |
| PAPAPAPAPAP | 14,322 | GALV_P21414_3mutA |
| GGSGGGEAAAK | 14,323 | PERV_Q4VFZ2_3mut |
| GSSPAP | 14,324 | MLVCB_P08361_3mut |
| EAAAKPAP | 14,325 | MLVF5_P26810_3mut |
| GGGGSGGGGSGGGGSGGGGS | 14,326 | MLVBM_Q7SVK7_3mut |
| GGSGGG | 14,327 | WMSV_P03359_3mut |
| GGSGGSGGS | 14,328 | KORV_Q9TTC1_3mut |
| GGGGGGGG | 14,329 | MLVFF_P26809_3mut |
| GGGGSS | 14,330 | MLVAV_P03356_3mut |
| GSSGGGGGS | 14,331 | SFV3L_P27401_2mut |
| EAAAKEAAAKEAAAKEAAAKEAAAKEAAAK | 14,332 | GALV_P21414_3mutA |
| GSSGSSGSS | 14,333 | PERV_Q4VFZ2_3mut |
| GSSPAPGGS | 14,334 | MLVFF_P26809_3mut |
| PAPAPAP | 14,335 | AVIRE_P03360_3mutA |
| EAAAKEAAAKEAAAKEAAAK | 14,336 | WMSV_P03359_3mutA |
| PAPAPAPAP | 14,337 | SFV3L_P27401_2mutA |
| GGGGSS | 14,338 | MLVAV_P03356_3mutA |
| GSSGSSGSSGSSGSS | 14,339 | SFV3L_P27401_2mutA |
| PAPGGS | 14,340 | WMSV_P03359_3mutA |
| GSSEAAAKGGG | 14,341 | PERV_Q4VFZ2 |
| GSSGGSPAP | 14,342 | MLVMS_P03355_PLV919 |
| GSSGSSGSSGSSGSSGSS | 14,343 | SFV3L_P27401_2mutA |
| GGSGSSGGG | 14,344 | MLVCB_P08361_3mut |
| GGGPAPGSS | 14,345 | SFV3L_P27401-Pro_2mutA |
| GSSEAAAKGGS | 14,346 | WMSV_P03359_3mut |
| GSSEAAAKGGG | 14,347 | MLVAV_P03356_3mut |
| GGSGGGPAP | 14,348 | FFV_O93209-Pro |
| GSSGSS | 14,349 | PERV_Q4VFZ2_3mut |
| PAPGGGGGS | 14,350 | GALV_P21414_3mutA |
| EAAAKPAPGGS | 14,351 | MLVAV_P03356_3mut |
| GSSGSS | 14,352 | MLVMS_P03355_3mut |
| EAAAKPAPGGS | 14,353 | FFV_093209-Pro |
| GGGPAPEAAAK | 14,354 | MLVMS_P03355_3mutA_WS |
| GSSEAAAKGGG | 14,355 | MLVBM_Q7SVK7_3mut |
| GGGEAAAKGGS | 14,356 | BAEVM_P10272_3mut |
| GSSGSS | 14,357 | KORV_Q9TTC1-Pro_3mutA |
| EAAAKEAAAKEAAAK | 14,358 | SFV1_P23074 |
| PAPGSSGGS | 14,359 | KORV_Q9TTC1-Pro_3mut |
| PAPAPAPAPAP | 14,360 | MLVMS_P03355 |
| GSSEAAAK | 14,361 | SFV3L_P27401_2mut |
| PAP | | PERV_Q4VFZ2_3mut |
| GGSEAAAKGGG | 14,363 | MLVBM_Q7SVK7_3mut |
| GGSGGGPAP | 14,364 | MLVBM_Q7SVK7_3mutA_WS |
| GSSGSS | 14,365 | MLVMS_P03355_3mut |
| GGSEAAAK | 14,366 | MLVMS_P03355 |
| GSSEAAAKGGS | 14,367 | MLVMS_P03355_PLV919 |
| PAPGGGGGS | 14,368 | MLVFF_P26809_3mut |
| GSSGGG | 14,369 | PERV_Q4VFZ2_3mut |
| GSSGGS | 14,370 | PERV_Q4VFZ2_3mutA_WS |
| PAPGGG | 14,371 | BAEVM_P10272_3mut |
| PAPGSSGGG | 14,372 | MLVBM_Q7SVK7_3mut |
| GGSEAAAK | 14,373 | SFV3L_P27401_2mut |
| GSSPAPEAAAK | 14,374 | SFV3L_P27401-Pro_2mut |
| GSSGGSPAP | 14,375 | BAEVM_P10272_3mut |
| GGSPAPGSS | 14,376 | PERV_Q4VFZ2_3mutA_WS |
| GGSGGSGGS | 14,377 | PERV_Q4VFZ2 |
| GGSGGGPAP | 14,378 | FLV_P10273_3mut |
| GGGPAPEAAAK | 14,379 | SFV3L_P27401_2mutA |
| GGGGS | 14,380 | FLV_P10273_3mutA |
| GSSGGSGGG | 14,381 | XMRV6_A1Z651_3mut |
| EAAAKGGGGSS | 14,382 | PERV_Q4VFZ2 |
| GGSGSSGGG | 14,383 | SFV3L_P27401-Pro_2mutA |
| GGSGGSGGS | 14,384 | MLVFF_P26809_3mut |
| GGGPAPEAAAK | 14,385 | FLV_P10273_3mut |
| GSSGGGEAAAK | 14,386 | MLVMS_P03355_3mut |
| GGG | | SFV3L_P27401_2mut |
| GSAGSAAGSGEF | 14,388 | WMSV_P03359_3mut |
| GSSGGGPAP | 14,389 | MLVMS_P03355_PLV919 |
| GGGGSS | 14,390 | KORV_Q9TTC1-Pro_3mut |
| GGGGSSEAAAK | 14,391 | KORV_Q9TTC1 |
| PAPGGSGGG | 14,392 | SFV3L_P27401_2mut |
| GSSGSSGSSGSSGSS | 14,393 | FFV_093209 |
| GSSGGSPAP | 14,394 | MLVMS_P03355_3mut |
| GGSEAAAK | 14,395 | KORV_Q9TTC1-Pro_3mutA |
| GGGGSGGGGS | 14,396 | BAEVM_P10272_3mut |
| GSSEAAAKGGG | 14,397 | AVIRE_P03360_3mut |
| EAAAKPAPGGG | 14,398 | FLV_P10273_3mut |
| EAAAKGGSPAP | 14,399 | SFV3L_P27401-Pro_2mutA |
| GSSEAAAKPAP | 14,400 | MLVBM_Q7SVK7_3mut |
| GGGPAPGGS | 14,401 | MLVCB_P08361_3mut |
| GGG | | SFV3L_P27401_2mutA |
| EAAAKGGGGSEAAAK | 14,403 | SFV3L_P27401_2mutA |
| GGSGSSGGG | 14,404 | MLVBM_Q7SVK7_3mut |
| GSAGSAAGSGEF | 14,405 | BAEVM_P10272_3mut |
| GGGEAAAK | 14,406 | FOAMV_P14350_2mutA |
| PAPEAAAKGGS | 14,407 | WMSV_P03359_3mut |
| PAPAPAPAPAPAP | 14,408 | MLVF5_P26810_3mutA |
| GGSGGGGSS | 14,409 | FLV_P10273_3mutA |
| PAPGSSGGS | 14,410 | BAEVM_P10272_3mut |
| PAPEAAAK | 14,411 | WMSV_P03359_3mutA |
| GSSGSSGSSGSSGSSGSS | 14,412 | FFV_093209-Pro_2mut |
| GGGGGSGSS | 14,413 | FFV_093209-Pro |
| GGGGGGGG | 14,414 | SFV3L_P27401-Pro_2mutA |
| GGGGGG | 14,415 | FLV_P10273_3mut |
| GSSGGSGGG | 14,416 | MLVAV_P03356_3mutA |
| GGGGSS | 14,417 | SFV3L_P27401-Pro_2mutA |
| GGSGGGPAP | 14,418 | FOAMV_P14350_2mut |
| GSSGSS | 14,419 | AVIRE_P03360_3mutA |
| EAAAKEAAAKEAAAKEAAAKEAAAK | 14,420 | SFV3L_P27401-Pro_2mutA |
| EAAAKEAAAK | 14,421 | BAEVM_P10272_3mut |
| GSSPAPEAAAK | 14,422 | GALV_P21414_3mutA |
| GGSEAAAKPAP | 14,423 | SFV3L_P27401_2mutA |
| GGSGGGEAAAK | 14,424 | SFV3L_P27401-Pro_2mutA |
| EAAAKGSSPAP | 14,425 | FOAMV_P14350_2mut |
| GGSGSSEAAAK | 14,426 | SFV3L_P27401_2mut |
| GGG | | PERV_Q4VFZ2 |
| GGGGGSGSS | 14,428 | FOAMV_P14350_2mut |
| GGSGGGEAAAK | 14,429 | KORV_Q9TTC1-Pro_3mut |
| GSSGGSGGG | 14,430 | AVIRE_P03360_3mutA |
| EAAAKPAPGGG | 14,431 | SFV3L_P27401_2mutA |
| PAPGGSGGG | 14,432 | KORV_Q9TTC1-Pro_3mut |
| PAPAPAP | 14,433 | WMSV_P03359_3mutA |
| GSSEAAAKPAP | 14,434 | SFV1_P23074 |
| SGGSSGGSSGSETPGTSESATPESSGGSSGGSS | 14,435 | SRV2_P51517 |
| GSSGGSGGG | 14,436 | PERV_Q4VFZ2_3mutA_WS |
| GSSGSSGSSGSSGSSGSS | 14,437 | FFV_093209 |
| GSSGGGPAP | 14,438 | WMSV_P03359_3mut |
| PAPAPAPAPAPAP | 14,439 | MLVBM_Q7SVK7_3mut |
| GGGGGSPAP | 14,440 | KORV_Q9TTC1-Pro_3mutA |
| PAPGSS | 14,441 | MLVBM_Q7SVK7_3mutA_WS |
| PAPEAAAKGGS | 14,442 | SFV3L_P27401-Pro_2mut |
| GGGGSSPAP | 14,443 | MLVMS_P03355_3mut |
| GGSEAAAK | 14,444 | FFV_093209-Pro |
| EAAAKPAPGGS | 14,445 | AVIRE_P03360_3mutA |
| PAPGSS | 14,446 | WMSV_P03359_3mut |
| PAPGSSGGG | 14,447 | SFV3L_P27401-Pro_2mutA |
| EAAAKEAAAKEAAAK | 14,448 | SFV3L_P27401_2mut |
| GGS | | MLVRD_P11227_3mut |
| GGGGS | 14,450 | KORV_Q9TTC1-Pro_3mut |
| GGSGGGGSS | 14,451 | KORV_Q9TTC1 |
| GGSGGG | 14,452 | MLVMS_P03355_3mutA_WS |
| GGGEAAAKPAP | 14,453 | BAEVM_P10272_3mut |
| EAAAKEAAAKEAAAKEAAAKEAAAK | 14,454 | FLV_P10273 |
| PAPGGSGGG | 14,455 | KORV_Q9TTC1-Pro_3mutA |
| GSSGSSGSSGSSGSSGSS | 14,456 | HTL1L_POC211 |
| GGGEAAAKPAP | 14,457 | WMSV_P03359 |
| GSSGGSPAP | 14,458 | FFV_093209-Pro |
| PAPAPAPAPAP | 14,459 | SFV3L_P27401-Pro_2mutA |
| GSSGGSEAAAK | 14,460 | SFV3L_P27401_2mutA |
| GGSPAPGSS | 14,461 | SFV3L_P27401_2mut |
| GGSGGSGGS | 14,462 | KORV_Q9TTC1-Pro_3mut |
| PAPEAAAKGSS | 14,463 | KORV_Q9TTC1-Pro_3mut |
| EAAAKGGS | 14,464 | KORV_Q9TTC1_3mutA |
| EAAAKGGGGSEAAAK | 14,465 | SFV3L_P27401-Pro_2mut |
| GGGGSSPAP | 14,466 | FFV_093209-Pro |
| EAAAK | 14,467 | SFV3L_P27401_2mut |
| EAAAKGGGGSS | 14,468 | BAEVM_P10272_3mut |
| GGGGGSEAAAK | 14,469 | MLVBM_Q7SVK7_3mut |
| GGGG | 14,470 | PERV_Q4VFZ2 |
| GGGGGSEAAAK | 14,471 | FLV_P10273_3mut |
| EAAAKGGGPAP | 14,472 | KORV_Q9TTC1-Pro |
| GGGGSGGGGSGGGGSGGGGS | 14,473 | FFV_093209_2mutA |
| GSSGGSGGG | 14,474 | PERV_Q4VFZ2_3mut |
| GGGGSGGGGSGGGGS | 14,475 | GALV_P21414_3mutA |
| GGSGGGEAAAK | 14,476 | AVIRE_P03360_3mutA |
| PAPEAAAKGGG | 14,477 | SFV3L_P27401_2mut |
| GGGGSGGGGS | 14,478 | AVIRE_P03360 |
| GSSGGGEAAAK | 14,479 | SFV3L_P27401_2mutA |
| GGGGG | 14,480 | AVIRE_P03360_3mutA |
| GGSGSS | 14,481 | KORV_Q9TTC1_3mut |
| PAPAPAPAPAPAP | 14,482 | FOAMV_P14350_2mut |
| GGSEAAAKPAP | 14,483 | KORV_Q9TTC1-Pro_3mut |
| GGGGGG | 14,484 | PERV_Q4VFZ2_3mut |
| GSSGGGEAAAK | 14,485 | MLVBM_Q7SVK7 |
| SGGSSGGSSGSETPGTSESATPESSGGSSGGSS | 14,486 | MLVAV_P03356 |
| GGSPAPGSS | 14,487 | BAEVM_P10272_3mut |
| GGGGSSPAP | 14,488 | BAEVM_P10272 |
| GGGGSEAAAKGGGGS | 14,489 | SFV3L_P27401_2mut |
| GGGGGGGG | 14,490 | GALV_P21414_3mutA |
| PAPAP | 14,491 | MLVAV_P03356_3mut |
| GGGEAAAK | 14,492 | PERV_Q4VFZ2_3mutA_WS |
| GSSPAPGGG | 14,493 | FFV_093209_2mut |
| GGSGGSGGSGGSGGS | 14,494 | BAEVM_P10272 |
| GGGGGS | 14,495 | MLVF5_P26810_3mutA |
| PAPGGGGSS | 14,496 | FLV_P10273_3mutA |
| GGGEAAAK | 14,497 | MLVBM_Q7SVK7_3mut |
| PAPEAAAKGGG | 14,498 | WMSV_P03359_3mut |
| GSSEAAAK | 14,499 | MLVBM_Q7SVK7_3mut |
| EAAAKEAAAK | 14,500 | AVIRE_P03360 |
| EAAAKGGGGGS | 14,501 | MLVBM_Q7SVK7_3mut |
| GGGEAAAKGGS | 14,502 | SFV3L_P27401-Pro_2mutA |
| PAPAPAPAPAP | 14,503 | MLVF5_P26810_3mut |
| PAPGSSEAAAK | 14,504 | SFV3L_P27401-Pro_2mutA |
| EAAAKEAAAKEAAAK | 14,505 | BAEVM_P10272_3mutA |
| GGSPAPGSS | 14,506 | MLVMS_P03355 |
| PAPGSSGGS | 14,507 | FLV_P10273_3mutA |
| EAAAKEAAAKEAAAKEAAAK | 14,508 | FOAMV_P14350-Pro_2mut |
| EAAAKGGG | 14,509 | KORV_Q9TTC1_3mutA |
| EAAAKGGSGGG | 14,510 | MLVBM_Q7SVK7_3mut |
| GGGGGS | 14,511 | KORV_Q9TTC1-Pro_3mutA |
| PAPGGSGGG | 14,512 | WMSV_P03359_3mut |
| GGGPAPGGS | 14,513 | KORV_Q9TTC1_3mutA |
| GSS | | FFV_093209 |
| GGSGGSGGS | 14,515 | PERV_Q4VFZ2_3mut |
| GGGGS | 14,516 | GALV_P21414_3mutA |
| GGGG | 14,517 | MLVF5_P26810_3mut |
| GGSEAAAKPAP | 14,518 | FFV_093209-Pro_2mut |
| PAPAPAPAP | 14,519 | FFV_093209-Pro |
| PAP | | MLVF5_P26810_3mut |
| EAAAKEAAAKEAAAK | 14,521 | FFV_093209_2mut |
| EAAAKGSS | 14,522 | MLVCB_P08361_3mut |
| EAAAKGGG | 14,523 | MLVBM_Q7SVK7_3mut |
| PAPEAAAKGGG | 14,524 | FFV_093209_2mut |
| GSSGGGEAAAK | 14,525 | SFV1_P23074-Pro_2mut |
| PAPGGGEAAAK | 14,526 | GALV_P21414_3mutA |
| GGGGSGGGGSGGGGSGGGGS | 14,527 | FOAMV_P14350-Pro_2mutA |
| GSSGGG | 14,528 | FOAMV_P14350_2mut |
| GGGGSGGGGSGGGGSGGGGS | 14,529 | SFV3L_P27401_2mutA |
| GGSGSS | 14,530 | AVIRE_P03360_3mut |
| GGSGSSEAAAK | 14,531 | MMTVB_P03365_WS |
| PAPAPAP | 14,532 | MLVAV_P03356_3mutA |
| GSSGGSPAP | 14,533 | SFV3L_P27401-Pro_2mut |
| GGSPAP | 14,534 | AVIRE_P03360 |
| GGSGGGPAP | 14,535 | FFV_093209 |
| GSSEAAAK | 14,536 | PERV_Q4VFZ2 |
| GSSGGGPAP | 14,537 | PERV_Q4VFZ2_3mutA_WS |
| GGGGSSEAAAK | 14,538 | KORV_Q9TTC1_3mutA |
| GGSEAAAKPAP | 14,539 | SFVCP_Q87040 |
| GGSGGGPAP | 14,540 | FOAMV_P14350_2mutA |
| GGGGSGGGGSGGGGSGGGGS | 14,541 | BLVJ_P03361_2mutB |
| GGGGSSPAP | 14,542 | SFV3L_P27401_2mutA |
| EAAAKGGS | 14,543 | MLVF5_P26810_3mut |
| GGSEAAAKGSS | 14,544 | MLVCB_P08361_3mut |
| GGGGSSEAAAK | 14,545 | SFV3L_P27401_2mut |
| EAAAKGGSGGG | 14,546 | FOAMV_P14350_2mut |
| GGSGGS | 14,547 | FLV_P10273_3mut |
| EAAAKGGG | 14,548 | FFV_093209-Pro |
| GSSGSSGSSGSSGSS | 14,549 | SFV3L_P27401 |
| GSSGGGPAP | 14,550 | PERV_Q4VFZ2_3mutA_WS |
| PAPGGSEAAAK | 14,551 | SFV3L_P27401-Pro_2mutA |
| GGSPAP | 14,552 | KORV_Q9TTC1 |
| EAAAKPAPGSS | 14,553 | KORV_Q9TTC1_3mutA |
| SGSETPGTSESATPES | 14,554 | SFV1_P23074 |
| GSSPAP | 14,555 | SFV3L_P27401-Pro_2mutA |
| GSSPAPGGG | 14,556 | SFV3L_P27401_2mut |
| GGGEAAAKGSS | 14,557 | SFV1_P23074_2mut |
| GGGPAPGGS | 14,558 | BAEVM_P10272_3mut |
| EAAAKGGG | 14,559 | KORV_Q9TTC1-Pro_3mutA |
| GSSGGG | 14,560 | SFV3L_P27401-Pro_2mut |
| GGSPAPEAAAK | 14,561 | BAEVM_P10272_3mut |
| EAAAKGSSPAP | 14,562 | FFV_093209 |
| EAAAKGGGGSEAAAK | 14,563 | SFV3L_P27401-Pro_2mutA |
| GSSGSSGSSGSSGSS | 14,564 | SFV1_P23074_2mut |
| EAAAKGGSPAP | 14,565 | FOAMV_P14350_2mut |
| GGSGGS | 14,566 | KORV_Q9TTC1-Pro_3mutA |
| EAAAKGSSGGS | 14,567 | GALV_P21414 |
| GSSGGGPAP | 14,568 | MLVAV_P03356 |
| PAPEAAAKGGS | 14,569 | FOAMV_P14350_2mut |
| EAAAKPAPGGG | 14,570 | AVIRE_P03360_3mut |
| GGSPAP | 14,571 | SFV3L_P27401_2mutA |
| GGGGSGGGGS | 14,572 | SFV3L_P27401_2mutA |
| GGGGSS | 14,573 | AVIRE_P03360_3mutA |
| GGSPAPGGG | 14,574 | SFV3L_P27401-Pro_2mutA |
| EAAAKPAPGSS | 14,575 | SFV3L_P27401 |
| EAAAKPAP | 14,576 | FOAMV_P14350-Pro_2mut |
| PAPEAAAKGSS | 14,577 | PERV_Q4VFZ2_3mutA_WS |
| EAAAKGGSGSS | 14,578 | SFV3L_P27401_2mutA |
| GGGEAAAKGSS | 14,579 | GALV_P21414_3mutA |
| GGGGSEAAAKGGGGS | 14,580 | PERV_Q4VFZ2_3mut |
| PAPGGSGSS | 14,581 | FFV_093209-Pro_2mutA |
| GGSEAAAKPAP | 14,582 | GALV_P21414_3mutA |
| GGSGGSGGSGGSGGS | 14,583 | FFV_093209-Pro |
| GSSGGSEAAAK | 14,584 | SFV3L_P27401-Pro_2mut |
| GGS | | GALV_P21414_3mutA |
| PAPGGSEAAAK | 14,586 | MLVMS_P03355 |
| PAPEAAAKGGS | 14,587 | BAEVM_P10272_3mutA |
| GGSGSSPAP | 14,588 | SFV3L_P27401-Pro_2mutA |
| GSSPAP | 14,589 | WMSV_P03359_3mut |
| GGGEAAAK | 14,590 | MMTVB_P03365 |
| GGGGSS | 14,591 | PERV_Q4VFZ2_3mut |
| GGSPAPGSS | 14,592 | SFV3L_P27401-Pro_2mut |
| PAPGGS | 14,593 | MLVBM_Q7SVK7_3mut |
| EAAAKGSSPAP | 14,594 | MLVBM_Q7SVK7_3mut |
| GGGGSSGGS | 14,595 | PERV_Q4VFZ2_3mut |
| PAPAPAPAPAPAP | 14,596 | SFV1_P23074 |
| GGSEAAAKGGG | 14,597 | SFV3L_P27401-Pro_2mut |
| GGSGGS | 14,598 | SFV1_P23074_2mut |
| GSSGGGGGS | 14,599 | MLVF5_P26810_3mutA |
| EAAAKGGGPAP | 14,600 | SFV3L_P27401 |
| EAAAKEAAAKEAAAKEAAAK | 14,601 | FOAMV_P14350-Pro_2mutA |
| GGGPAPGSS | 14,602 | SFV3L_P27401_2mutA |
| GGGGSGGGGSGGGGSGGGGS | 14,603 | SFV3L_P27401_2mut |
| EAAAKEAAAKEAAAKEAAAK | 14,604 | MMTVB_P03365_WS |
| PAPGSSGGS | 14,605 | KORV_Q9TTC1-Pro_3mutA |
| PAPGSSEAAAK | 14,606 | FOAMV_P14350-Pro_2mut |
| GSSPAPEAAAK | 14,607 | BAEVM_P10272_3mut |
| EAAAKGGGGSEAAAK | 14,608 | FFV_093209-Pro |
| GGSPAP | 14,609 | PERV_Q4VFZ2 |
| GGSGSSEAAAK | 14,610 | XMRV6_A1Z651_3mut |
| GGSEAAAKGGG | 14,611 | GALV_P21414_3mutA |
| PAPGGGGSS | 14,612 | AVIRE_P03360_3mutA |
| GGSGGSGGSGGS | 14,613 | PERV_Q4VFZ2 |
| GGGGSSGGS | 14,614 | PERV_Q4VFZ2_3mutA_WS |
| SGGSSGGSSGSETPGTSESATPESSGGSSGGSS | 14,615 | BAEVM_P10272_3mutA |
| GGGPAP | 14,616 | MLVAV_P03356_3mut |
| GGGGSGGGGSGGGGSGGGGS | 14,617 | FFV_093209_2mut |
| GSSEAAAK | 14,618 | FFV_093209 |
| GGSPAPEAAAK | 14,619 | FOAMV_P14350_2mut |
| GGGGGSEAAAK | 14,620 | FOAMV_P14350_2mut |
| GSSPAPGGS | 14,621 | MLVBM_Q7SVK7_3mut |
| GSS | | SFVCP_Q87040_2mut |
| EAAAKPAP | 14,623 | FOAMV_P14350-Pro |
| EAAAKGGG | 14,624 | SFV3L_P27401_2mut |
| GGGEAAAK | 14,625 | AVIRE_P03360_3mutA |
| PAPGSSGGG | 14,626 | WMSV_P03359_3mut |
| EAAAKGGSPAP | 14,627 | SFV3L_P27401 |
| GSSGGSGGG | 14,628 | SFV3L_P27401-Pro_2mutA |
| GSSGGGEAAAK | 14,629 | GALV_P21414_3mutA |
| GGGPAPGSS | 14,630 | MLVBM_Q7SVK7_3mutA_WS |
| PAPGGGEAAAK | 14,631 | FFV_093209-Pro_2mut |
| GSSGSSGSSGSS | 14,632 | SFV1_P23074_2mut |
| GGSEAAAK | 14,633 | PERV_Q4VFZ2_3mutA_WS |
| GGGEAAAKPAP | 14,634 | SFV3L_P27401_2mut |
| EAAAKGGGPAP | 14,635 | SFV3L_P27401_2mut |
| GGGGSSPAP | 14,636 | FLV_P10273_3mut |
| EAAAKPAPGSS | 14,637 | FFV_093209_2mut |
| GGGGSSPAP | 14,638 | SFV3L_P27401_2mut |
| GSSGSS | 14,639 | KORV_Q9TTC1_3mutA |
| GGGGSGGGGSGGGGSGGGGSGGGGS | 14,640 | BLVJ_P03361_2mut |
| GGGGSSGGS | 14,641 | GALV_P21414_3mutA |
| EAAAKGGSGSS | 14,642 | FFV_093209-Pro |
| EAAAKPAP | 14,643 | PERV_Q4VFZ2 |
| GSSGGGEAAAK | 14,644 | MLVBM_Q7SVK7_3mut |
| PAPGGSGGG | 14,645 | BAEVM_P10272 |
| EAAAKGGGPAP | 14,646 | MLVF5_P26810 |
| GSSGSSGSS | 14,647 | MLVBM_Q7SVK7_3mut |
| GSSGGS | 14,648 | AVIRE_P03360_3mutA |
| GGSEAAAKGGG | 14,649 | FOAMV_P14350_2mut |
| EAAAKGGS | 14,650 | MLVF5_P26810_3mutA |
| GGSGSSGGG | 14,651 | WMSV_P03359_3mut |
| EAAAK | 14,652 | SFV1_P23074_2mut |
| GSSGGSPAP | 14,653 | SFV3L_P27401-Pro_2mutA |
| GGGGSSGGS | 14,654 | KORV_Q9TTC1_3mut |
| PAPGGSGGG | 14,655 | FFV_093209-Pro_2mut |
| GGGPAPGGS | 14,656 | SFV3L_P27401_2mutA |
| GSSPAPEAAAK | 14,657 | FLV_P10273_3mut |
| GGSGSSPAP | 14,658 | SFV3L_P27401_2mut |
| GSSEAAAKGGS | 14,659 | SFV3L_P27401_2mut |
| PAPGGG | 14,660 | SFV3L_P27401_2mutA |
| SGSETPGTSESATPES | 14,661 | KORV_Q9TTC1-Pro_3mut |
| GGGGS | 14,662 | SFV1_P23074-Pro_2mutA |
| GSSGGGEAAAK | 14,663 | WMSV_P03359 |
| EAAAKGGGGSEAAAK | 14,664 | MLVF5_P26810_3mutA |
| GSSEAAAKPAP | 14,665 | FFV_093209 |
| GGGGGG | 14,666 | SFV1_P23074_2mutA |
| EAAAKEAAAKEAAAK | 14,667 | MMTVB_P03365-Pro |
| EAAAKPAPGSS | 14,668 | MLVBM_Q7SVK7_3mut |
| GGSGSSEAAAK | 14,669 | SFV3L_P27401_2mutA |
| GGSEAAAK | 14,670 | MLVMS_P03355_3mut |
| GGSPAPEAAAK | 14,671 | SFV3L_P27401_2mut |
| GGGPAPGSS | 14,672 | SFV1_P23074 |
| GGGGGSEAAAK | 14,673 | MLVBM_Q7SVK7_3mutA_WS |
| EAAAKPAPGSS | 14,674 | KORV_Q9TTC1-Pro |
| GSSGSSGSSGSS | 14,675 | SFV3L_P27401_2mut |
| EAAAKPAP | 14,676 | SFV3L_P27401_2mut |
| GGGEAAAK | 14,677 | PERV_Q4VFZ2_3mut |
| GGSGGS | 14,678 | SFV3L_P27401_2mutA |
| EAAAKGSSGGS | 14,679 | MMTVB_P03365 |
| SGSETPGTSESATPES | 14,680 | SFV3L_P27401 |
| EAAAKGSSGGG | 14,681 | PERV_Q4VFZ2 |
| EAAAKEAAAKEAAAKEAAAKEAAAKEAAAK | 14,682 | MMTVB_P03365 |
| GGSGGGPAP | 14,683 | KORV_Q9TTC1_3mutA |
| PAPAPAPAP | 14,684 | SFV3L_P27401 |
| GGGEAAAKGGS | 14,685 | SFV1_P23074_2mut |
| GSSGGSGGG | 14,686 | PERV_Q4VFZ2_3mut |
| PAPEAAAKGGS | 14,687 | FOAMV_P14350_2mutA |
| GGGEAAAKGSS | 14,688 | SFV3L_P27401_2mut |
| GGGGSGGGGSGGGGSGGGGS | 14,689 | MLVBM_Q7SVK7 |
| PAPGSSGGG | 14,690 | FLV_P10273 |
| GGSGSSGGG | 14,691 | FFV_093209 |
| EAAAKPAPGSS | 14,692 | MLVBM_Q7SVK7 |
| GSSEAAAKGGG | 14,693 | SFV3L_P27401_2mutA |
| GGSGGSGGSGGSGGS | 14,694 | MLVF5_P26810 |
| GGSEAAAKPAP | 14,695 | SFV3L_P27401-Pro_2mutA |
| EAAAKGGSPAP | 14,696 | SFV3L_P27401_2mutA |
| EAAAKGGGGGS | 14,697 | SFV3L_P27401_2mut |
| GSSPAPEAAAK | 14,698 | SFV3L_P27401_2mutA |
| PAPAP | 14,699 | MLVBM_Q7SVK7_3mut |
| PAPGGSEAAAK | 14,700 | KORV_Q9TTC1-Pro |
| GGSGSS | 14,701 | MLVF5_P26810_3mutA |
| GGSEAAAKPAP | 14,702 | FFV_093209_2mut |
| GSS | | MLVMS_P03355 |
| SGGSSGGSSGSETPGTSESATPESSGGSSGGSS | 14,704 | SFV3L_P27401-Pro |
| PAPGGGEAAAK | 14,705 | SFV3L_P27401_2mut |
| PAPGGGGGS | 14,706 | SFV3L_P27401-Pro_2mut |
| PAPGGSGSS | 14,707 | BAEVM_P10272_3mut |
| GSSGGGEAAAK | 14,708 | FFV_093209 |
| GGSEAAAKPAP | 14,709 | SFV1_P23074_2mut |
| GGGGG | 14,710 | FLV_P10273_3mut |
| GGGEAAAKGSS | 14,711 | SFV3L_P27401 |
| GSSGSSGSSGSSGSS | 14,712 | SFV1_P23074-Pro |
| SGSETPGTSESATPES | 14,713 | AVIRE_P03360 |
| PAPGSSGGG | 14,714 | MLVBM_Q7SVK7_3mut |
| GGGGSSPAP | 14,715 | HTL3P_Q4U0X6_2mut |
| GGGEAAAK | 14,716 | SFV1_P23074 |
| GGSGGG | 14,717 | AVIRE_P03360 |
| EAAAKGSSGGG | 14,718 | SFV3L_P27401_2mutA |
| GSSPAPEAAAK | 14,719 | FOAMV_P14350-Pro_2mutA |
| GGGPAPGSS | 14,720 | WMSV_P03359 |
| EAAAKGSSGGG | 14,721 | MLVMS_P03355 |
| GGGGGSEAAAK | 14,722 | MLVMS_P03355 |
| EAAAKPAPGGS | 14,723 | SFV3L_P27401 |
| EAAAKGSSPAP | 14,724 | SFV3L_P27401 |
| GGGGGGG | 14,725 | FOAMV_P14350_2mutA |
| EAAAKEAAAKEAAAK | 14,726 | SFV3L_P27401 |
| GSSPAPGGS | 14,727 | FFV_093209_2mutA |
| GGGGSSEAAAK | 14,728 | SFV3L_P27401-Pro_2mutA |
| GGSEAAAKGSS | 14,729 | GALV_P21414_3mutA |
| GGSEAAAKGSS | 14,730 | BAEVM_P10272_3mutA |
| EAAAKPAPGGG | 14,731 | MLVCB_P08361 |
| GSSGSSGSSGSSGSSGSS | 14,732 | SFV1_P23074-Pro |
| GGGGSEAAAKGGGGS | 14,733 | FOAMV_P14350_2mut |
| GSSPAPGGS | 14,734 | MLVMS_P03355_PLV919 |
| GGGGSGGGGS | 14,735 | FFV_093209-Pro |
| GSSGGSPAP | 14,736 | KORV_Q9TTC1_3mutA |
| GGSGGS | 14,737 | GALV_P21414_3mutA |
| PAPGSSEAAAK | 14,738 | WMSV_P03359 |
| PAPGGGGSS | 14,739 | MMTVB_P03365-Pro |
| GGGGSSGGS | 14,740 | PERV_Q4VFZ2_3mutA_WS |
| GGGGSGGGGS | 14,741 | FFV_093209_2mut |
| GGGGSGGGGSGGGGSGGGGS | 14,742 | XMRV6_A1Z651 |
| GGSGSSEAAAK | 14,743 | SFV1_P23074_2mut |
| GGSGGGGSS | 14,744 | GALV_P21414_3mutA |
| GGSEAAAKPAP | 14,745 | MLVBM_Q7SVK7 |
| EAAAKGGSPAP | 14,746 | SFV1_P23074_2mutA |
| PAPAPAPAP | 14,747 | FFV_093209 |
| GSSGGSPAP | 14,748 | MMTVB_P03365-Pro |
| GGGGGSPAP | 14,749 | KORV_Q9TTC1_3mutA |
| EAAAKGGGPAP | 14,750 | PERV_Q4VFZ2 |
| GSSGGSPAP | 14,751 | BAEVM_P10272 |
| GGGGG | 14,752 | FFV_093209 |
| GGGGGS | 14,753 | FLV_P10273_3mutA |
| EAAAKEAAAKEAAAK | 14,754 | FOAMV_P14350 |
| PAPGGG | 14,755 | MLVCB_P08361_3mut |
| GSSGGSEAAAK | 14,756 | FOAMV_P14350_2mutA |
| GGSPAPGGG | 14,757 | FLV_P10273_3mut |
| GSSGSSGSSGSSGSSGSS | 14,758 | SFV1_P23074-Pro_2mutA |
| GGSPAPEAAAK | 14,759 | SFV3L_P27401 |
| PAPGGGGSS | 14,760 | HTL3P_Q4U0X6_2mutB |
| GGGGSSEAAAK | 14,761 | MMTVB_P03365_2mut_WS |
| PAPGGS | 14,762 | MLVRD_P11227_3mut |
| GGSGGSGGSGGSGGS | 14,763 | MMTVB_P03365 |
| GSAGSAAGSGEF | 14,764 | AVIRE_P03360 |
| GSSGGS | 14,765 | BAEVM_P10272_3mutA |
| GGSGGGGSS | 14,766 | MMTVB_P03365 |
| GGSGGGGSS | 14,767 | WMSV_P03359 |
| PAPEAAAKGSS | 14,768 | SFV1_P23074 |
| GSSGSSGSSGSS | 14,769 | SFV1_P23074-Pro_2mutA |
| PAPAPAPAPAPAP | 14,770 | SFV3L_P27401 |
| PAPGSSGGG | 14,771 | FLV_P10273_3mut |
| GGSGSSPAP | 14,772 | MLVMS_P03355 |
| GGSGGGPAP | 14,773 | FOAMV_P14350 |
| PAPGGGGGS | 14,774 | KORV_Q9TTC1_3mutA |
| EAAAKGSSPAP | 14,775 | GALV_P21414_3mutA |
| GGSGSSPAP | 14,776 | MLVBM_Q7SVK7_3mut |
| EAAAKGSS | 14,777 | SFV3L_P27401_2mut |
| GGGGGSEAAAK | 14,778 | WMSV_P03359 |
| GGGGGGGG | 14,779 | SFV1_P23074-Pro |
| EAAAKEAAAK | 14,780 | MLVBM_Q7SVK7 |
| GGGEAAAKGGS | 14,781 | MLVBM_Q7SVK7 |
| EAAAKGGSPAP | 14,782 | SFV3L_P27401_2mut |
| GSSEAAAK | 14,783 | XMRV6_A1Z651 |
| PAPGGGEAAAK | 14,784 | MMTVB_P03365_WS |
| GGSPAP | 14,785 | GALV_P21414_3mutA |
| GSSPAPGGG | 14,786 | MLVBM_Q7SVK7_3mutA_WS |
| GGSGSSPAP | 14,787 | SFV1_P23074_2mutA |
| GGS | | HTL32_QOR5R2_2mut |
| GGSGGGGSS | 14,789 | MMTVB_P03365-Pro |
| GGGGSGGGGSGGGGSGGGGS | 14,790 | SFVCP_Q87040_2mutA |
| EAAAKGGGPAP | 14,791 | FOAMV_P14350_2mut |
| GSSGGGEAAAK | 14,792 | MMTVB_P03365 |
| SGGSSGGSSGSETPGTSESATPESSGGSSGGSS | 14,793 | MLVBM_Q7SVK7_3mutA_WS |
| AEAAAKEAAAKEAAAKEAAAKALEAEAAAKEAAAKEAAAKEAAAKA | 14,794 | MMTVB_P03365_WS |
| EAAAKEAAAK | 14,795 | FOAMV_P14350-Pro_2mut |
| GSSPAPEAAAK | 14,796 | FOAMV_P14350_2mutA |
| EAAAKPAPGGS | 14,797 | GALV_P21414_3mutA |
| GSSGGSPAP | 14,798 | KORV_Q9TTC1-Pro_3mut |
| GGGPAPEAAAK | 14,799 | MLVAV_P03356 |
| GGGEAAAKPAP | 14,800 | SFV1_P23074-Pro_2mut |
| GGGGGSEAAAK | 14,801 | SFV3L_P27401_2mut |
| GGGPAPGSS | 14,802 | SFV3L_P27401_2mut |
| GGSEAAAKPAP | 14,803 | AVIRE_P03360 |
| GSSGSSGSSGSSGSSGSS | 14,804 | SFV1_P23074-Pro_2mut |
| EAAAKGSSGGS | 14,805 | FOAMV_P14350_2mutA |
| GGGGGG | 14,806 | MLVBM_Q7SVK7_3mut |
| GSSPAPGGS | 14,807 | PERV_Q4VFZ2 |
| GGSGSSPAP | 14,808 | GALV_P21414_3mutA |
| GGGPAPEAAAK | 14,809 | SFV3L_P27401 |
| GGSGGGEAAAK | 14,810 | WMSV_P03359 |
| GSAGSAAGSGEF | 14,811 | SFV1_P23074_2mut |
| GSSGGGEAAAK | 14,812 | MLVMS_P03355 |
| GGG | | MMTVB_P03365-Pro |
| PAPGSSGGS | 14,814 | FOAMV_P14350_2mut |
| GGGGSSPAP | 14,815 | FFV_093209_2mut |
| SGGSSGGSSGSETPGTSESATPESSGGSSGGSS | 14,816 | MMTVB_P03365_WS |
| GGGGGGG | 14,817 | XMRV6_A1Z651 |
| PAPAPAPAPAP | 14,818 | FOAMV_P14350 |
| GGGGSGGGGSGGGGSGGGGS | 14,819 | MMTVB_P03365_2mut_WS |
| GGSGGGPAP | 14,820 | SFV3L_P27401_2mut |
| GGGGGG | 14,821 | SFV1_P23074-Pro |
| EAAAKPAPGSS | 14,822 | SFV3L_P27401_2mut |
| GGGGSSGGS | 14,823 | HTL3P_Q4U0X6_2mut |
| PAPGSSEAAAK | 14,824 | MMTVB_P03365-Pro |
| GGGGSSPAP | 14,825 | FOAMV_P14350-Pro_2mut |
| PAPGSSGGS | 14,826 | MMTVB_P03365 |
| AEAAAKEAAAKEAAAKEAAAKALEAEAAAKEAAAKEAAAKEAAAKA | 14,827 | SRV2_P51517 |
| PAPAPAP | 14,828 | MMTVB_P03365_2mut_WS |
| PAPGGGGGS | 14,829 | MMTVB_P03365_2mutB |
| GGGGSS | 14,830 | SFV1_P23074-Pro_2mutA |
| EAAAKEAAAKEAAAKEAAAK | 14,831 | SFV3L_P27401-Pro |
| GGSGGSGGSGGSGGS | 14,832 | MMTVB_P03365-Pro |
| GGGGGGG | 14,833 | SFV3L_P27401_2mut |
| PAPGGGEAAAK | 14,834 | SFV3L_P27401 |
| PAPGSS | 14,835 | FOAMV_P14350_2mutA |
| GGGGSGGGGS | 14,836 | SFVCP_Q87040_2mutA |
| GSSGGSGGG | 14,837 | XMRV6_A1Z651 |
| GGGGSGGGGSGGGGSGGGGSGGGGSGGGGS | 14,838 | MLVBM_Q7SVK7 |
| GSSEAAAKGGG | 14,839 | FFV_093209-Pro_2mut |
| GGSEAAAKPAP | 14,840 | SFV3L_P27401-Pro |
| GSSGGSGGG | 14,841 | SFV1_P23074_2mut |
| EAAAKGGGGSS | 14,842 | FOAMV_P14350_2mutA |
| GGGGGG | 14,843 | SFV3L_P27401_2mut |
| GGGGG | 14,844 | MLVBM_Q7SVK7_3mut |
| PAPEAAAKGGG | 14,845 | SFV3L_P27401 |
| EAAAKGGSPAP | 14,846 | KORV_Q9TTC1_3mutA |
| GGGEAAAKPAP | 14,847 | SFV1_P23074_2mut |
| GSSGSSGSSGSSGSSGSS | 14,848 | KORV_Q9TTC1-Pro |
| EAAAKEAAAKEAAAKEAAAK | 14,849 | SFVCP_Q87040 |
| PAPGSSEAAAK | 14,850 | MLVBM_Q7SVK7 |
| GSSGSSGSS | 14,851 | FFV_093209-Pro_2mut |
| GSSGGGPAP | 14,852 | SFV3L_P27401-Pro_2mut |
| GGGPAPEAAAK | 14,853 | WMSV_P03359_3mut |
| GGGEAAAK | 14,854 | MMTVB_P03365-Pro |
| GSSGSSGSSGSS | 14,855 | SFV3L_P27401-Pro_2mutA |
| PAPAPAPAPAP | 14,856 | FFV_093209-Pro |
| GGSPAPEAAAK | 14,857 | FFV_093209-Pro_2mut |
| GSSGSSGSSGSSGSSGSS | 14,858 | GALV_P21414 |
| EAAAKEAAAKEAAAKEAAAKEAAAK | 14,859 | FOAMV_P14350 |
| GGGPAPEAAAK | 14,860 | MMTVB_P03365-Pro |
| PAPGGSGGG | 14,861 | MLVF5_P26810_3mutA |
| PAPGGSGGG | 14,862 | FLV_P10273_3mut |
| GGGEAAAKGGS | 14,863 | SFV3L_P27401 |
| GSAGSAAGSGEF | 14,864 | MLVBM_Q7SVK7_3mut |
| GSSPAPGGG | 14,865 | MPMV_P07572_2mutB |
| GSSGSSGSSGSSGSSGSS | 14,866 | FOAMV_P14350 |
| GGSGGGGSS | 14,867 | BLVJ_P03361_2mut |
| PAPEAAAKGSS | 14,868 | SFV1_P23074-Pro |
| GGG | | FFV_093209 |
| EAAAKGGGGSS | 14,870 | SFV1_P23074_2mut |
| EAAAKEAAAKEAAAKEAAAKEAAAKEAAAK | 14,871 | SRV2_P51517 |
| GGGGSGGGGSGGGGSGGGGSGGGGSGGGGS | 14,872 | MMTVB_P03365 |
| GGGEAAAKGGS | 14,873 | MMTVB_P03365_WS |
| GSSGSS | 14,874 | SFV1_P23074 |
| GSSGGGGGS | 14,875 | SFV3L_P27401 |
| GGGGSSEAAAK | 14,876 | SFV1_P23074 |
| EAAAKGSSGGS | 14,877 | HTL1A_P03362_2mutB |
| GSSEAAAKGGS | 14,878 | GALV_P21414_3mutA |
| EAAAKGSSPAP | 14,879 | SFV1_P23074 |
| EAAAKPAPGSS | 14,880 | SFV3L_P27401_2mutA |
| PAPGSSGGG | 14,881 | SFV3L_P27401-Pro_2mut |
| GGGGSGGGGSGGGGSGGGGSGGGGSGGGGS | 14,882 | SFV3L_P27401-Pro |
| EAAAKEAAAKEAAAKEAAAKEAAAK | 14,883 | MMTVB_P03365_WS |
| GGGGSSEAAAK | 14,884 | MLVF5_P26810_3mutA |
| EAAAKGGSPAP | 14,885 | GALV_P21414 |
| PAPEAAAKGSS | 14,886 | MMTVB_P03365_WS |
| GSSGGGGGS | 14,887 | SFVCP_Q87040_2mut |
| GGGGSSPAP | 14,888 | SFV1_P23074 |
| EAAAKGGGGSS | 14,889 | XMRV6_A1Z651 |
| PAPAPAPAP | 14,890 | MMTVB_P03365 |
| GGSEAAAKGSS | 14,891 | SFV3L_P27401_2mutA |
| GSSPAPGGG | 14,892 | MMTVB_P03365_WS |
| GGGGGG | 14,893 | SFV3L_P27401-Pro |
| GGSGGSGGS | 14,894 | FOAMV_P14350-Pro_2mut |
| PAPAPAPAPAPAP | 14,895 | WMSV_P03359 |
| GSSPAP | 14,896 | MLVBM_Q7SVK7 |
| GGGGGSGSS | 14,897 | MMTVB_P03365_2mut_WS |
| EAAAKGSSGGS | 14,898 | MMTVB_P03365_2mutB_WS |
| EAAAK | 14,899 | FFV_093209_2mutA |
| PAPEAAAK | 14,900 | SFV1_P23074-Pro |
| EAAAKGGSGSS | 14,901 | SFV3L_P27401 |
| GGSGGSGGS | 14,902 | FFV_093209-Pro |
| GSSGGGEAAAK | 14,903 | MMTVB_P03365 |
| SGGSSGGSSGSETPGTSESATPESSGGSSGGSS | 14,904 | MLVFF_P26809_3mutA |
| GGSGGSGGSGGSGGSGGS | 14,905 | HTL1L_POC211_2mutB |
| GGGEAAAK | 14,906 | SFV3L_P27401-Pro_2mutA |
| GGGGGSGSS | 14,907 | MMTVB_P03365 |
| GSSPAPGGS | 14,908 | FOAMV_P14350_2mutA |
| EAAAKGSS | 14,909 | MLVMS_P03355 |
| GSSGGSGGG | 14,910 | FFV_093209-Pro |
| GGSGGGGSS | 14,911 | MMTVB_P03365-Pro_2mut |
| GGSPAPGSS | 14,912 | FOAMV_P14350_2mut |
| GGSGGSGGSGGSGGSGGS | 14,913 | SFVCP_Q87040-Pro_2mut |
| GSSEAAAKGGG | 14,914 | FOAMV_P14350_2mutA |
| GGSGGSGGS | 14,915 | MMTVB_P03365-Pro |
| GSSGSSGSSGSSGSSGSS | 14,916 | MMTVB_P03365_2mut_WS |
| GSSGSSGSSGSSGSS | 14,917 | MMTVB_P03365-Pro |
| PAPEAAAK | 14,918 | WDSV_O92815 |
| GSSGSSGSSGSSGSS | 14,919 | FFV_093209-Pro_2mut |
| EAAAKGGGGSEAAAK | 14,920 | MMTVB_P03365-Pro |
| GGSPAPEAAAK | 14,921 | FOAMV_P14350 |
| GSSGSS | 14,922 | PERV_Q4VFZ2 |
| GGG | | MMTVB_P03365-Pro |
| GGGGSGGGGSGGGGS | 14,924 | FFV_093209_2mut |
| EAAAKEAAAKEAAAKEAAAKEAAAKEAAAK | 14,925 | MMTVB_P03365-Pro |
| GGSGSSPAP | 14,926 | WMSV_P03359 |
| GGGGGGGG | 14,927 | SFV3L_P27401_2mut |
| PAPGSSEAAAK | 14,928 | FOAMV_P14350-Pro_2mutA |
| GGGGSSPAP | 14,929 | FOAMV_P14350_2mut |
| GSSGGSPAP | 14,930 | MLVBM_Q7SVK7_3mut |
| GSSGGGGGS | 14,931 | GALV_P21414_3mutA |
| EAAAKEAAAKEAAAKEAAAKEAAAK | 14,932 | MMTVB_P03365 |
| GSSGGGGGS | 14,933 | SFV1_P23074_2mut |
| GGGGSEAAAKGGGGS | 14,934 | SFV1_P23074 |
| GGGEAAAKPAP | 14,935 | FFV_093209 |
| PAPGGGEAAAK | 14,936 | SFV1_P23074 |
| GGSGGGEAAAK | 14,937 | PERV_Q4VFZ2_3mutA_WS |
| GSSGGG | 14,938 | MMTVB_P03365-Pro |
| EAAAKGSSGGS | 14,939 | FFV_093209_2mut |
| GGGGG | 14,940 | SFV1_P23074_2mut |
| GGGPAP | 14,941 | SFV3L_P27401 |
| GSSGGSEAAAK | 14,942 | FFV_093209 |
| SGGSSGGSSGSETPGTSESATPESSGGSSGGSS | 14,943 | MMTVB_P03365-Pro |
| GSSGGGEAAAK | 14,944 | SFV1_P23074_2mutA |
| GSSGSSGSSGSSGSS | 14,945 | SFV3L_P27401_2mut |
| GGSEAAAKPAP | 14,946 | FLV_P10273 |
| GGGGSGGGGS | 14,947 | FOAMV_P14350-Pro_2mutA |
| GSSEAAAKPAP | 14,948 | SFV3L_P27401 |
| GGGGSEAAAKGGGGS | 14,949 | MMTVB_P03365-Pro |
| PAPGSSEAAAK | 14,950 | MLVF5_P26810_3mut |
| EAAAKGGSGGG | 14,951 | SFV3L_P27401 |
| GGGPAPGGS | 14,952 | SFV3L_P27401 |
| GSSEAAAKGGS | 14,953 | FOAMV_P14350_2mutA |
| EAAAKGGSGGG | 14,954 | HTL1L_POC211 |
| GSSGGSPAP | 14,955 | SFV3L_P27401_2mutA |
| PAPAP | 14,956 | FFV_093209 |
| PAPGGSGSS | 14,957 | MMTVB_P03365_WS |
| EAAAKGGGGGS | 14,958 | FOAMV_P14350_2mut |
| PAPEAAAKGGS | 14,959 | SFV3L_P27401_2mut |
| GSSEAAAKPAP | 14,960 | MMTVB_P03365-Pro |
| GGSGGS | 14,961 | PERV_Q4VFZ2_3mut |
| GSSEAAAKGGG | 14,962 | FFV_093209-Pro_2mutA |
| EAAAK | 14,963 | HTL1L_POC211 |
| GSSPAP | 14,964 | MLVMS_P03355 |
| EAAAKPAPGGG | 14,965 | FFV_093209-Pro_2mut |
| GGGGSEAAAKGGGGS | 14,966 | SFV1_P23074-Pro_2mut |
| EAAAKGSSGGS | 14,967 | SFV3L_P27401 |
| GSAGSAAGSGEF | 14,968 | FFV_093209_2mutA |
| PAPEAAAKGGS | 14,969 | MMTVB_P03365_2mutB_WS |
| EAAAKEAAAKEAAAKEAAAKEAAAKEAAAK | 14,970 | MMTVB_P03365 |
| GGS | | MMTVB_P03365 |
| GGSEAAAKPAP | 14,972 | SFV1_P23074 |
| EAAAKGSSGGG | 14,973 | HTLV2_P03363_2mut |
| GGSEAAAKGGG | 14,974 | MMTVB_P03365_WS |
| GGSGGS | 14,975 | FFV_093209-Pro |
| GSSEAAAKGGS | 14,976 | MMTVB_P03365-Pro |
| PAPAPAPAPAP | 14,977 | SFV1_P23074_2mutA |
| GGSEAAAKGGG | 14,978 | MMTVB_P03365_2mutB_WS |
| PAPAPAPAP | 14,979 | MMTVB_P03365_WS |
| GGGGSGGGGSGGGGSGGGGSGGGGS | 14,980 | HTL3P_Q4U0X6_2mut |
| PAPGGSEAAAK | 14,981 | SFV1_P23074-Pro_2mut |
| GGSGGGPAP | 14,982 | MMTVB_P03365 |
| GSSGSSGSSGSSGSSGSS | 14,983 | MMTVB_P03365-Pro |
| GGSEAAAKPAP | 14,984 | SFV1_P23074-Pro |
| GGGEAAAKGSS | 14,985 | SFV3L_P27401_2mutA |
| GGGPAPGGS | 14,986 | AVIRE_P03360 |
| PAPGGG | 14,987 | MLVRD_P11227 |
| GGSEAAAKGSS | 14,988 | SFV3L_P27401_2mut |
| GGGEAAAKGSS | 14,989 | FOAMV_P14350_2mut |
| GGGEAAAKGSS | 14,990 | SFV1_P23074-Pro |
| EAAAKEAAAKEAAAKEAAAK | 14,991 | MLVAV_P03356 |
| EAAAKGGGPAP | 14,992 | JSRV_P31623_2mutB |
| EAAAKGGGGSS | 14,993 | FOAMV_P14350_2mut |
| EAAAKEAAAKEAAAKEAAAKEAAAK | 14,994 | SRV2_P51517 |
| GSSGGGGGS | 14,995 | FFV_093209 |
| PAPAPAP | 14,996 | FOAMV_P14350_2mutA |
| GGSGGSGGSGGS | 14,997 | FOAMV_P14350 |
| GGGEAAAK | 14,998 | MMTVB_P03365_WS |
| GGGGGS | 14,999 | SFV1_P23074_2mutA |
| GGSGGS | 15,000 | WMSV_P03359_3mut |
| EAAAKGGS | 15,001 | MMTVB_P03365-Pro |
| GGGGSS | 15,002 | BLVJ_P03361_2mut |
| PAPAP | 15,003 | MMTVB_P03365-Pro_2mut |
| PAPGGG | 15,004 | SMRVH_P03364 |
| EAAAKGGGGSS | 15,005 | SFV3L_P27401 |
| PAPAPAPAPAP | 15,006 | MMTVB_P03365 |
| GGGPAP | 15,007 | MMTVB_P03365-Pro |
| GSSGGSGGG | 15,008 | MMTVB_P03365 |
| EAAAKGGGPAP | 15,009 | FOAMV_P14350_2mutA |
| GSSGSSGSSGSS | 15,010 | SFV1_P23074 |
| GGGGSGGGGS | 15,011 | SFV3L_P27401 |
| GSSGGSGGG | 15,012 | MLVF5_P26810 |
| GGGEAAAKPAP | 15,013 | MMTVB_P03365-Pro |
| PAPEAAAK | 15,014 | HTLV2_P03363_2mut |
| GSSGSSGSSGSS | 15,015 | FOAMV_P14350_2mut |
| GSSEAAAKPAP | 15,016 | MMTVB_P03365-Pro |
| PAPEAAAKGGG | 15,017 | HTL3P_Q4U0X6_2mut |
| GGSEAAAKGSS | 15,018 | MMTVB_P03365-Pro |
| EAAAKPAPGGS | 15,019 | MMTVB_P03365_2mut_WS |
| GSSGGSEAAAK | 15,020 | MLVF5_P26810_3mutA |
| GGGGSGGGGSGGGGSGGGGSGGGGSGGGGS | 15,021 | MLVF5_P26810_3mut |
| EAAAKGGGGSS | 15,022 | MMTVB_P03365-Pro |
| GGGGGSGSS | 15,023 | HTL1A_P03362_2mutB |
| PAPAP | 15,024 | FFV_093209-Pro_2mut |
| GGGGGSPAP | 15,025 | HTL1C_P14078_2mut |
| GGGPAP | 15,026 | HTLV2_P03363_2mut |
| EAAAKGGGGSEAAAK | 15,027 | SFVCP_Q87040 |
| GGSEAAAKGGG | 15,028 | FFV_093209-Pro_2mutA |
| GSSPAPGGS | 15,029 | FOAMV_P14350-Pro_2mut |
| GGGGGGG | 15,030 | MMTVB_P03365-Pro |
| EAAAKGSS | 15,031 | SFV3L_P27401_2mutA |
| EAAAKGGGGSEAAAK | 15,032 | MMTVB_P03365-Pro |
| GGGGSEAAAKGGGGS | 15,033 | SFV1_P23074-Pro_2mutA |
| EAAAKGGGGSS | 15,034 | MMTVB_P03365 |
| GGGEAAAKGGS | 15,035 | SFV1_P23074 |
| PAPEAAAKGGG | 15,036 | MLVF5_P26810 |
| GGGGSSGGS | 15,037 | MMTVB_P03365 |
| GGSGSS | 15,038 | MMTVB_P03365 |
| PAPAPAPAPAPAP | 15,039 | KORV_Q9TTC1 |
| EAAAKGGG | 15,040 | SFV1_P23074-Pro_2mut |
| PAPAPAPAPAPAP | 15,041 | SRV2_P51517 |
| GSSGSSGSSGSSGSS | 15,042 | FFV_093209-Pro_2mutA |
| GGGGSS | 15,043 | FOAMV_P14350_2mut |
| PAPGGGEAAAK | 15,044 | MMTVB_P03365_WS |
| GGSGGGEAAAK | 15,045 | FFV_093209-Pro_2mut |
| PAPAPAPAPAP | 15,046 | MMTVB_P03365_WS |
| GGGEAAAKGGS | 15,047 | MMTVB_P03365-Pro |
| GGGEAAAKGSS | 15,048 | MMTVB_P03365_2mutB |
| GSSPAPEAAAK | 15,049 | MMTVB_P03365_WS |
| EAAAKEAAAKEAAAKEAAAKEAAAK | 15,050 | SFV1_P23074-Pro_2mutA |
| PAPGGG | 15,051 | SFV3L_P27401 |
| GSSEAAAKGGG | 15,052 | MMTVB_P03365_WS |
| GGGGSSEAAAK | 15,053 | FOAMV_P14350_2mut |
| PAPGSSGGS | 15,054 | SFV1_P23074-Pro_2mut |
| GSSGSSGSSGSSGSSGSS | 15,055 | SFV3L_P27401 |
| EAAAKGSSGGG | 15,056 | MMTVB_P03365 |
| PAPGGGGSS | 15,057 | WDSV_O92815_2mutA |
| GGSPAP | 15,058 | MMTVB_P03365-Pro |
| GGSGGSGGSGGSGGS | 15,059 | SFVCP_Q87040-Pro_2mut |
| PAPAPAPAP | 15,060 | MMTVB_P03365-Pro |
| GGGGG | 15,061 | HTL1A_P03362 |
| GGSGGSGGSGGS | 15,062 | SFV1_P23074_2mutA |
| GSSGSSGSSGSSGSS | 15,063 | FOAMV_P14350-Pro_2mut |
| PAPGGSEAAAK | 15,064 | MMTVB_P03365_2mutB_WS |
| PAPAPAPAP | 15,065 | SFV1_P23074_2mut |
| PAPGGGGSS | 15,066 | MMTVB_P03365 |
| GGSGSS | 15,067 | SFV3L_P27401_2mut |
| EAAAKEAAAKEAAAKEAAAK | 15,068 | MMTVB_P03365_2mut |
| EAAAKGGSGGG | 15,069 | HTL3P_Q4U0X6_2mut |
| PAPGGGGSS | 15,070 | SFVCP_Q87040-Pro_2mutA |
| EAAAKGGGGGS | 15,071 | MLVAV_P03356 |
| GGGGGS | 15,072 | FOAMV_P14350_2mut |
| GGGEAAAKGGS | 15,073 | FFV_O93209-Pro_2mutA |
| EAAAKPAPGGG | 15,074 | MMTVB_P03365_2mutB |
| GGSGGGPAP | 15,075 | FFV_093209_2mut |
| GSSEAAAKPAP | 15,076 | MMTVB_P03365 |
| PAPAPAPAPAPAP | 15,077 | SFV1_P23074_2mut |
| GGSPAPGGG | 15,078 | MMTVB_P03365-Pro |
| GGSGGGEAAAK | 15,079 | MMTVB_P03365 |
| PAPAP | 15,080 | SFVCP_Q87040 |
| GSSEAAAK | 15,081 | SFVCP_Q87040 |
| GGGGSGGGGSGGGGS | 15,082 | MMTVB_P03365-Pro |
| GSSGSSGSS | 15,083 | SFV3L_P27401 |
| EAAAKGGSGGG | 15,084 | MMTVB_P03365-Pro |
| GSSPAP | 15,085 | SFV1_P23074_2mut |
| GGGEAAAK | 15,086 | SFV1_P23074-Pro |
| AEAAAKEAAAKEAAAKEAAAKALEAEAAAKEAAAKEAAAKEAAAKA | 15,087 | MMTVB_P03365-Pro |
| PAPGGS | 15,088 | HTL1C_P14078_2mut |
| PAPGSSGGS | 15,089 | SFV1_P23074_2mut |
| PAPEAAAK | 15,090 | MMTVB_P03365_WS |
| PAPAP | 15,091 | MMTVB_P03365-Pro |
| EAAAKGGS | 15,092 | HTL1A_P03362_2mut |
| GGGGSEAAAKGGGGS | 15,093 | HTL1C_P14078 |
| EAAAKGSSGGS | 15,094 | FOAMV_P14350-Pro |
| PAPGGSGSS | 15,095 | MMTVB_P03365-Pro |
| PAPGGSEAAAK | 15,096 | SFV1_P23074_2mut |
| PAPGSSEAAAK | 15,097 | FFV_093209-Pro_2mut |
| PAPGSSGGG | 15,098 | FOAMV_P14350-Pro_2mutA |
| GSSGGGEAAAK | 15,099 | AVIRE_P03360 |
| GGGGGG | 15,100 | SMRVH_P03364_2mut |
| PAPEAAAKGGG | 15,101 | MMTVB_P03365-Pro |
| GGGEAAAKGGS | 15,102 | SFVCP_Q87040_2mutA |
| PAPAPAPAPAP | 15,103 | SRV2_P51517 |
| GSSGSSGSSGSSGSSGSS | 15,104 | MMTVB_P03365 |
| EAAAKGGGPAP | 15,105 | MLVAV_P03356 |
| PAPAPAPAPAP | 15,106 | FOAMV_P14350-Pro_2mutA |
| PAPGGSEAAAK | 15,107 | FOAMV_P14350 |
| GSSGGGPAP | 15,108 | HTL32_Q0R5R2_2mutB |
| GGGGGSPAP | 15,109 | HTL3P_Q4U0X6_2mutB |
| GSSGGSGGG | 15,110 | MMTVB_P03365-Pro |
| PAPAP | 15,111 | SFVCP_Q87040-Pro |
| GSSGGGPAP | 15,112 | MMTVB_P03365-Pro |
| GGSGSS | 15,113 | MMTVB_P03365-Pro_2mut |
| GGSPAPEAAAK | 15,114 | SFV1_P23074-Pro_2mut |
| EAAAKGGSGGG | 15,115 | SFV3L_P27401_2mut |
| GGGGSSEAAAK | 15,116 | MMTVB_P03365_WS |
| GGGGGSGSS | 15,117 | MMTVB_P03365_2mut |
| GGGGSSGGS | 15,118 | SFV1_P23074-Pro_2mutA |
| EAAAKGGGGSEAAAK | 15,119 | MMTVB_P03365_WS |
| PAPGGGEAAAK | 15,120 | SFV1_P23074-Pro |
| PAPEAAAKGGG | 15,121 | MMTVB_P03365 |
| AEAAAKEAAAKEAAAKEAAAKALEAEAAAKEAAAKEAAAKEAAAKA | 15,122 | MMTVB_P03365 |
| GSSGGSEAAAK | 15,123 | FOAMV_P14350-Pro_2mut |
| GGSPAP | 15,124 | MLVBM_Q7SVK7_3mut |
| GSSEAAAK | 15,125 | FOAMV_P14350 |
| GSSEAAAK | 15,126 | MMTVB_P03365-Pro |
| EAAAKGSSGGS | 15,127 | HTL1A_P03362_2mut |
| GGGEAAAKPAP | 15,128 | FOAMV_P14350-Pro_2mut |
| EAAAKGGSPAP | 15,129 | FOAMV_P14350 |
| GSSEAAAKPAP | 15,130 | MMTVB_P03365_WS |
| GSSGSSGSS | 15,131 | FOAMV_P14350_2mut |
| EAAAKEAAAKEAAAKEAAAK | 15,132 | MMTVB_P03365_WS |
| EAAAK | 15,133 | MMTVB_P03365 |
| PAPGSS | 15,134 | BAEVM_P10272 |
| PAPGGS | 15,135 | FFV_093209-Pro_2mut |
| GGSGGS | 15,136 | SFV1_P23074-Pro_2mutA |
| SGGSSGGSSGSETPGTSESATPESSGGSSGGSS | 15,137 | HTLV2_P03363_2mut |
| GGSGGGEAAAK | 15,138 | MMTVB_P03365_WS |
| PAPGSSGGG | 15,139 | HTL1A_P03362 |
| GGSGGS | 15,140 | SFV3L_P27401-Pro |
| GSSGSS | 15,141 | SFV1_P23074-Pro |
| PAPGGSEAAAK | 15,142 | MMTVB_P03365 |
| GSAGSAAGSGEF | 15,143 | MMTVB_P03365-Pro |
| PAPGGG | 15,144 | FOAMV_P14350_2mut |
| EAAAKGGSGSS | 15,145 | MMTVB_P03365_WS |
| GSSGGGEAAAK | 15,146 | SFV3L_P27401-Pro |
| GGSGGGPAP | 15,147 | FOAMV_P14350-Pro_2mut |
| PAPAPAPAPAPAP | 15,148 | WDSV_O92815 |
| SGSETPGTSESATPES | 15,149 | SFVCP_Q87040-Pro_2mutA |
| GGSGGSGGS | 15,150 | SFV1_P23074 |
| GGGGSS | 15,151 | SFVCP_Q87040_2mut |
| GGGGGSEAAAK | 15,152 | MMTVB_P03365 |
| SGSETPGTSESATPES | 15,153 | MMTVB_P03365_WS |
| PAPAPAP | 15,154 | SFV3L_P27401 |
| PAPEAAAKGSS | 15,155 | MMTVB_P03365_2mutB_WS |
| GSSGSSGSSGSSGSS | 15,156 | SRV2_P51517 |
| GGGPAPGSS | 15,157 | HTL32_QOR5R2_2mutB |
| GGSGGGGSS | 15,158 | MMTVB_P03365-Pro |
| SGSETPGTSESATPES | 15,159 | SRV2_P51517 |
| EAAAKGSSGGS | 15,160 | MMTVB_P03365-Pro |
| GSSPAPEAAAK | 15,161 | MMTVB_P03365-Pro |
| GSSPAPEAAAK | 15,162 | SRV2_P51517 |
| GGGGSSPAP | 15,163 | MMTVB_P03365-Pro |
| PAPGGGEAAAK | 15,164 | SFV1_P23074-Pro_2mutA |
| PAPEAAAKGGS | 15,165 | MMTVB_P03365 |
| GSSGSSGSSGSSGSSGSS | 15,166 | FOAMV_P14350-Pro |
| GGSPAPGSS | 15,167 | SFV3L_P27401 |
| GGGPAPGGS | 15,168 | SFV1_P23074-Pro_2mutA |
| GGGPAPGSS | 15,169 | MMTVB_P03365-Pro |
| EAAAKPAP | 15,170 | MLVBM_Q7SVK7 |
| EAAAKEAAAKEAAAK | 15,171 | HTL1C_P14078 |
| GSSGGSEAAAK | 15,172 | SRV2_P51517 |
| PAPGGGGGS | 15,173 | SRV2_P51517 |
| GGGEAAAK | 15,174 | FFV_093209-Pro_2mut |
| EAAAKGGGPAP | 15,175 | HTL32_QOR5R2 |
| GGSGSSGGG | 15,176 | MMTVB_P03365 |
| PAPEAAAKGSS | 15,177 | MMTVB_P03365-Pro |
| PAPGGGGGS | 15,178 | MMTVB_P03365-Pro |
| EAAAKGGGGGS | 15,179 | MMTVB_P03365_WS |
| GGGGGS | 15,180 | MMTVB_P03365-Pro |
| GGGGSGGGGSGGGGSGGGGSGGGGS | 15,181 | HTL1C_P14078 |
| EAAAKGGSPAP | 15,182 | MMTVB_P03365 |
| GGGGSSPAP | 15,183 | FFV_093209-Pro_2mut |
| GGGGSSGGS | 15,184 | MMTVB_P03365-Pro |
| PAPGSSGGS | 15,185 | MMTVB_P03365-Pro |
| GGGGGS | 15,186 | SRV2_P51517 |
| GGSGSSGGG | 15,187 | MMTVB_P03365 |
| GSSGGSEAAAK | 15,188 | MMTVB_P03365-Pro |
| EAAAKEAAAKEAAAKEAAAK | 15,189 | GALV_P21414 |
| GGSEAAAKGGG | 15,190 | MMTVB_P03365-Pro |
| SGGSSGGSSGSETPGTSESATPESSGGSSGGSS | 15,191 | MMTVB_P03365-Pro |
| GSSEAAAKGGS | 15,192 | MMTVB_P03365 |
| GGGGSGGGGSGGGGSG( GGSGGGGSGGGGS | 15,193 | HTL3P_Q4U0X6_2mutB |
| GGGEAAAK | 15,194 | MMTVB_P03365-Pro |
| PAPAPAPAP | 15,195 | MMTVB_P03365-Pro |
| PAPGSSGGG | 15,196 | MMTVB_P03365 |
| GSSGSSGSSGSSGSS | 15,197 | GALV_P21414 |
| GGSPAP | 15,198 | MMTVB_P03365_WS |
| GGGGSGGGGSGGGGSGGGGSGGGGSGGGGS | 15,199 | MMTVB_P03365-Pro |
| PAPEAAAK | 15,200 | MMTVB_P03365-Pro |
| PAPGSSGGG | 15,201 | SFV1_P23074-Pro_2mutA |
| GGGGGSEAAAK | 15,202 | MMTVB_P03365_2mutB_WS |
| PAPAPAPAPAP | 15,203 | MMTVB_P03365-Pro |
| EAAAKGGSGSS | 15,204 | MMTVB_P03365-Pro |
| EAAAKEAAAKEAAAKEAAAK | 15,205 | MLVRD_P11227_3mut |
| PAPAPAPAP | 15,206 | FOAMV_P14350_2mutA |
| GGGPAPGSS | 15,207 | SFVCP_Q87040_2mut |
| PAPEAAAKGSS | 15,208 | SFVCP_Q87040_2mut |
| GGSPAPGGG | 15,209 | MMTVB_P03365-Pro |
| GGGGSGGGGSGGGGSGGGGS | 15,210 | MMTVB_P03365 |
| EAAAKGGS | 15,211 | HTL3P_Q4U0X6_2mut |
| PAPGSSGGS | 15,212 | MMTVB_P03365_WS |
| GGGGSGGGGS | 15,213 | MMTVB_P03365 |
| GGSGGS | 15,214 | FOAMV_P14350 |
| EAAAKGGGGSEAAAK | 15,215 | SFVCP_Q87040-Pro_2mut |
| EAAAKEAAAKEAAAKEAAAK | 15,216 | MMTVB_P03365-Pro_2mutB |
| PAPGGGEAAAK | 15,217 | SFVCP_Q87040-Pro |
| GSSGSS | 15,218 | JSRV_P31623_2mutB |
| EAAAKGGGGGS | 15,219 | MMTVB_P03365_2mut_WS |
| GSSPAPEAAAK | 15,220 | MMTVB_P03365-Pro |
| GGGEAAAK | 15,221 | HTL1C_P14078 |
| PAPEAAAKGSS | 15,222 | HTL32_QOR5R2_2mutB |
| GGGGSSEAAAK | 15,223 | MMTVB_P03365-Pro |
| PAPGSSGGS | 15,224 | MMTVB_P03365-Pro |
| EAAAKGGGGGS | 15,225 | MMTVB_P03365 |
| GGGGSGGGGSGGGGSGGGGS | 15,226 | MMTVB_P03365 |
| EAAAKGGGGSS | 15,227 | HTL3P_Q4U0X6_2mut |
| GGGEAAAKGGS | 15,228 | SFVCP_Q87040-Pro |
| GGGGGSPAP | 15,229 | MMTVB_P03365-Pro_2mutB |
| GGSGGGEAAAK | 15,230 | SFV3L_P27401-Pro |
| PAPGGGGGS | 15,231 | SFV3L_P27401-Pro |
| EAAAKGGGGSEAAAK | 15,232 | MMTVB_P03365 |
| PAPEAAAKGSS | 15,233 | MMTVB_P03365-Pro |
| GGSEAAAKGGG | 15,234 | MMTVB_P03365-Pro |
| GGSGGSGGSGGSGGS | 15,235 | SMRVH_P03364_2mutB |
| GGSGGSGGSGGSGGS | 15,236 | HTL1L_POC211_2mut |
| GGGGGG | 15,237 | WDSV_092815 |
| GGGGGSGSS | 15,238 | MMTVB_P03365-Pro |
| GGSEAAAKPAP | 15,239 | SFV3L_P27401-Pro_2mut |
| GGGPAPGSS | 15,240 | MMTVB_P03365_2mut_WS |
| GGGGGS | 15,241 | MMTVB_P03365_WS |
| GGSPAPEAAAK | 15,242 | MMTVB_P03365 |
| PAPEAAAKGGS | 15,243 | HTL1A_P03362 |
| EAAAKGGSGSS | 15,244 | MMTVB_P03365_2mut_WS |
| GGGPAPEAAAK | 15,245 | SFV3L_P27401-Pro_2mut |
| PAPGGGGSS | 15,246 | HTL32_QOR5R2_2mut |
| GSSPAPGGG | 15,247 | HTL3P_Q4U0X6_2mut |
| GGGGSSGGS | 15,248 | BLVAU_P25059_2mut |
| EAAAKGGGGGS | 15,249 | HTL1L_POC211 |
| GGSEAAAKGSS | 15,250 | JSRV_P31623_2mutB |
| GSSGGG | 15,251 | JSRV_P31623 |
| GGSGGSGGSGGS | 15,252 | MMTVB_P03365-Pro |
| EAAAKPAP | 15,253 | SFV1_P23074-Pro_2mutA |
| GGGGSSGGS | 15,254 | MMTVB_P03365_WS |
| GGSGGS | 15,255 | MMTVB_P03365_WS |
| EAAAKGGGGGS | 15,256 | MMTVB_P03365-Pro |
| GGGGSGGGGSGGGGSGGGGSGGGGSGGGGS | 15,257 | MMTVB_P03365 |
| GGSGGSGGS | 15,258 | MMTVB_P03365 |
| GGGGGSEAAAK | 15,259 | MLVBM_Q7SVK7 |
| GGSGSSPAP | 15,260 | MMTVB_P03365_WS |
| EAAAKEAAAKEAAAK | 15,261 | JSRV_P31623 |
| PAPEAAAKGGS | 15,262 | MMTVB_P03365-Pro |
| GGSGSSEAAAK | 15,263 | FOAMV_P14350 |
| GGGGGSGSS | 15,264 | MMTVB_P03365-Pro_2mut |
| GGGPAPGGS | 15,265 | MMTVB_P03365 |
| SGSETPGTSESATPES | 15,266 | SFVCP_Q87040_2mut |
| GSSPAPGGS | 15,267 | SFV1_P23074-Pro_2mutA |
| GSSGSSGSSGSSGSS | 15,268 | MMTVB_P03365 |
| EAAAKGGGPAP | 15,269 | MMTVB_P03365 |
| GSSGGG | 15,270 | MMTVB_P03365_2mut_WS |
| GGGEAAAKPAP | 15,271 | MMTVB_P03365 |
| PAPGGSGGG | 15,272 | MMTVB_P03365-Pro |
| GSSGGSGGG | 15,273 | WDSV_O92815_2mut |
| GGSGGG | 15,274 | HTL32_QOR5R2_2mut |
| EAAAKGGSPAP | 15,275 | HTLV2_P03363_2mut |
| GGSPAPEAAAK | 15,276 | MMTVB_P03365-Pro |
| GSSGGSEAAAK | 15,277 | MMTVB_P03365_2mut |
| GSAGSAAGSGEF | 15,278 | MMTVB_P03365_WS |
| PAPGGSGSS | 15,279 | FFV_093209 |
| GGSEAAAKGGG | 15,280 | MMTVB_P03365 |
| GGSPAPGSS | 15,281 | MMTVB_P03365-Pro |
| GSSGGSGGG | 15,282 | SFV3L_P27401 |
| PAPEAAAKGGG | 15,283 | HTL1A_P03362_2mutB |
| GGGEAAAKPAP | 15,284 | MMTVB_P03365-Pro |
| GGSEAAAK | 15,285 | HTL32_Q0R5R2_2mutB |
| GGGEAAAKGSS | 15,286 | MPMV_P07572 |
| GGGGGSEAAAK | 15,287 | MMTVB_P03365-Pro |
| PAPAPAPAPAP | 15,288 | SFVCP_Q87040-Pro_2mutA |
| PAPAPAPAPAP | 15,289 | HTL1L_POC211_2mut |
| GGGGSSGGS | 15,290 | HTL3P_Q4U0X6 |
| PAPGGSEAAAK | 15,291 | MMTVB_P03365_2mut_WS |
| PAPAPAPAPAP | 15,292 | HTL1A_P03362 |
| EAAAKPAPGGG | 15,293 | MMTVB_P03365_2mut_WS |
| GGSEAAAK | 15,294 | MMTVB_P03365_2mut_WS |
| GGGEAAAKGSS | 15,295 | SFV1_P23074-Pro_2mutA |
| GGSPAPGSS | 15,296 | MMTVB_P03365-Pro |
| GGSEAAAKPAP | 15,297 | MLVBM_Q7SVK7 |
| PAPEAAAKGGG | 15,298 | MMTVB_P03365_2mut_WS |
| GSSEAAAKPAP | 15,299 | MMTVB_P03365-Pro_2mutB |
| GGGGSEAAAKGGGGS | 15,300 | MMTVB_P03365-Pro_2mut |
| GSSEAAAKGGS | 15,301 | MMTVB_P03365-Pro_2mutB |
| GSSGSSGSSGSSGSS | 15,302 | SRV2_P51517_2mutB |
| GGGGGSPAP | 15,303 | HTL1L_POC211_2mut |
| GGSEAAAK | 15,304 | MMTVB_P03365 |
| GSSPAPEAAAK | 15,305 | SMRVH_P03364_2mutB |
| GGGPAPGGS | 15,306 | HTL1C_P14078_2mut |
| GGSPAPEAAAK | 15,307 | MMTVB_P03365_WS |
| GGSEAAAKPAP | 15,308 | HTL1A_P03362_2mut |
| PAPAPAPAP | 15,309 | HTLV2_P03363_2mut |
| GSSPAPGGG | 15,310 | MMTVB_P03365 |
| GSSGSSGSSGSS | 15,311 | MMTVB_P03365-Pro |
| GGSEAAAKGSS | 15,312 | MMTVB_P03365_WS |
| GGSGSSGGG | 15,313 | MMTVB_P03365_2mutB |
| GSSGSSGSSGSSGSSGSS | 15,314 | JSRV_P31623_2mutB |
| GGSEAAAKPAP | 15,315 | MMTVB_P03365-Pro |
| GSSGGSGGG | 15,316 | HTLV2_P03363_2mut |
| AEAAAKEAAAKEAAAKEAAAKALEAEAAAKEAAAKEAAAKEAAAKA | 15,317 | WDSV_O92815_2mut |
| GGSPAPEAAAK | 15,318 | MMTVB_P03365 |
| GGGGSSEAAAK | 15,319 | MMTVB_P03365 |
| GGSGGGEAAAK | 15,320 | SFV1_P23074-Pro_2mutA |
| GGGGSEAAAKGGGGS | 15,321 | WDSV_O92815_2mut |
| GGSGSSEAAAK | 15,322 | MMTVB_P03365_2mutB_WS |
| GGSEAAAKPAP | 15,323 | MMTVB_P03365_WS |
| GSSGGGEAAAK | 15,324 | SFVCP_Q87040-Pro |
| GSSGGS | 15,325 | SFVCP_Q87040-Pro_2mut |
| GGSEAAAKPAP | 15,326 | SFVCP_Q87040_2mut |
| GSSGGSEAAAK | 15,327 | SFVCP_Q87040_2mut |
| GSSPAPEAAAK | 15,328 | SRV2_P51517_2mutB |
| GGSGGSGGSGGSGGSGGS | 15,329 | BLVAU_P25059 |
| GSSGSSGSSGSSGSS | 15,330 | HTL1C_P14078_2mut |
| EAAAKGGGGSS | 15,331 | MMTVB_P03365_2mutB |
| GGGEAAAKGSS | 15,332 | SFVCP_Q87040-Pro |

### Example 3: Screening Configurations of Template RNAs that Install the SCD Mutation into the Endogenous HBB Gene in Human Cells

[0894] This example describes the use of a gene modifying system containing a gene modifying polypeptide and template RNAs comprising varied lengths of heterologous object sequences and primer binding site sequences to identify favorable configurations for editing of the endogenous HBB gene in human cells. In this example, a template RNA contains:
[0895] (1) a gRNA spacer;
[0896] (2) a gRNA scaffold;
[0897] (3) a heterologous object sequence; and
[0898] (4) a primer binding site (PBS) sequence.

[0899] The template RNAs were designed to contain 8-17 nt PBS sequences and 9-20 nt heterologous object sequences. Two different gRNA spacer sequences were used to target sites proximal to the SCD mutation in the endogenous HBB genomic site. The heterologous object sequences and PBS sequences were designed to install the SCD mutation (an E6V mutation) into the endogenous gene by replacing an “A” nucleotide with a “T” nucleotide at the mutation site using a gene modifying system described herein. The template RNA sequences used are those shown in Table A (HBB5 sequences) and Table B (HBB8 sequences), with the following exceptions. First, the mutation region of the RT template sequence was designed to install the mutation (A->T) rather than to correct back to the wild-type sequence. In particular, RT template regions for SCD installation using template HBB5 comprise at least a portion of the following sequence: Install RT Template (PAM-kill): AACGGCAGACTTCTCTACAG (SEQ ID NO: 21672), of which the no PAM-kill equivalent would be: Install RT Template (no PAM-kill): AACGGCAGACTTCTCCACAG (SEQ ID NO: 21673). In addition, the installation version of the HBB8 spacer had the following sequence that differed from the HBB8 mutation correction spacer due to the SCD mutation falling within the target protospacer, resulting in a single nt difference relative to the WT sequence without the SCD mutation: GTAACGGCAGACTTCTCCTC (SEQ ID NO: 21674). In particular, RT template regions for SCD mutation installation using template HBB8 comprise at least a portion of the following sequence: Install RT Template (293T SNP): TGGTGCACCTGACTCCTGTG (SEQ ID NO: 21676), of which the equivalent template lacking the 293T SNP and targeted to the hg38 reference sequence would be: Install RT Template (no SNP): TGGTGCATCTGACTCCTGTG (SEQ ID NO: 21675).

[0900] A gene modifying system comprising a gene modifying polypeptide (see Table C) and a template RNA was transfected into HEK293T cells. The gene modifying polypeptide and the template RNAs were delivered by nucleofection in RNA format. Specifically, 1 μg of gene modifying polypeptide mRNA was combined with 10 μM template RNAs. The mRNA and template RNAs were added to 25 μL SF buffer containing 250,000 HEK293T cells and cells were nucleofected using program DS-150. After nucleofection, cells were grown at 37° C., 5% CO₂ for 3 days prior to cell lysis and genomic DNA extraction. To analyze gene editing activity, primers flanking the HBB genomic target site were used to amplify across the locus. Amplicons are analyzed via short read sequencing using an Illumina MiSeq. Gene editing activity with high editing efficiency was detected in the configurations with 9-12nt PBS sequence and 13-16 nt heterologous object sequence. These results indicate that template RNAs comprising gRNA spacers and gRNA scaffolds described herein successfully directed a gene modifying polypeptide to the endogenous HBB gene in human cells, such that specific gene editing occurred. Results are shown in Table E.

[0901] Although this experiment demonstrates installation of the mutation rather than correction of the mutation, it indicates that editing may be performed at the native HBB locus.

TABLE E
HBB5 and HBB8 Sequences for_installing mutation. The columns indicate, from left
to right: 1) Name of the HBB5 template RNA, 2) Full HBB5 template RNA sequence depicted as
RNA, further showing chemical modifications as used in Example 3, 3) observed activity of
template RNA of column 2 as defined in Example 3, 4) Name of the HBB8 template RNA, 5) Full
HBB8 template RNA sequence depicted as RNA, further showing chemical modifications as used
in Example 3, 6) observed activity of template RNA of column 5 as defined in Example 3.

| | | SEQ | Ac- | | | SEQ | Ac- |
|---|---|---|---|---|---|---|---|
| | | ID | tiv- | | | ID | tiv- |
| Name | Template Sequence | NO | ity | Name | Template Sequence | NO | ity |
| HBB | mC*mA*mU*rGrGrUrGrCrArCr | 20637 | + | HBB | mG*mU*mA*rArCrGrGrCrArGr | 20727 | + |
| 5_inst | CrUrGrArCrUrCrCrUrGrGrUrUr | | | 8_inst | ArCrUrUrCrUrCrCrUrCrGrUrUr | | |
| _RT2 | UrUrArGrArGrCrUrArGrArArAr | | | _RT2 | UrUrArGrArGrCrUrArGrArArAr | | |
| 0_PB | UrArGrCrArArGrUrUrArArArAr | | | 0_PB | UrArGrCrArArGrUrUrArArArAr | | |
| S17 | UrArArGrGrCrUrArGrUrCrCrGr | | | S17 | UrArArGrGrCrUrArGrUrCrCrGr | | |
| | UrUrArUrCrArArCrUrUrGrArAr | | | | UrUrArUrCrArArCrUrUrGrArAr | | |
| | ArArArGrUrGrGrCrArCrCrGrAr | | | | ArArArGrUrGrGrCrArCrCrGrAr | | |
| | GrUrCrGrGrUrGrCrArArCrGrGr | | | | GrUrCrGrGrUrGrCrUrGrGrUrGr | | |
| | CrArGrArCrUrUrCrUrCrUrArCr | | | | CrArCrCrUrGrArCrUrCrCrUrGr | | |
| | ArGrGrArGrUrCrArGrGrUrGrCr | | | | UrGrGrArGrArArGrUrCrUrGrCr | | |
| | ArCrC*mA*mU*mG | | | | CrGrU*mU*mA*mC | | |
| HBB | mC*mA*mU*rGrGrUrGrCrArCr | 20638 | + | HBB | mG*mU*mA*rArCrGrGrCrArGr | 20728 | + |
| 5_inst | CrUrGrArCrUrCrCrUrGrGrUrUr | | | 8_inst | ArCrUrUrCrUrCrCrUrCrGrUrUr | | |
| _RT2 | UrUrArGrArGrCrUrArGrArArAr | | | _RT2 | UrUrArGrArGrCrUrArGrArArAr | | |
| 0_PB | UrArGrCrArArGrUrUrArArArAr | | | 0_PB | UrArGrCrArArGrUrUrArArArAr | | |
| S16 | UrArArGrGrCrUrArGrUrCrCrGr | | | S16 | UrArArGrGrCrUrArGrUrCrCrGr | | |
| | UrUrArUrCrArArCrUrUrGrArAr | | | | UrUrArUrCrArArCrUrUrGrArAr | | |
| | ArArArGrUrGrGrCrArCrCrGrAr | | | | ArArArGrUrGrGrCrArCrCrGrAr | | |
| | GrUrCrGrGrUrGrCrArArCrGrGr | | | | GrUrCrGrGrUrGrCrUrGrGrUrGr | | |
| | CrArGrArCrUrUrCrUrCrUrArCr | | | | CrArCrCrUrGrArCrUrCrCrUrGr | | |
| | ArGrGrArGrUrCrArGrGrUrGrCr | | | | UrGrGrArGrArArGrUrCrUrGrCr | | |
| | ArC*mC*mA*mU | | | | CrG*mU*mU*mA | | |
| HBB | mC*mA*mU*rGrGrUrGrCrArCr | 20639 | + | HBB | mG*mU*mA*rArCrGrGrCrArGr | 20729 | + |
| 5_inst | CrUrGrArCrUrCrCrUrGrGrUrUr | | | 8_inst | ArCrUrUrCrUrCrCrUrCrGrUrUr | | |
| _RT2 | UrUrArGrArGrCrUrArGrArArAr | | | _RT2 | UrUrArGrArGrCrUrArGrArArAr | | |
| 0_PB | UrArGrCrArArGrUrUrArArArAr | | | 0_PB | UrArGrCrArArGrUrUrArArArAr | | |
| S15 | UrArArGrGrCrUrArGrUrCrCrGr | | | S15 | UrArArGrGrCrUrArGrUrCrCrGr | | |
| | UrUrArUrCrArArCrUrUrGrArAr | | | | UrUrArUrCrArArCrUrUrGrArAr | | |
| | ArArArGrUrGrGrCrArCrCrGrAr | | | | ArArArGrUrGrGrCrArCrCrGrAr | | |
| | GrUrCrGrGrUrGrCrArArCrGrGr | | | | GrUrCrGrGrUrGrCrUrGrGrUrGr | | |
| | CrArGrArCrUrUrCrUrCrUrArCr | | | | CrArCrCrUrGrArCrUrCrCrUrGr | | |
| | ArGrGrArGrUrCrArGrGrUrGrCr | | | | UrGrGrArGrArArGrUrCrUrGrCr | | |
| | A*mC*mC*mA | | | | C*mG*mU*mU | | |
| HBB | mC*mA*mU*rGrGrUrGrCrArCr | 20640 | + | HBB | mG*mU*mA*rArCrGrGrCrArGr | 20730 | + |
| 5_inst | CrUrGrArCrUrCrCrUrGrGrUrUr | | | 8_inst | ArCrUrUrCrUrCrCrUrCrGrUrUr | | |
| _RT2 | UrUrArGrArGrCrUrArGrArArAr | | | _RT2 | UrUrArGrArGrCrUrArGrArArAr | | |
| 0_PB | UrArGrCrArArGrUrUrArArArAr | | | 0_PB | UrArGrCrArArGrUrUrArArArAr | | |
| S14 | UrArArGrGrCrUrArGrUrCrCrGr | | | S14 | UrArArGrGrCrUrArGrUrCrCrGr | | |
| | UrUrArUrCrArArCrUrUrGrArAr | | | | UrUrArUrCrArArCrUrUrGrArAr | | |
| | ArArArGrUrGrGrCrArCrCrGrAr | | | | ArArArGrUrGrGrCrArCrCrGrAr | | |
| | GrUrCrGrGrUrGrCrArArCrGrGr | | | | GrUrCrGrGrUrGrCrUrGrGrUrGr | | |
| | CrArGrArCrUrUrCrUrCrUrArCr | | | | CrArCrCrUrGrArCrUrCrCrUrGr | | |
| | ArGrGrArGrUrCrArGrGrUrGrC | | | | UrGrGrArGrArArGrUrCrUrGrC | | |
| | *mA*mC*mC | | | | *mC*mG*mU | | |
| HBB | mC*mA*mU*rGrGrUrGrCrArCr | 20641 | +++ | HBB | mG*mU*mA*rArCrGrGrCrArGr | 20731 | + |
| 5_inst | CrUrGrArCrUrCrCrUrGrGrUrUr | | | 8_inst | ArCrUrUrCrUrCrCrUrCrGrUrUr | | |
| _RT2 | UrUrArGrArGrCrUrArGrArArAr | | | _RT2 | UrUrArGrArGrCrUrArGrArArAr | | |
| 0_PB | UrArGrCrArArGrUrUrArArArAr | | | 0_PB | UrArGrCrArArGrUrUrArArArAr | | |
| S13 | UrArArGrGrCrUrArGrUrCrCrGr | | | S13 | UrArArGrGrCrUrArGrUrCrCrGr | | |
| | UrUrArUrCrArArCrUrUrGrArAr | | | | UrUrArUrCrArArCrUrUrGrArAr | | |
| | ArArArGrUrGrGrCrArCrCrGrAr | | | | ArArArGrUrGrGrCrArCrCrGrAr | | |
| | GrUrCrGrGrUrGrCrArArCrGrGr | | | | GrUrCrGrGrUrGrCrUrGrGrUrGr | | |
| | CrArGrArCrUrUrCrUrCrUrArCr | | | | CrArCrCrUrGrArCrUrCrCrUrGr | | |
| | ArGrGrArGrUrCrArGrGrUrG*m | | | | UrGrGrArGrArArGrUrCrUrG*m | | |
| | C*mA*mC | | | | C*mC*mG | | |
| HBB | mC*mA*mU*rGrGrUrGrCrArCr | 20642 | +++ | HBB | mG*mU*mA*rArCrGrGrCrArGr | 20732 | ++ |
| 5_inst | CrUrGrArCrUrCrCrUrGrGrUrUr | | | 8_inst | ArCrUrUrCrUrCrCrUrCrGrUrUr | | |
| _RT2 | UrUrArGrArGrCrUrArGrArArAr | | | _RT2 | UrUrArGrArGrCrUrArGrArArAr | | |
| 0_PB | UrArGrCrArArGrUrUrArArArAr | | | 0_PB | UrArGrCrArArGrUrUrArArArAr | | |
| S12 | UrArArGrGrCrUrArGrUrCrCrGr | | | S12 | UrArArGrGrCrUrArGrUrCrCrGr | | |
| | UrUrArUrCrArArCrUrUrGrArAr | | | | UrUrArUrCrArArCrUrUrGrArAr | | |
| | ArArArGrUrGrGrCrArCrCrGrAr | | | | ArArArGrUrGrGrCrArCrCrGrAr | | |
| | GrUrCrGrGrUrGrCrArArCrGrGr | | | | GrUrCrGrGrUrGrCrUrGrGrUrGr | | |
| | CrArGrArCrUrUrCrUrCrUrArCr | | | | CrArCrCrUrGrArCrUrCrCrUrGr | | |
| | ArGrGrArGrUrCrArGrGrU*mG* | | | | UrGrGrArGrArArGrUrCrU*mG* | | |
| | mC*mA | | | | mC*mC | | |
| HBB | mC*mA*mU*rGrGrUrGrCrArCr | 20643 | +++ | HBB | mG*mU*mA*rArCrGrGrCrArGr | 20733 | ++ |
| 5_inst | CrUrGrArCrUrCrCrUrGrGrUrUr | | | 8_inst | ArCrUrUrCrUrCrCrUrCrGrUrUr | | |
| _RT2 | UrUrArGrArGrCrUrArGrArArAr | | | _RT2 | UrUrArGrArGrCrUrArGrArArAr | | |
| 0_PB | UrArGrCrArArGrUrUrArArArAr | | | 0_PB | UrArGrCrArArGrUrUrArArArAr | | |
| S11 | UrArArGrGrCrUrArGrUrCrCrGr | | | S11 | UrArArGrGrCrUrArGrUrCrCrGr | | |
| | UrUrArUrCrArArCrUrUrGrArAr | | | | UrUrArUrCrArArCrUrUrGrArAr | | |
| | ArArArGrUrGrGrCrArCrCrGrAr | | | | ArArArGrUrGrGrCrArCrCrGrAr | | |
| | GrUrCrGrGrUrGrCrArArCrGrGr | | | | GrUrCrGrGrUrGrCrUrGrGrUrGr | | |
| | CrArGrArCrUrUrCrUrCrUrArCr | | | | CrArCrCrUrGrArCrUrCrCrUrGr | | |
| | ArGrGrArGrUrCrArGrG*mU*m | | | | UrGrGrArGrArArGrUrC*mU*m | | |
| | G*mC | | | | G*mC | | |
| HBB | mC*mA*mU*rGrGrUrGrCrArCr | 20644 | +++ | HBB | mG*mU*mA*rArCrGrGrCrArGr | 20734 | + |
| 5_inst | CrUrGrArCrUrCrCrUrGrGrUrUr | | | 8_inst | ArCrUrUrCrUrCrCrUrCrGrUrUr | | |
| _RT2 | UrUrArGrArGrCrUrArGrArArAr | | | _RT2 | UrUrArGrArGrCrUrArGrArArAr | | |
| 0_PB | UrArGrCrArArGrUrUrArArArAr | | | 0_PB | UrArGrCrArArGrUrUrArArArAr | | |
| S10 | UrArArGrGrCrUrArGrUrCrCrGr | | | S10 | UrArArGrGrCrUrArGrUrCrCrGr | | |
| | UrUrArUrCrArArCrUrUrGrArAr | | | | UrUrArUrCrArArCrUrUrGrArAr | | |
| | ArArArGrUrGrGrCrArCrCrGrAr | | | | ArArArGrUrGrGrCrArCrCrGrAr | | |
| | GrUrCrGrGrUrGrCrArArCrGrGr | | | | GrUrCrGrGrUrGrCrUrGrGrUrGr | | |
| | CrArGrArCrUrUrCrUrCrUrArCr | | | | CrArCrCrUrGrArCrUrCrCrUrGr | | |
| | ArGrGrArGrUrCrArG*mG*mU* | | | | UrGrGrArGrArArGrU*mC*mU* | | |
| | mG | | | | mG | | |
| HBB | mC*mA*mU*rGrGrUrGrCrArCr | 20645 | ++ | HBB | mG*mU*mA*rArCrGrGrCrArGr | 20735 | + |
| 5_inst | CrUrGrArCrUrCrCrUrGrGrUrUr | | | 8_inst | ArCrUrUrCrUrCrCrUrCrGrUrUr | | |
| _RT2 | UrUrArGrArGrCrUrArGrArArAr | | | _RT2 | UrUrArGrArGrCrUrArGrArArAr | | |
| 0_PB | UrArGrCrArArGrUrUrArArArAr | | | 0_PB | UrArGrCrArArGrUrUrArArArAr | | |
| S9 | UrArArGrGrCrUrArGrUrCrCrGr | | | S9 | UrArArGrGrCrUrArGrUrCrCrGr | | |
| | UrUrArUrCrArArCrUrUrGrArAr | | | | UrUrArUrCrArArCrUrUrGrArAr | | |
| | ArArArGrUrGrGrCrArCrCrGrAr | | | | ArArArGrUrGrGrCrArCrCrGrAr | | |
| | GrUrCrGrGrUrGrCrArArCrGrGr | | | | GrUrCrGrGrUrGrCrUrGrGrUrGr | | |
| | CrArGrArCrUrUrCrUrCrUrArCr | | | | CrArCrCrUrGrArCrUrCrCrUrGr | | |
| | ArGrGrArGrUrCrA*mG*mG*m | | | | UrGrGrArGrArArG*mU*mC*m | | |
| | U | | | | U | | |
| HBB | mC*mA*mU*rGrGrUrGrCrArCr | 20646 | + | HBB | mG*mU*mA*rArCrGrGrCrArGr | 20736 | + |
| 5_inst | CrUrGrArCrUrCrCrUrGrGrUrUr | | | 8_inst | ArCrUrUrCrUrCrCrUrCrGrUrUr | | |
| _RT2 | UrUrArGrArGrCrUrArGrArArAr | | | _RT2 | UrUrArGrArGrCrUrArGrArArAr | | |
| 0_PB | UrArGrCrArArGrUrUrArArArAr | | | 0_PB | UrArGrCrArArGrUrUrArArArAr | | |
| S8 | UrArArGrGrCrUrArGrUrCrCrGr | | | S8 | UrArArGrGrCrUrArGrUrCrCrGr | | |
| | UrUrArUrCrArArCrUrUrGrArAr | | | | UrUrArUrCrArArCrUrUrGrArAr | | |
| | ArArArGrUrGrGrCrArCrCrGrAr | | | | ArArArGrUrGrGrCrArCrCrGrAr | | |
| | GrUrCrGrGrUrGrCrArArCrGrGr | | | | GrUrCrGrGrUrGrCrUrGrGrUrGr | | |
| | CrArGrArCrUrUrCrUrCrUrArCr | | | | CrArCrCrUrGrArCrUrCrCrUrGr | | |
| | ArGrGrArGrUrC*mA*mG*mG | | | | UrGrGrArGrArA*mG*mU*mC | | |
| HBB | mC*mA*mU*rGrGrUrGrCrArCr | 20647 | + | HBB | mG*mU*mA*rArCrGrGrCrArGr | 20737 | + |
| 5_inst | CrUrGrArCrUrCrCrUrGrGrUrUr | | | 8_inst | ArCrUrUrCrUrCrCrUrCrGrUrUr | | |
| _RT1 | UrUrArGrArGrCrUrArGrArArAr | | | _RT1 | UrUrArGrArGrCrUrArGrArArAr | | |
| 9_PB | UrArGrCrArArGrUrUrArArArAr | | | 9_PB | UrArGrCrArArGrUrUrArArArAr | | |
| S17 | UrArArGrGrCrUrArGrUrCrCrGr | | | S17 | UrArArGrGrCrUrArGrUrCrCrGr | | |
| | UrUrArUrCrArArCrUrUrGrArAr | | | | UrUrArUrCrArArCrUrUrGrArAr | | |
| | ArArArGrUrGrGrCrArCrCrGrAr | | | | ArArArGrUrGrGrCrArCrCrGrAr | | |
| | GrUrCrGrGrUrGrCrArCrGrGrCr | | | | GrUrCrGrGrUrGrCrGrGrUrGrCr | | |
| | ArGrArCrUrUrCrUrCrUrArCrAr | | | | ArCrCrUrGrArCrUrCrCrUrGrUr | | |
| | GrGrArGrUrCrArGrGrUrGrCrAr | | | | GrGrArGrArArGrUrCrUrGrCrCr | | |
| | CrC*mA*mU*mG | | | | GrU*mU*mA*mC | | |
| HBB | mC*mA*mU*rGrGrUrGrCrArCr | 20648 | + | HBB | mG*mU*mA*rArCrGrGrCrArGr | 20738 | + |
| 5_inst | CrUrGrArCrUrCrCrUrGrGrUrUr | | | 8_inst | ArCrUrUrCrUrCrCrUrCrGrUrUr | | |
| _RT1 | UrUrArGrArGrCrUrArGrArArAr | | | _RT1 | UrUrArGrArGrCrUrArGrArArAr | | |
| 9_PB | UrArGrCrArArGrUrUrArArArAr | | | 9_PB | UrArGrCrArArGrUrUrArArArAr | | |
| S16 | UrArArGrGrCrUrArGrUrCrCrGr | | | S16 | UrArArGrGrCrUrArGrUrCrCrGr | | |
| | UrUrArUrCrArArCrUrUrGrArAr | | | | UrUrArUrCrArArCrUrUrGrArAr | | |
| | ArArArGrUrGrGrCrArCrCrGrAr | | | | ArArArGrUrGrGrCrArCrCrGrAr | | |
| | GrUrCrGrGrUrGrCrArCrGrGrCr | | | | GrUrCrGrGrUrGrCrGrGrUrGrCr | | |
| | ArGrArCrUrUrCrUrCrUrArCrAr | | | | ArCrCrUrGrArCrUrCrCrUrGrUr | | |
| | GrGrArGrUrCrArGrGrUrGrCrAr | | | | GrGrArGrArArGrUrCrUrGrCrCr | | |
| | C*mC*mA*mU | | | | G*mU*mU*mA | | |
| HBB | mC*mA*mU*rGrGrUrGrCrArCr | 20649 | + | HBB | mG*mU*mA*rArCrGrGrCrArGr | 20739 | + |
| 5_inst | CrUrGrArCrUrCrCrUrGrGrUrUr | | | 8_inst | ArCrUrUrCrUrCrCrUrCrGrUrUr | | |
| _RT1 | UrUrArGrArGrCrUrArGrArArAr | | | _RT1 | UrUrArGrArGrCrUrArGrArArAr | | |
| 9_PB | UrArGrCrArArGrUrUrArArArAr | | | 9_PB | UrArGrCrArArGrUrUrArArArAr | | |
| S15 | UrArArGrGrCrUrArGrUrCrCrGr | | | S15 | UrArArGrGrCrUrArGrUrCrCrGr | | |
| | UrUrArUrCrArArCrUrUrGrArAr | | | | UrUrArUrCrArArCrUrUrGrArAr | | |
| | ArArArGrUrGrGrCrArCrCrGrAr | | | | ArArArGrUrGrGrCrArCrCrGrAr | | |
| | GrUrCrGrGrUrGrCrArCrGrGrCr | | | | GrUrCrGrGrUrGrCrGrGrUrGrCr | | |
| | ArGrArCrUrUrCrUrCrUrArCrAr | | | | ArCrCrUrGrArCrUrCrCrUrGrUr | | |
| | GrGrArGrUrCrArGrGrUrGrCrA | | | | GrGrArGrArArGrUrCrUrGrCrC* | | |
| | *mC*mC*mA | | | | mG*mU*mU | | |
| HBB | mC*mA*mU*rGrGrUrGrCrArCr | 20650 | ++ | HBB | mG*mU*mA*rArCrGrGrCrArGr | 20740 | + |
| 5_inst | CrUrGrArCrUrCrCrUrGrGrUrUr | | | 8_inst | ArCrUrUrCrUrCrCrUrCrGrUrUr | | |
| _RT1 | UrUrArGrArGrCrUrArGrArArAr | | | _RT1 | UrUrArGrArGrCrUrArGrArArAr | | |
| 9_PB | UrArGrCrArArGrUrUrArArArAr | | | 9_PB | UrArGrCrArArGrUrUrArArArAr | | |
| S14 | UrArArGrGrCrUrArGrUrCrCrGr | | | S14 | UrArArGrGrCrUrArGrUrCrCrGr | | |
| | UrUrArUrCrArArCrUrUrGrArAr | | | | UrUrArUrCrArArCrUrUrGrArAr | | |
| | ArArArGrUrGrGrCrArCrCrGrAr | | | | ArArArGrUrGrGrCrArCrCrGrAr | | |
| | GrUrCrGrGrUrGrCrArCrGrGrCr | | | | GrUrCrGrGrUrGrCrGrGrUrGrCr | | |
| | ArGrArCrUrUrCrUrCrUrArCrAr | | | | ArCrCrUrGrArCrUrCrCrUrGrUr | | |
| | GrGrArGrUrCrArGrGrUrGrC*m | | | | GrGrArGrArArGrUrCrUrGrC*m | | |
| | A*mC*mC | | | | C*mG*mU | | |
| HBB | mC*mA*mU*rGrGrUrGrCrArCr | 20651 | ++ | HBB | mG*mU*mA*rArCrGrGrCrArGr | 20741 | + |
| 5_inst | CrUrGrArCrUrCrCrUrGrGrUrUr | | | 8_inst | ArCrUrUrCrUrCrCrUrCrGrUrUr | | |
| _RT1 | UrUrArGrArGrCrUrArGrArArAr | | | _RT1 | UrUrArGrArGrCrUrArGrArArAr | | |
| 9_PB | UrArGrCrArArGrUrUrArArArAr | | | 9_PB | UrArGrCrArArGrUrUrArArArAr | | |
| S13 | UrArArGrGrCrUrArGrUrCrCrGr | | | S13 | UrArArGrGrCrUrArGrUrCrCrGr | | |
| | UrUrArUrCrArArCrUrUrGrArAr | | | | UrUrArUrCrArArCrUrUrGrArAr | | |
| | ArArArGrUrGrGrCrArCrCrGrAr | | | | ArArArGrUrGrGrCrArCrCrGrAr | | |
| | GrUrCrGrGrUrGrCrArCrGrGrCr | | | | GrUrCrGrGrUrGrCrGrGrUrGrCr | | |
| | ArGrArCrUrUrCrUrCrUrArCrAr | | | | ArCrCrUrGrArCrUrCrCrUrGrUr | | |
| | GrGrArGrUrCrArGrGrUrG*mC* | | | | GrGrArGrArArGrUrCrUrG*mC* | | |
| | mA*mC | | | | mC*mG | | |
| HBB | mC*mA*mU*rGrGrUrGrCrArCr | 20652 | +++ | HBB | mG*mU*mA*rArCrGrGrCrArGr | 20742 | ++ |
| 5_inst | CrUrGrArCrUrCrCrUrGrGrUrUr | | | 8_inst | ArCrUrUrCrUrCrCrUrCrGrUrUr | | |
| _RT1 | UrUrArGrArGrCrUrArGrArArAr | | | _RT1 | UrUrArGrArGrCrUrArGrArArAr | | |
| 9_PB | UrArGrCrArArGrUrUrArArArAr | | | 9_PB | UrArGrCrArArGrUrUrArArArAr | | |
| S12 | UrArArGrGrCrUrArGrUrCrCrGr | | | S12 | UrArArGrGrCrUrArGrUrCrCrGr | | |
| | UrUrArUrCrArArCrUrUrGrArAr | | | | UrUrArUrCrArArCrUrUrGrArAr | | |
| | ArArArGrUrGrGrCrArCrCrGrAr | | | | ArArArGrUrGrGrCrArCrCrGrAr | | |
| | GrUrCrGrGrUrGrCrArCrGrGrCr | | | | GrUrCrGrGrUrGrCrGrGrUrGrCr | | |
| | ArGrArCrUrUrCrUrCrUrArCrAr | | | | ArCrCrUrGrArCrUrCrCrUrGrUr | | |
| | GrGrArGrUrCrArGrGrU*mG*m | | | | GrGrArGrArArGrUrCrU*mG*m | | |
| | C*mA | | | | C*mC | | |
| HBB | mC*mA*mU*rGrGrUrGrCrArCr | 20653 | +++ | HBB | mG*mU*mA*rArCrGrGrCrArGr | 20743 | + |
| 5_inst | CrUrGrArCrUrCrCrUrGrGrUrUr | | | 8_inst | ArCrUrUrCrUrCrCrUrCrGrUrUr | | |
| _RT1 | UrUrArGrArGrCrUrArGrArArAr | | | _RT1 | UrUrArGrArGrCrUrArGrArArAr | | |
| 9_PB | UrArGrCrArArGrUrUrArArArAr | | | 9_PB | UrArGrCrArArGrUrUrArArArAr | | |
| S11 | UrArArGrGrCrUrArGrUrCrCrGr | | | S11 | UrArArGrGrCrUrArGrUrCrCrGr | | |
| | UrUrArUrCrArArCrUrUrGrArAr | | | | UrUrArUrCrArArCrUrUrGrArAr | | |
| | ArArArGrUrGrGrCrArCrCrGrAr | | | | ArArArGrUrGrGrCrArCrCrGrAr | | |
| | GrUrCrGrGrUrGrCrArCrGrGrCr | | | | GrUrCrGrGrUrGrCrGrGrUrGrCr | | |
| | ArGrArCrUrUrCrUrCrUrArCrAr | | | | ArCrCrUrGrArCrUrCrCrUrGrUr | | |
| | GrGrArGrUrCrArGrG*mU*mG* | | | | GrGrArGrArArGrUrC*mU*mG* | | |
| | mC | | | | mC | | |
| HBB | mC*mA*mU*rGrGrUrGrCrArCr | 20654 | +++ | HBB | mG*mU*mA*rArCrGrGrCrArGr | 20744 | + |
| 5_inst | CrUrGrArCrUrCrCrUrGrGrUrUr | | | 8_inst | ArCrUrUrCrUrCrCrUrCrGrUrUr | | |
| _RT1 | UrUrArGrArGrCrUrArGrArArAr | | | _RT1 | UrUrArGrArGrCrUrArGrArArAr | | |
| 9_PB | UrArGrCrArArGrUrUrArArArAr | | | 9_PB | UrArGrCrArArGrUrUrArArArAr | | |
| S10 | UrArArGrGrCrUrArGrUrCrCrGr | | | S10 | UrArArGrGrCrUrArGrUrCrCrGr | | |
| | UrUrArUrCrArArCrUrUrGrArAr | | | | UrUrArUrCrArArCrUrUrGrArAr | | |
| | ArArArGrUrGrGrCrArCrCrGrAr | | | | ArArArGrUrGrGrCrArCrCrGrAr | | |
| | GrUrCrGrGrUrGrCrArCrGrGrCr | | | | GrUrCrGrGrUrGrCrGrGrUrGrCr | | |
| | ArGrArCrUrUrCrUrCrUrArCrAr | | | | ArCrCrUrGrArCrUrCrCrUrGrUr | | |
| | GrGrArGrUrCrArG*mG*mU*m | | | | GrGrArGrArArGrU*mC*mU*m | | |
| | G | | | | G | | |
| HBB | mC*mA*mU*rGrGrUrGrCrArCr | 20655 | ++ | HBB | mG*mU*mA*rArCrGrGrCrArGr | 20745 | + |
| 5_inst | CrUrGrArCrUrCrCrUrGrGrUrUr | | | 8_inst | ArCrUrUrCrUrCrCrUrCrGrUrUr | | |
| _RT1 | UrUrArGrArGrCrUrArGrArArAr | | | _RT1 | UrUrArGrArGrCrUrArGrArArAr | | |
| 9_PB | UrArGrCrArArGrUrUrArArArAr | | | 9_PB | UrArGrCrArArGrUrUrArArArAr | | |
| S9 | UrArArGrGrCrUrArGrUrCrCrGr | | | S9 | UrArArGrGrCrUrArGrUrCrCrGr | | |
| | UrUrArUrCrArArCrUrUrGrArAr | | | | UrUrArUrCrArArCrUrUrGrArAr | | |
| | ArArArGrUrGrGrCrArCrCrGrAr | | | | ArArArGrUrGrGrCrArCrCrGrAr | | |
| | GrUrCrGrGrUrGrCrArCrGrGrCr | | | | GrUrCrGrGrUrGrCrGrGrUrGrCr | | |
| | ArGrArCrUrUrCrUrCrUrArCrAr | | | | ArCrCrUrGrArCrUrCrCrUrGrUr | | |
| | GrGrArGrUrCrA*mG*mG*mU | | | | GrGrArGrArArG*mU*mC*mU | | |
| HBB | mC*mA*mU*rGrGrUrGrCrArCr | 20656 | + | HBB | mG*mU*mA*rArCrGrGrCrArGr | 20746 | + |
| 5_inst | CrUrGrArCrUrCrCrUrGrGrUrUr | | | 8_inst | ArCrUrUrCrUrCrCrUrCrGrUrUr | | |
| _RT1 | UrUrArGrArGrCrUrArGrArArAr | | | _RT1 | UrUrArGrArGrCrUrArGrArArAr | | |
| 9_PB | UrArGrCrArArGrUrUrArArArAr | | | 9_PB | UrArGrCrArArGrUrUrArArArAr | | |
| S8 | UrArArGrGrCrUrArGrUrCrCrGr | | | S8 | UrArArGrGrCrUrArGrUrCrCrGr | | |
| | UrUrArUrCrArArCrUrUrGrArAr | | | | UrUrArUrCrArArCrUrUrGrArAr | | |
| | ArArArGrUrGrGrCrArCrCrGrAr | | | | ArArArGrUrGrGrCrArCrCrGrAr | | |
| | GrUrCrGrGrUrGrCrArCrGrGrCr | | | | GrUrCrGrGrUrGrCrGrGrUrGrCr | | |
| | ArGrArCrUrUrCrUrCrUrArCrAr | | | | ArCrCrUrGrArCrUrCrCrUrGrUr | | |
| | GrGrArGrUrC*mA*mG*mG | | | | GrGrArGrArA*mG*mU*mC | | |
| HBB | mC*mA*mU*rGrGrUrGrCrArCr | 20657 | + | HBB | mG*mU*mA*rArCrGrGrCrArGr | 20747 | + |
| 5_inst | CrUrGrArCrUrCrCrUrGrGrUrUr | | | 8_inst | ArCrUrUrCrUrCrCrUrCrGrUrUr | | |
| _RT1 | UrUrArGrArGrCrUrArGrArArAr | | | _RT1 | UrUrArGrArGrCrUrArGrArArAr | | |
| 7_PB | UrArGrCrArArGrUrUrArArArAr | | | 8_PB | UrArGrCrArArGrUrUrArArArAr | | |
| S17 | UrArArGrGrCrUrArGrUrCrCrGr | | | S17 | UrArArGrGrCrUrArGrUrCrCrGr | | |
| | UrUrArUrCrArArCrUrUrGrArAr | | | | UrUrArUrCrArArCrUrUrGrArAr | | |
| | ArArArGrUrGrGrCrArCrCrGrAr | | | | ArArArGrUrGrGrCrArCrCrGrAr | | |
| | GrUrCrGrGrUrGrCrGrGrCrArGr | | | | GrUrCrGrGrUrGrCrGrUrGrCrAr | | |
| | ArCrUrUrCrUrCrUrArCrArGrGr | | | | CrCrUrGrArCrUrCrCrUrGrUrGr | | |
| | ArGrUrCrArGrGrUrGrCrArCrC* | | | | GrArGrArArGrUrCrUrGrCrCrGr | | |
| | mA*mU*mG | | | | U*mU*mA*mC | | |
| HBB | mC*mA*mU*rGrGrUrGrCrArCr | 20658 | + | HBB | mG*mU*mA*rArCrGrGrCrArGr | 20748 | + |
| 5_inst | CrUrGrArCrUrCrCrUrGrGrUrUr | | | 8_inst | ArCrUrUrCrUrCrCrUrCrGrUrUr | | |
| _RT1 | UrUrArGrArGrCrUrArGrArArAr | | | _RT1 | UrUrArGrArGrCrUrArGrArArAr | | |
| 7_PB | UrArGrCrArArGrUrUrArArArAr | | | 8_PB | UrArGrCrArArGrUrUrArArArAr | | |
| S16 | UrArArGrGrCrUrArGrUrCrCrGr | | | S16 | UrArArGrGrCrUrArGrUrCrCrGr | | |
| | UrUrArUrCrArArCrUrUrGrArAr | | | | UrUrArUrCrArArCrUrUrGrArAr | | |
| | ArArArGrUrGrGrCrArCrCrGrAr | | | | ArArArGrUrGrGrCrArCrCrGrAr | | |
| | GrUrCrGrGrUrGrCrGrGrCrArGr | | | | GrUrCrGrGrUrGrCrGrUrGrCrAr | | |
| | ArCrUrUrCrUrCrUrArCrArGrGr | | | | CrCrUrGrArCrUrCrCrUrGrUrGr | | |
| | ArGrUrCrArGrGrUrGrCrArC*m | | | | GrArGrArArGrUrCrUrGrCrCrG* | | |
| | C*mA*mU | | | | mU*mU*mA | | |
| HBB | mC*mA*mU*rGrGrUrGrCrArCr | 20659 | ++ | HBB | mG*mU*mA*rArCrGrGrCrArGr | 20749 | + |
| 5_inst | CrUrGrArCrUrCrCrUrGrGrUrUr | | | 8_inst | ArCrUrUrCrUrCrCrUrCrGrUrUr | | |
| _RT1 | UrUrArGrArGrCrUrArGrArArAr | | | _RT1 | UrUrArGrArGrCrUrArGrArArAr | | |
| 7_PB | UrArGrCrArArGrUrUrArArArAr | | | 8_PB | UrArGrCrArArGrUrUrArArArAr | | |
| S15 | UrArArGrGrCrUrArGrUrCrCrGr | | | S15 | UrArArGrGrCrUrArGrUrCrCrGr | | |
| | UrUrArUrCrArArCrUrUrGrArAr | | | | UrUrArUrCrArArCrUrUrGrArAr | | |
| | ArArArGrUrGrGrCrArCrCrGrAr | | | | ArArArGrUrGrGrCrArCrCrGrAr | | |
| | GrUrCrGrGrUrGrCrGrGrCrArGr | | | | GrUrCrGrGrUrGrCrGrUrGrCrAr | | |
| | ArCrUrUrCrUrCrUrArCrArGrGr | | | | CrCrUrGrArCrUrCrCrUrGrUrGr | | |
| | ArGrUrCrArGrGrUrGrCrA*mC* | | | | GrArGrArArGrUrCrUrGrCrC*m | | |
| | mC*mA | | | | G*mU*mU | | |
| HBB | mC*mA*mU*rGrGrUrGrCrArCr | 20660 | +++ | HBB | mG*mU*mA*rArCrGrGrCrArGr | 20750 | + |
| 5_inst | CrUrGrArCrUrCrCrUrGrGrUrUr | | | 8_inst | ArCrUrUrCrUrCrCrUrCrGrUrUr | | |
| _RT1 | UrUrArGrArGrCrUrArGrArArAr | | | _RT1 | UrUrArGrArGrCrUrArGrArArAr | | |
| 7_PB | UrArGrCrArArGrUrUrArArArAr | | | 8_PB | UrArGrCrArArGrUrUrArArArAr | | |
| S14 | UrArArGrGrCrUrArGrUrCrCrGr | | | S14 | UrArArGrGrCrUrArGrUrCrCrGr | | |
| | UrUrArUrCrArArCrUrUrGrArAr | | | | UrUrArUrCrArArCrUrUrGrArAr | | |
| | ArArArGrUrGrGrCrArCrCrGrAr | | | | ArArArGrUrGrGrCrArCrCrGrAr | | |
| | GrUrCrGrGrUrGrCrGrGrCrArGr | | | | GrUrCrGrGrUrGrCrGrUrGrCrAr | | |
| | ArCrUrUrCrUrCrUrArCrArGrGr | | | | CrCrUrGrArCrUrCrCrUrGrUrGr | | |
| | ArGrUrCrArGrGrUrGrC*mA*m | | | | GrArGrArArGrUrCrUrGrC*mC* | | |
| | C*mC | | | | mG*mU | | |
| HBB | mC*mA*mU*rGrGrUrGrCrArCr | 20661 | +++ | HBB | mG*mU*mA*rArCrGrGrCrArGr | 20751 | + |
| 5_inst | CrUrGrArCrUrCrCrUrGrGrUrUr | | | 8_inst | ArCrUrUrCrUrCrCrUrCrGrUrUr | | |
| _RT1 | UrUrArGrArGrCrUrArGrArArAr | | | _RT1 | UrUrArGrArGrCrUrArGrArArAr | | |
| 7_PB | UrArGrCrArArGrUrUrArArArAr | | | 8_PB | UrArGrCrArArGrUrUrArArArAr | | |
| S13 | UrArArGrGrCrUrArGrUrCrCrGr | | | S13 | UrArArGrGrCrUrArGrUrCrCrGr | | |
| | UrUrArUrCrArArCrUrUrGrArAr | | | | UrUrArUrCrArArCrUrUrGrArAr | | |
| | ArArArGrUrGrGrCrArCrCrGrAr | | | | ArArArGrUrGrGrCrArCrCrGrAr | | |
| | GrUrCrGrGrUrGrCrGrGrCrArGr | | | | GrUrCrGrGrUrGrCrGrUrGrCrAr | | |
| | ArCrUrUrCrUrCrUrArCrArGrGr | | | | CrCrUrGrArCrUrCrCrUrGrUrGr | | |
| | ArGrUrCrArGrGrUrG*mC*mA* | | | | GrArGrArArGrUrCrUrG*mC*m | | |
| | mC | | | | C*mG | | |
| HBB | mC*mA*mU*rGrGrUrGrCrArCr | 20662 | +++ | HBB | mG*mU*mA*rArCrGrGrCrArGr | 20752 | ++ |
| 5_inst | CrUrGrArCrUrCrCrUrGrGrUrUr | | | 8_inst | ArCrUrUrCrUrCrCrUrCrGrUrUr | | |
| _RT1 | UrUrArGrArGrCrUrArGrArArAr | | | _RT1 | UrUrArGrArGrCrUrArGrArArAr | | |
| 7_PB | UrArGrCrArArGrUrUrArArArAr | | | 8_PB | UrArGrCrArArGrUrUrArArArAr | | |
| S12 | UrArArGrGrCrUrArGrUrCrCrGr | | | S12 | UrArArGrGrCrUrArGrUrCrCrGr | | |
| | UrUrArUrCrArArCrUrUrGrArAr | | | | UrUrArUrCrArArCrUrUrGrArAr | | |
| | ArArArGrUrGrGrCrArCrCrGrAr | | | | ArArArGrUrGrGrCrArCrCrGrAr | | |
| | GrUrCrGrGrUrGrCrGrGrCrArGr | | | | GrUrCrGrGrUrGrCrGrUrGrCrAr | | |
| | ArCrUrUrCrUrCrUrArCrArGrGr | | | | CrCrUrGrArCrUrCrCrUrGrUrGr | | |
| | ArGrUrCrArGrGrU*mG*mC*m | | | | GrArGrArArGrUrCrU*mG*mC* | | |
| | A | | | | mC | | |
| HBB | mC*mA*mU*rGrGrUrGrCrArCr | 20663 | +++ | HBB | mG*mU*mA*rArCrGrGrCrArGr | 20753 | + |
| 5_inst | CrUrGrArCrUrCrCrUrGrGrUrUr | | | 8_inst | ArCrUrUrCrUrCrCrUrCrGrUrUr | | |
| _RT1 | UrUrArGrArGrCrUrArGrArArAr | | | _RT1 | UrUrArGrArGrCrUrArGrArArAr | | |
| 7_PB | UrArGrCrArArGrUrUrArArArAr | | | 8_PB | UrArGrCrArArGrUrUrArArArAr | | |
| S11 | UrArArGrGrCrUrArGrUrCrCrGr | | | S11 | UrArArGrGrCrUrArGrUrCrCrGr | | |
| | UrUrArUrCrArArCrUrUrGrArAr | | | | UrUrArUrCrArArCrUrUrGrArAr | | |
| | ArArArGrUrGrGrCrArCrCrGrAr | | | | ArArArGrUrGrGrCrArCrCrGrAr | | |
| | GrUrCrGrGrUrGrCrGrGrCrArGr | | | | GrUrCrGrGrUrGrCrGrUrGrCrAr | | |
| | ArCrUrUrCrUrCrUrArCrArGrGr | | | | CrCrUrGrArCrUrCrCrUrGrUrGr | | |
| | ArGrUrCrArGrG*mU*mG*mC | | | | GrArGrArArGrUrC*mU*mG*m | | |
| | | | | | C | | |
| HBB | mC*mA*mU*rGrGrUrGrCrArCr | 20664 | +++ | HBB | mG*mU*mA*rArCrGrGrCrArGr | 20754 | + |
| 5_inst | CrUrGrArCrUrCrCrUrGrGrUrUr | | | 8_inst | ArCrUrUrCrUrCrCrUrCrGrUrUr | | |
| _RT1 | UrUrArGrArGrCrUrArGrArArAr | | | _RT1 | UrUrArGrArGrCrUrArGrArArAr | | |
| 7_PB | UrArGrCrArArGrUrUrArArArAr | | | 8_PB | UrArGrCrArArGrUrUrArArArAr | | |
| S10 | UrArArGrGrCrUrArGrUrCrCrGr | | | S10 | UrArArGrGrCrUrArGrUrCrCrGr | | |
| | UrUrArUrCrArArCrUrUrGrArAr | | | | UrUrArUrCrArArCrUrUrGrArAr | | |
| | ArArArGrUrGrGrCrArCrCrGrAr | | | | ArArArGrUrGrGrCrArCrCrGrAr | | |
| | GrUrCrGrGrUrGrCrGrGrCrArGr | | | | GrUrCrGrGrUrGrCrGrUrGrCrAr | | |
| | ArCrUrUrCrUrCrUrArCrArGrGr | | | | CrCrUrGrArCrUrCrCrUrGrUrGr | | |
| | ArGrUrCrArG*mG*mU*mG | | | | GrArGrArArGrU*mC*mU*mG | | |
| HBB | mC*mA*mU*rGrGrUrGrCrArCr | 20665 | +++ | HBB | mG*mU*mA*rArCrGrGrCrArGr | 20755 | + |
| 5_inst | CrUrGrArCrUrCrCrUrGrGrUrUr | | | 8_inst | ArCrUrUrCrUrCrCrUrCrGrUrUr | | |
| _RT1 | UrUrArGrArGrCrUrArGrArArAr | | | _RT1 | UrUrArGrArGrCrUrArGrArArAr | | |
| 7_PB | UrArGrCrArArGrUrUrArArArAr | | | 8_PB | UrArGrCrArArGrUrUrArArArAr | | |
| S9 | UrArArGrGrCrUrArGrUrCrCrGr | | | S9 | UrArArGrGrCrUrArGrUrCrCrGr | | |
| | UrUrArUrCrArArCrUrUrGrArAr | | | | UrUrArUrCrArArCrUrUrGrArAr | | |
| | ArArArGrUrGrGrCrArCrCrGrAr | | | | ArArArGrUrGrGrCrArCrCrGrAr | | |
| | GrUrCrGrGrUrGrCrGrGrCrArGr | | | | GrUrCrGrGrUrGrCrGrUrGrCrAr | | |
| | ArCrUrUrCrUrCrUrArCrArGrGr | | | | CrCrUrGrArCrUrCrCrUrGrUrGr | | |
| | ArGrUrCrA*mG*mG*mU | | | | GrArGrArArG*mU*mC*mU | | |
| HBB | mC*mA*mU*rGrGrUrGrCrArCr | 20666 | + | HBB | mG*mU*mA*rArCrGrGrCrArGr | 20756 | + |
| 5_inst | CrUrGrArCrUrCrCrUrGrGrUrUr | | | 8_inst | ArCrUrUrCrUrCrCrUrCrGrUrUr | | |
| _RT1 | UrUrArGrArGrCrUrArGrArArAr | | | _RT1 | UrUrArGrArGrCrUrArGrArArAr | | |
| 7_PB | UrArGrCrArArGrUrUrArArArAr | | | 8_PB | UrArGrCrArArGrUrUrArArArAr | | |
| S8 | UrArArGrGrCrUrArGrUrCrCrGr | | | S8 | UrArArGrGrCrUrArGrUrCrCrGr | | |
| | UrUrArUrCrArArCrUrUrGrArAr | | | | UrUrArUrCrArArCrUrUrGrArAr | | |
| | ArArArGrUrGrGrCrArCrCrGrAr | | | | ArArArGrUrGrGrCrArCrCrGrAr | | |
| | GrUrCrGrGrUrGrCrGrGrCrArGr | | | | GrUrCrGrGrUrGrCrGrUrGrCrAr | | |
| | ArCrUrUrCrUrCrUrArCrArGrGr | | | | CrCrUrGrArCrUrCrCrUrGrUrGr | | |
| | ArGrUrC*mA*mG*mG | | | | GrArGrArA*mG*mU*mC | | |
| HBB | mC*mA*mU*rGrGrUrGrCrArCr | 20667 | + | HBB | mG*mU*mA*rArCrGrGrCrArGr | 20757 | + |
| 5_inst | CrUrGrArCrUrCrCrUrGrGrUrUr | | | 8_inst | ArCrUrUrCrUrCrCrUrCrGrUrUr | | |
| _RT1 | UrUrArGrArGrCrUrArGrArArAr | | | _RT1 | UrUrArGrArGrCrUrArGrArArAr | | |
| 6_PB | UrArGrCrArArGrUrUrArArArAr | | | 7_PB | UrArGrCrArArGrUrUrArArArAr | | |
| S17 | UrArArGrGrCrUrArGrUrCrCrGr | | | S17 | UrArArGrGrCrUrArGrUrCrCrGr | | |
| | UrUrArUrCrArArCrUrUrGrArAr | | | | UrUrArUrCrArArCrUrUrGrArAr | | |
| | ArArArGrUrGrGrCrArCrCrGrAr | | | | ArArArGrUrGrGrCrArCrCrGrAr | | |
| | GrUrCrGrGrUrGrCrGrCrArGrAr | | | | GrUrCrGrGrUrGrCrUrGrCrArCr | | |
| | CrUrUrCrUrCrUrArCrArGrGrAr | | | | CrUrGrArCrUrCrCrUrGrUrGrGr | | |
| | GrUrCrArGrGrUrGrCrArCrC*m | | | | ArGrArArGrUrCrUrGrCrCrGrU* | | |
| | A*mU*mG | | | | mU*mA*mC | | |
| HBB | mC*mA*mU*rGrGrUrGrCrArCr | 20668 | + | HBB | mG*mU*mA*rArCrGrGrCrArGr | 20758 | + |
| 5_inst | CrUrGrArCrUrCrCrUrGrGrUrUr | | | 8_inst | ArCrUrUrCrUrCrCrUrCrGrUrUr | | |
| _RT1 | UrUrArGrArGrCrUrArGrArArAr | | | _RT1 | UrUrArGrArGrCrUrArGrArArAr | | |
| 6_PB | UrArGrCrArArGrUrUrArArArAr | | | 7_PB | UrArGrCrArArGrUrUrArArArAr | | |
| S16 | UrArArGrGrCrUrArGrUrCrCrGr | | | S16 | UrArArGrGrCrUrArGrUrCrCrGr | | |
| | UrUrArUrCrArArCrUrUrGrArAr | | | | UrUrArUrCrArArCrUrUrGrArAr | | |
| | ArArArGrUrGrGrCrArCrCrGrAr | | | | ArArArGrUrGrGrCrArCrCrGrAr | | |
| | GrUrCrGrGrUrGrCrGrCrArGrAr | | | | GrUrCrGrGrUrGrCrUrGrCrArCr | | |
| | CrUrUrCrUrCrUrArCrArGrGrAr | | | | CrUrGrArCrUrCrCrUrGrUrGrGr | | |
| | GrUrCrArGrGrUrGrCrArC*mC* | | | | ArGrArArGrUrCrUrGrCrCrG*m | | |
| | mA*mU | | | | U*mU*mA | | |
| HBB | mC*mA*mU*rGrGrUrGrCrArCr | 20669 | + | HBB | mG*mU*mA*rArCrGrGrCrArGr | 20759 | + |
| 5_inst | CrUrGrArCrUrCrCrUrGrGrUrUr | | | 8_inst | ArCrUrUrCrUrCrCrUrCrGrUrUr | | |
| _RT1 | UrUrArGrArGrCrUrArGrArArAr | | | _RT1 | UrUrArGrArGrCrUrArGrArArAr | | |
| 6_PB | UrArGrCrArArGrUrUrArArArAr | | | 7_PB | UrArGrCrArArGrUrUrArArArAr | | |
| S15 | UrArArGrGrCrUrArGrUrCrCrGr | | | S15 | UrArArGrGrCrUrArGrUrCrCrGr | | |
| | UrUrArUrCrArArCrUrUrGrArAr | | | | UrUrArUrCrArArCrUrUrGrArAr | | |
| | ArArArGrUrGrGrCrArCrCrGrAr | | | | ArArArGrUrGrGrCrArCrCrGrAr | | |
| | GrUrCrGrGrUrGrCrGrCrArGrAr | | | | GrUrCrGrGrUrGrCrUrGrCrArCr | | |
| | CrUrUrCrUrCrUrArCrArGrGrAr | | | | CrUrGrArCrUrCrCrUrGrUrGrGr | | |
| | GrUrCrArGrGrUrGrCrA*mC*m | | | | ArGrArArGrUrCrUrGrCrC*mG* | | |
| | C*mA | | | | mU*mU | | |
| HBB | mC*mA*mU*rGrGrUrGrCrArCr | 20670 | + | HBB | mG*mU*mA*rArCrGrGrCrArGr | 20760 | + |
| 5_inst | CrUrGrArCrUrCrCrUrGrGrUrUr | | | 8_inst | ArCrUrUrCrUrCrCrUrCrGrUrUr | | |
| _RT1 | UrUrArGrArGrCrUrArGrArArAr | | | _RT1 | UrUrArGrArGrCrUrArGrArArAr | | |
| 6_PB | UrArGrCrArArGrUrUrArArArAr | | | 7_PB | UrArGrCrArArGrUrUrArArArAr | | |
| S14 | UrArArGrGrCrUrArGrUrCrCrGr | | | S14 | UrArArGrGrCrUrArGrUrCrCrGr | | |
| | UrUrArUrCrArArCrUrUrGrArAr | | | | UrUrArUrCrArArCrUrUrGrArAr | | |
| | ArArArGrUrGrGrCrArCrCrGrAr | | | | ArArArGrUrGrGrCrArCrCrGrAr | | |
| | GrUrCrGrGrUrGrCrGrCrArGrAr | | | | GrUrCrGrGrUrGrCrUrGrCrArCr | | |
| | CrUrUrCrUrCrUrArCrArGrGrAr | | | | CrUrGrArCrUrCrCrUrGrUrGrGr | | |
| | GrUrCrArGrGrUrGrC*mA*mC* | | | | ArGrArArGrUrCrUrGrC*mC*m | | |
| | mC | | | | G*mU | | |
| HBB | mC*mA*mU*rGrGrUrGrCrArCr | 20671 | ++ | HBB | mG*mU*mA*rArCrGrGrCrArGr | 20761 | + |
| 5_inst | CrUrGrArCrUrCrCrUrGrGrUrUr | | | 8_inst | ArCrUrUrCrUrCrCrUrCrGrUrUr | | |
| _RT1 | UrUrArGrArGrCrUrArGrArArAr | | | _RT1 | UrUrArGrArGrCrUrArGrArArAr | | |
| 6_PB | UrArGrCrArArGrUrUrArArArAr | | | 7_PB | UrArGrCrArArGrUrUrArArArAr | | |
| S13 | UrArArGrGrCrUrArGrUrCrCrGr | | | S13 | UrArArGrGrCrUrArGrUrCrCrGr | | |
| | UrUrArUrCrArArCrUrUrGrArAr | | | | UrUrArUrCrArArCrUrUrGrArAr | | |
| | ArArArGrUrGrGrCrArCrCrGrAr | | | | ArArArGrUrGrGrCrArCrCrGrAr | | |
| | GrUrCrGrGrUrGrCrGrCrArGrAr | | | | GrUrCrGrGrUrGrCrUrGrCrArCr | | |
| | CrUrUrCrUrCrUrArCrArGrGrAr | | | | CrUrGrArCrUrCrCrUrGrUrGrGr | | |
| | GrUrCrArGrGrUrG*mC*mA*m | | | | ArGrArArGrUrCrUrG*mC*mC* | | |
| | C | | | | mG | | |
| HBB | mC*mA*mU*rGrGrUrGrCrArCr | 20672 | +++ | HBB | mG*mU*mA*rArCrGrGrCrArGr | 20762 | ++ |
| 5_inst | CrUrGrArCrUrCrCrUrGrGrUrUr | | | 8_inst | ArCrUrUrCrUrCrCrUrCrGrUrUr | | |
| _RT1 | UrUrArGrArGrCrUrArGrArArAr | | | _RT1 | UrUrArGrArGrCrUrArGrArArAr | | |
| 6_PB | UrArGrCrArArGrUrUrArArArAr | | | 7_PB | UrArGrCrArArGrUrUrArArArAr | | |
| S12 | UrArArGrGrCrUrArGrUrCrCrGr | | | S12 | UrArArGrGrCrUrArGrUrCrCrGr | | |
| | UrUrArUrCrArArCrUrUrGrArAr | | | | UrUrArUrCrArArCrUrUrGrArAr | | |
| | ArArArGrUrGrGrCrArCrCrGrAr | | | | ArArArGrUrGrGrCrArCrCrGrAr | | |
| | GrUrCrGrGrUrGrCrGrCrArGrAr | | | | GrUrCrGrGrUrGrCrUrGrCrArCr | | |
| | CrUrUrCrUrCrUrArCrArGrGrAr | | | | CrUrGrArCrUrCrCrUrGrUrGrGr | | |
| | GrUrCrArGrGrU*mG*mC*mA | | | | ArGrArArGrUrCrU*mG*mC*m | | |
| | | | | | C | | |
| HBB | mC*mA*mU*rGrGrUrGrCrArCr | 20673 | +++ | HBB | mG*mU*mA*rArCrGrGrCrArGr | 20763 | ++ |
| 5_inst | CrUrGrArCrUrCrCrUrGrGrUrUr | | | 8_inst | ArCrUrUrCrUrCrCrUrCrGrUrUr | | |
| _RT1 | UrUrArGrArGrCrUrArGrArArAr | | | _RT1 | UrUrArGrArGrCrUrArGrArArAr | | |
| 6_PB | UrArGrCrArArGrUrUrArArArAr | | | 7_PB | UrArGrCrArArGrUrUrArArArAr | | |
| S11 | UrArArGrGrCrUrArGrUrCrCrGr | | | S11 | UrArArGrGrCrUrArGrUrCrCrGr | | |
| | UrUrArUrCrArArCrUrUrGrArAr | | | | UrUrArUrCrArArCrUrUrGrArAr | | |
| | ArArArGrUrGrGrCrArCrCrGrAr | | | | ArArArGrUrGrGrCrArCrCrGrAr | | |
| | GrUrCrGrGrUrGrCrGrCrArGrAr | | | | GrUrCrGrGrUrGrCrUrGrCrArCr | | |
| | CrUrUrCrUrCrUrArCrArGrGrAr | | | | CrUrGrArCrUrCrCrUrGrUrGrGr | | |
| | GrUrCrArGrG*mU*mG*mC | | | | ArGrArArGrUrC*mU*mG*mC | | |
| HBB | mC*mA*mU*rGrGrUrGrCrArCr | 20674 | +++ | HBB | mG*mU*mA*rArCrGrGrCrArGr | 20764 | + |
| 5_inst | CrUrGrArCrUrCrCrUrGrGrUrUr | | | 8_inst | ArCrUrUrCrUrCrCrUrCrGrUrUr | | |
| _RT1 | UrUrArGrArGrCrUrArGrArArAr | | | _RT1 | UrUrArGrArGrCrUrArGrArArAr | | |
| 6_PB | UrArGrCrArArGrUrUrArArArAr | | | 7_PB | UrArGrCrArArGrUrUrArArArAr | | |
| S10 | UrArArGrGrCrUrArGrUrCrCrGr | | | S10 | UrArArGrGrCrUrArGrUrCrCrGr | | |
| | UrUrArUrCrArArCrUrUrGrArAr | | | | UrUrArUrCrArArCrUrUrGrArAr | | |
| | ArArArGrUrGrGrCrArCrCrGrAr | | | | ArArArGrUrGrGrCrArCrCrGrAr | | |
| | GrUrCrGrGrUrGrCrGrCrArGrAr | | | | GrUrCrGrGrUrGrCrUrGrCrArCr | | |
| | CrUrUrCrUrCrUrArCrArGrGrAr | | | | CrUrGrArCrUrCrCrUrGrUrGrGr | | |
| | GrUrCrArG*mG*mU*mG | | | | ArGrArArGrU*mC*mU*mG | | |
| HBB | mC*mA*mU*rGrGrUrGrCrArCr | 20675 | ++ | HBB | mG*mU*mA*rArCrGrGrCrArGr | 20765 | + |
| 5_inst | CrUrGrArCrUrCrCrUrGrGrUrUr | | | 8_inst | ArCrUrUrCrUrCrCrUrCrGrUrUr | | |
| _RT1 | UrUrArGrArGrCrUrArGrArArAr | | | _RT1 | UrUrArGrArGrCrUrArGrArArAr | | |
| 6_PB | UrArGrCrArArGrUrUrArArArAr | | | 7_PB | UrArGrCrArArGrUrUrArArArAr | | |
| S9 | UrArArGrGrCrUrArGrUrCrCrGr | | | S9 | UrArArGrGrCrUrArGrUrCrCrGr | | |
| | UrUrArUrCrArArCrUrUrGrArAr | | | | UrUrArUrCrArArCrUrUrGrArAr | | |
| | ArArArGrUrGrGrCrArCrCrGrAr | | | | ArArArGrUrGrGrCrArCrCrGrAr | | |
| | GrUrCrGrGrUrGrCrGrCrArGrAr | | | | GrUrCrGrGrUrGrCrUrGrCrArCr | | |
| | CrUrUrCrUrCrUrArCrArGrGrAr | | | | CrUrGrArCrUrCrCrUrGrUrGrGr | | |
| | GrUrCrA*mG*mG*mU | | | | ArGrArArG*mU*mC*mU | | |
| HBB | mC*mA*mU*rGrGrUrGrCrArCr | 20676 | + | HBB | mG*mU*mA*rArCrGrGrCrArGr | 20766 | + |
| 5_inst | CrUrGrArCrUrCrCrUrGrGrUrUr | | | 8_inst | ArCrUrUrCrUrCrCrUrCrGrUrUr | | |
| _RT1 | UrUrArGrArGrCrUrArGrArArAr | | | _RT1 | UrUrArGrArGrCrUrArGrArArAr | | |
| 6_PB | UrArGrCrArArGrUrUrArArArAr | | | 7_PB | UrArGrCrArArGrUrUrArArArAr | | |
| S8 | UrArArGrGrCrUrArGrUrCrCrGr | | | S8 | UrArArGrGrCrUrArGrUrCrCrGr | | |
| | UrUrArUrCrArArCrUrUrGrArAr | | | | UrUrArUrCrArArCrUrUrGrArAr | | |
| | ArArArGrUrGrGrCrArCrCrGrAr | | | | ArArArGrUrGrGrCrArCrCrGrAr | | |
| | GrUrCrGrGrUrGrCrGrCrArGrAr | | | | GrUrCrGrGrUrGrCrUrGrCrArCr | | |
| | CrUrUrCrUrCrUrArCrArGrGrAr | | | | CrUrGrArCrUrCrCrUrGrUrGrGr | | |
| | GrUrC*mA*mG*mG | | | | ArGrArA*mG*mU*mC | | |
| HBB | mC*mA*mU*rGrGrUrGrCrArCr | 20677 | + | HBB | mG*mU*mA*rArCrGrGrCrArGr | 20767 | + |
| 5_inst | CrUrGrArCrUrCrCrUrGrGrUrUr | | | 8_inst | ArCrUrUrCrUrCrCrUrCrGrUrUr | | |
| _RT1 | UrUrArGrArGrCrUrArGrArArAr | | | _RT1 | UrUrArGrArGrCrUrArGrArArAr | | |
| 4_PB | UrArGrCrArArGrUrUrArArArAr | | | 6_PB | UrArGrCrArArGrUrUrArArArAr | | |
| S17 | UrArArGrGrCrUrArGrUrCrCrGr | | | S17 | UrArArGrGrCrUrArGrUrCrCrGr | | |
| | UrUrArUrCrArArCrUrUrGrArAr | | | | UrUrArUrCrArArCrUrUrGrArAr | | |
| | ArArArGrUrGrGrCrArCrCrGrAr | | | | ArArArGrUrGrGrCrArCrCrGrAr | | |
| | GrUrCrGrGrUrGrCrArGrArCrUr | | | | GrUrCrGrGrUrGrCrGrCrArCrCr | | |
| | UrCrUrCrUrArCrArGrGrArGrUr | | | | UrGrArCrUrCrCrUrGrUrGrGrAr | | |
| | CrArGrGrUrGrCrArCrC*mA*m | | | | GrArArGrUrCrUrGrCrCrGrU*m | | |
| | U*mG | | | | U*mA*mC | | |
| HBB | mC*mA*mU*rGrGrUrGrCrArCr | 20678 | + | HBB | mG*mU*mA*rArCrGrGrCrArGr | 20768 | + |
| 5_inst | CrUrGrArCrUrCrCrUrGrGrUrUr | | | 8_inst | ArCrUrUrCrUrCrCrUrCrGrUrUr | | |
| _RT1 | UrUrArGrArGrCrUrArGrArArAr | | | _RT1 | UrUrArGrArGrCrUrArGrArArAr | | |
| 4_PB | UrArGrCrArArGrUrUrArArArAr | | | 6_PB | UrArGrCrArArGrUrUrArArArAr | | |
| S16 | UrArArGrGrCrUrArGrUrCrCrGr | | | S16 | UrArArGrGrCrUrArGrUrCrCrGr | | |
| | UrUrArUrCrArArCrUrUrGrArAr | | | | UrUrArUrCrArArCrUrUrGrArAr | | |
| | ArArArGrUrGrGrCrArCrCrGrAr | | | | ArArArGrUrGrGrCrArCrCrGrAr | | |
| | GrUrCrGrGrUrGrCrArGrArCrUr | | | | GrUrCrGrGrUrGrCrGrCrArCrCr | | |
| | UrCrUrCrUrArCrArGrGrArGrUr | | | | UrGrArCrUrCrCrUrGrUrGrGrAr | | |
| | CrArGrGrUrGrCrArC*mC*mA* | | | | GrArArGrUrCrUrGrCrCrG*mU* | | |
| | mU | | | | mU*mA | | |
| HBB | mC*mA*mU*rGrGrUrGrCrArCr | 20679 | + | HBB | mG*mU*mA*rArCrGrGrCrArGr | 20769 | + |
| 5_inst | CrUrGrArCrUrCrCrUrGrGrUrUr | | | 8_inst | ArCrUrUrCrUrCrCrUrCrGrUrUr | | |
| _RT1 | UrUrArGrArGrCrUrArGrArArAr | | | _RT1 | UrUrArGrArGrCrUrArGrArArAr | | |
| 4_PB | UrArGrCrArArGrUrUrArArArAr | | | 6_PB | UrArGrCrArArGrUrUrArArArAr | | |
| S15 | UrArArGrGrCrUrArGrUrCrCrGr | | | S15 | UrArArGrGrCrUrArGrUrCrCrGr | | |
| | UrUrArUrCrArArCrUrUrGrArAr | | | | UrUrArUrCrArArCrUrUrGrArAr | | |
| | ArArArGrUrGrGrCrArCrCrGrAr | | | | ArArArGrUrGrGrCrArCrCrGrAr | | |
| | GrUrCrGrGrUrGrCrArGrArCrUr | | | | GrUrCrGrGrUrGrCrGrCrArCrCr | | |
| | UrCrUrCrUrArCrArGrGrArGrUr | | | | UrGrArCrUrCrCrUrGrUrGrGrAr | | |
| | CrArGrGrUrGrCrA*mC*mC*m | | | | GrArArGrUrCrUrGrCrC*mG*m | | |
| | A | | | | U*mU | | |
| HBB | mC*mA*mU*rGrGrUrGrCrArCr | 20680 | ++ | HBB | mG*mU*mA*rArCrGrGrCrArGr | 20770 | + |
| 5_inst | CrUrGrArCrUrCrCrUrGrGrUrUr | | | 8_inst | ArCrUrUrCrUrCrCrUrCrGrUrUr | | |
| _RT1 | UrUrArGrArGrCrUrArGrArArAr | | | _RT1 | UrUrArGrArGrCrUrArGrArArAr | | |
| 4_PB | UrArGrCrArArGrUrUrArArArAr | | | 6_PB | UrArGrCrArArGrUrUrArArArAr | | |
| S14 | UrArArGrGrCrUrArGrUrCrCrGr | | | S14 | UrArArGrGrCrUrArGrUrCrCrGr | | |
| | UrUrArUrCrArArCrUrUrGrArAr | | | | UrUrArUrCrArArCrUrUrGrArAr | | |
| | ArArArGrUrGrGrCrArCrCrGrAr | | | | ArArArGrUrGrGrCrArCrCrGrAr | | |
| | GrUrCrGrGrUrGrCrArGrArCrUr | | | | GrUrCrGrGrUrGrCrGrCrArCrCr | | |
| | UrCrUrCrUrArCrArGrGrArGrUr | | | | UrGrArCrUrCrCrUrGrUrGrGrAr | | |
| | CrArGrGrUrGrC*mA*mC*mC | | | | GrArArGrUrCrUrGrC*mC*mG* | | |
| | | | | | mU | | |
| HBB | mC*mA*mU*rGrGrUrGrCrArCr | 20681 | ++ | HBB | mG*mU*mA*rArCrGrGrCrArGr | 20771 | ++ |
| 5_inst | CrUrGrArCrUrCrCrUrGrGrUrUr | | | 8_inst | ArCrUrUrCrUrCrCrUrCrGrUrUr | | |
| _RT1 | UrUrArGrArGrCrUrArGrArArAr | | | _RT1 | UrUrArGrArGrCrUrArGrArArAr | | |
| 4_PB | UrArGrCrArArGrUrUrArArArAr | | | 6_PB | UrArGrCrArArGrUrUrArArArAr | | |
| S13 | UrArArGrGrCrUrArGrUrCrCrGr | | | S13 | UrArArGrGrCrUrArGrUrCrCrGr | | |
| | UrUrArUrCrArArCrUrUrGrArAr | | | | UrUrArUrCrArArCrUrUrGrArAr | | |
| | ArArArGrUrGrGrCrArCrCrGrAr | | | | ArArArGrUrGrGrCrArCrCrGrAr | | |
| | GrUrCrGrGrUrGrCrArGrArCrUr | | | | GrUrCrGrGrUrGrCrGrCrArCrCr | | |
| | UrCrUrCrUrArCrArGrGrArGrUr | | | | UrGrArCrUrCrCrUrGrUrGrGrAr | | |
| | CrArGrGrUrG*mC*mA*mC | | | | GrArArGrUrCrUrG*mC*mC*m | | |
| HBB | mC*mA*mU*rGrGrUrGrCrArCr | 20682 | +++ | HBB | mG*mU*mA*rArCrGrGrCrArGr | 20772 | ++ |
| 5_inst | CrUrGrArCrUrCrCrUrGrGrUrUr | | | 8_inst | ArCrUrUrCrUrCrCrUrCrGrUrUr | | |
| _RT1 | UrUrArGrArGrCrUrArGrArArAr | | | _RT1 | UrUrArGrArGrCrUrArGrArArAr | | |
| 4_PB | UrArGrCrArArGrUrUrArArArAr | | | 6_PB | UrArGrCrArArGrUrUrArArArAr | | |
| S12 | UrArArGrGrCrUrArGrUrCrCrGr | | | S12 | UrArArGrGrCrUrArGrUrCrCrGr | | |
| | UrUrArUrCrArArCrUrUrGrArAr | | | | UrUrArUrCrArArCrUrUrGrArAr | | |
| | ArArArGrUrGrGrCrArCrCrGrAr | | | | ArArArGrUrGrGrCrArCrCrGrAr | | |
| | GrUrCrGrGrUrGrCrArGrArCrUr | | | | GrUrCrGrGrUrGrCrGrCrArCrCr | | |
| | UrCrUrCrUrArCrArGrGrArGrUr | | | | UrGrArCrUrCrCrUrGrUrGrGrAr | | |
| | CrArGrGrU*mG*mC*mA | | | | GrArArGrUrCrU*mG*mC*mC | | |
| HBB | mC*mA*mU*rGrGrUrGrCrArCr | 20683 | +++ | HBB | mG*mU*mA*rArCrGrGrCrArGr | 20773 | ++ |
| 5_inst | CrUrGrArCrUrCrCrUrGrGrUrUr | | | 8_inst | ArCrUrUrCrUrCrCrUrCrGrUrUr | | |
| _RT1 | UrUrArGrArGrCrUrArGrArArAr | | | _RT1 | UrUrArGrArGrCrUrArGrArArAr | | |
| 4_PB | UrArGrCrArArGrUrUrArArArAr | | | 6_PB | UrArGrCrArArGrUrUrArArArAr | | |
| S11 | UrArArGrGrCrUrArGrUrCrCrGr | | | S11 | UrArArGrGrCrUrArGrUrCrCrGr | | |
| | UrUrArUrCrArArCrUrUrGrArAr | | | | UrUrArUrCrArArCrUrUrGrArAr | | |
| | ArArArGrUrGrGrCrArCrCrGrAr | | | | ArArArGrUrGrGrCrArCrCrGrAr | | |
| | GrUrCrGrGrUrGrCrArGrArCrUr | | | | GrUrCrGrGrUrGrCrGrCrArCrCr | | |
| | UrCrUrCrUrArCrArGrGrArGrUr | | | | UrGrArCrUrCrCrUrGrUrGrGrAr | | |
| | CrArGrG*mU*mG*mC | | | | GrArArGrUrC*mU*mG*mC | | |
| HBB | mC*mA*mU*rGrGrUrGrCrArCr | 20684 | +++ | HBB | mG*mU*mA*rArCrGrGrCrArGr | 20774 | + |
| 5_inst | CrUrGrArCrUrCrCrUrGrGrUrUr | | | 8_inst | ArCrUrUrCrUrCrCrUrCrGrUrUr | | |
| _RT1 | UrUrArGrArGrCrUrArGrArArAr | | | _RT1 | UrUrArGrArGrCrUrArGrArArAr | | |
| 4_PB | UrArGrCrArArGrUrUrArArArAr | | | 6_PB | UrArGrCrArArGrUrUrArArArAr | | |
| S10 | UrArArGrGrCrUrArGrUrCrCrGr | | | S10 | UrArArGrGrCrUrArGrUrCrCrGr | | |
| | UrUrArUrCrArArCrUrUrGrArAr | | | | UrUrArUrCrArArCrUrUrGrArAr | | |
| | ArArArGrUrGrGrCrArCrCrGrAr | | | | ArArArGrUrGrGrCrArCrCrGrAr | | |
| | GrUrCrGrGrUrGrCrArGrArCrUr | | | | GrUrCrGrGrUrGrCrGrCrArCrCr | | |
| | UrCrUrCrUrArCrArGrGrArGrUr | | | | UrGrArCrUrCrCrUrGrUrGrGrAr | | |
| | CrArG*mG*mU*mG | | | | GrArArGrU*mC*mU*mG | | |
| HBB | mC*mA*mU*rGrGrUrGrCrArCr | 20685 | +++ | HBB | mG*mU*mA*rArCrGrGrCrArGr | 20775 | + |
| 5_inst | CrUrGrArCrUrCrCrUrGrGrUrUr | | | 8_inst | ArCrUrUrCrUrCrCrUrCrGrUrUr | | |
| _RT1 | UrUrArGrArGrCrUrArGrArArAr | | | _RT1 | UrUrArGrArGrCrUrArGrArArAr | | |
| 4_PB | UrArGrCrArArGrUrUrArArArAr | | | 6_PB | UrArGrCrArArGrUrUrArArArAr | | |
| S9 | UrArArGrGrCrUrArGrUrCrCrGr | | | S9 | UrArArGrGrCrUrArGrUrCrCrGr | | |
| | UrUrArUrCrArArCrUrUrGrArAr | | | | UrUrArUrCrArArCrUrUrGrArAr | | |
| | ArArArGrUrGrGrCrArCrCrGrAr | | | | ArArArGrUrGrGrCrArCrCrGrAr | | |
| | GrUrCrGrGrUrGrCrArGrArCrUr | | | | GrUrCrGrGrUrGrCrGrCrArCrCr | | |
| | UrCrUrCrUrArCrArGrGrArGrUr | | | | UrGrArCrUrCrCrUrGrUrGrGrAr | | |
| | CrA*mG*mG*mU | | | | GrArArG*mU*mC*mU | | |
| HBB | mC*mA*mU*rGrGrUrGrCrArCr | 20686 | ++ | HBB | mG*mU*mA*rArCrGrGrCrArGr | 20776 | + |
| 5_inst | CrUrGrArCrUrCrCrUrGrGrUrUr | | | 8_inst | ArCrUrUrCrUrCrCrUrCrGrUrUr | | |
| _RT1 | UrUrArGrArGrCrUrArGrArArAr | | | _RT1 | UrUrArGrArGrCrUrArGrArArAr | | |
| 4_PB | UrArGrCrArArGrUrUrArArArAr | | | 6_PB | UrArGrCrArArGrUrUrArArArAr | | |
| S8 | UrArArGrGrCrUrArGrUrCrCrGr | | | S8 | UrArArGrGrCrUrArGrUrCrCrGr | | |
| | UrUrArUrCrArArCrUrUrGrArAr | | | | UrUrArUrCrArArCrUrUrGrArAr | | |
| | ArArArGrUrGrGrCrArCrCrGrAr | | | | ArArArGrUrGrGrCrArCrCrGrAr | | |
| | GrUrCrGrGrUrGrCrArGrArCrUr | | | | GrUrCrGrGrUrGrCrGrCrArCrCr | | |
| | UrCrUrCrUrArCrArGrGrArGrUr | | | | UrGrArCrUrCrCrUrGrUrGrGrAr | | |
| | C*mA*mG*mG | | | | GrArA*mG*mU*mC | | |
| HBB | mC*mA*mU*rGrGrUrGrCrArCr | 20687 | + | HBB | mG*mU*mA*rArCrGrGrCrArGr | 20777 | + |
| 5_inst | CrUrGrArCrUrCrCrUrGrGrUrUr | | | 8_inst | ArCrUrUrCrUrCrCrUrCrGrUrUr | | |
| _RT1 | UrUrArGrArGrCrUrArGrArArAr | | | _RT1 | UrUrArGrArGrCrUrArGrArArAr | | |
| | UrArGrCrArArGrUrUrArArArAr | | | | UrArGrCrArArGrUrUrArArArAr | | |
| 3_PB | UrArArGrGrCrUrArGrUrCrCrGr | | | 4_PB | UrArArGrGrCrUrArGrUrCrCrGr | | |
| S17 | UrUrArUrCrArArCrUrUrGrArAr | | | S17 | UrUrArUrCrArArCrUrUrGrArAr | | |
| | ArArArGrUrGrGrCrArCrCrGrAr | | | | ArArArGrUrGrGrCrArCrCrGrAr | | |
| | GrUrCrGrGrUrGrCrGrArCrUrUr | | | | GrUrCrGrGrUrGrCrArCrCrUrGr | | |
| | CrUrCrUrArCrArGrGrArGrUrCr | | | | ArCrUrCrCrUrGrUrGrGrArGrAr | | |
| | ArGrGrUrGrCrArCrC*mA*mU* | | | | ArGrUrCrUrGrCrCrGrU*mU*m | | |
| | mG | | | | A*mC | | |
| HBB | mC*mA*mU*rGrGrUrGrCrArCr | 20688 | + | HBB | mG*mU*mA*rArCrGrGrCrArGr | 20778 | + |
| 5_inst | CrUrGrArCrUrCrCrUrGrGrUrUr | | | 8_inst | ArCrUrUrCrUrCrCrUrCrGrUrUr | | |
| _RT1 | UrUrArGrArGrCrUrArGrArArAr | | | _RT1 | UrUrArGrArGrCrUrArGrArArAr | | |
| 3_PB | UrArGrCrArArGrUrUrArArArAr | | | 4_PB | UrArGrCrArArGrUrUrArArArAr | | |
| S16 | UrArArGrGrCrUrArGrUrCrCrGr | | | S16 | UrArArGrGrCrUrArGrUrCrCrGr | | |
| | UrUrArUrCrArArCrUrUrGrArAr | | | | UrUrArUrCrArArCrUrUrGrArAr | | |
| | ArArArGrUrGrGrCrArCrCrGrAr | | | | ArArArGrUrGrGrCrArCrCrGrAr | | |
| | GrUrCrGrGrUrGrCrGrArCrUrUr | | | | GrUrCrGrGrUrGrCrArCrCrUrGr | | |
| | CrUrCrUrArCrArGrGrArGrUrCr | | | | ArCrUrCrCrUrGrUrGrGrArGrAr | | |
| | ArGrGrUrGrCrArC*mC*mA*m | | | | ArGrUrCrUrGrCrCrG*mU*mU* | | |
| | U | | | | mA | | |
| HBB | mC*mA*mU*rGrGrUrGrCrArCr | 20689 | + | HBB | mG*mU*mA*rArCrGrGrCrArGr | 20779 | + |
| 5_inst | CrUrGrArCrUrCrCrUrGrGrUrUr | | | 8_inst | ArCrUrUrCrUrCrCrUrCrGrUrUr | | |
| _RT1 | UrUrArGrArGrCrUrArGrArArAr | | | _RT1 | UrUrArGrArGrCrUrArGrArArAr | | |
| 3_PB | UrArGrCrArArGrUrUrArArArAr | | | 4_PB | UrArGrCrArArGrUrUrArArArAr | | |
| S15 | UrArArGrGrCrUrArGrUrCrCrGr | | | S15 | UrArArGrGrCrUrArGrUrCrCrGr | | |
| | UrUrArUrCrArArCrUrUrGrArAr | | | | UrUrArUrCrArArCrUrUrGrArAr | | |
| | ArArArGrUrGrGrCrArCrCrGrAr | | | | ArArArGrUrGrGrCrArCrCrGrAr | | |
| | GrUrCrGrGrUrGrCrGrArCrUrUr | | | | GrUrCrGrGrUrGrCrArCrCrUrGr | | |
| | CrUrCrUrArCrArGrGrArGrUrCr | | | | ArCrUrCrCrUrGrUrGrGrArGrAr | | |
| | ArGrGrUrGrCrA*mC*mC*mA | | | | ArGrUrCrUrGrCrC*mG*mU*m | | |
| | | | | | U | | |
| HBB | mC*mA*mU*rGrGrUrGrCrArCr | 20690 | + | HBB | mG*mU*mA*rArCrGrGrCrArGr | 20780 | ++ |
| 5_inst | CrUrGrArCrUrCrCrUrGrGrUrUr | | | 8_inst | ArCrUrUrCrUrCrCrUrCrGrUrUr | | |
| _RT1 | UrUrArGrArGrCrUrArGrArArAr | | | _RT1 | UrUrArGrArGrCrUrArGrArArAr | | |
| 3_PB | UrArGrCrArArGrUrUrArArArAr | | | 4_PB | UrArGrCrArArGrUrUrArArArAr | | |
| S14 | UrArArGrGrCrUrArGrUrCrCrGr | | | S14 | UrArArGrGrCrUrArGrUrCrCrGr | | |
| | UrUrArUrCrArArCrUrUrGrArAr | | | | UrUrArUrCrArArCrUrUrGrArAr | | |
| | ArArArGrUrGrGrCrArCrCrGrAr | | | | ArArArGrUrGrGrCrArCrCrGrAr | | |
| | GrUrCrGrGrUrGrCrGrArCrUrUr | | | | GrUrCrGrGrUrGrCrArCrCrUrGr | | |
| | CrUrCrUrArCrArGrGrArGrUrCr | | | | ArCrUrCrCrUrGrUrGrGrArGrAr | | |
| | ArGrGrUrGrC*mA*mC*mC | | | | ArGrUrCrUrGrC*mC*mG*mU | | |
| HBB | mC*mA*mU*rGrGrUrGrCrArCr | 20691 | ++ | HBB | mG*mU*mA*rArCrGrGrCrArGr | 20781 | ++ |
| 5_inst | CrUrGrArCrUrCrCrUrGrGrUrUr | | | 8_inst | ArCrUrUrCrUrCrCrUrCrGrUrUr | | |
| _RT1 | UrUrArGrArGrCrUrArGrArArAr | | | _RT1 | UrUrArGrArGrCrUrArGrArArAr | | |
| 3_PB | UrArGrCrArArGrUrUrArArArAr | | | 4_PB | UrArGrCrArArGrUrUrArArArAr | | |
| S13 | UrArArGrGrCrUrArGrUrCrCrGr | | | S13 | UrArArGrGrCrUrArGrUrCrCrGr | | |
| | UrUrArUrCrArArCrUrUrGrArAr | | | | UrUrArUrCrArArCrUrUrGrArAr | | |
| | ArArArGrUrGrGrCrArCrCrGrAr | | | | ArArArGrUrGrGrCrArCrCrGrAr | | |
| | GrUrCrGrGrUrGrCrGrArCrUrUr | | | | GrUrCrGrGrUrGrCrArCrCrUrGr | | |
| | CrUrCrUrArCrArGrGrArGrUrCr | | | | ArCrUrCrCrUrGrUrGrGrArGrAr | | |
| | ArGrGrUrG*mC*mA*mC | | | | ArGrUrCrUrG*mC*mC*mG | | |
| HBB | mC*mA*mU*rGrGrUrGrCrArCr | 20692 | +++ | HBB | mG*mU*mA*rArCrGrGrCrArGr | 20782 | ++ |
| 5_inst | CrUrGrArCrUrCrCrUrGrGrUrUr | | | 8_inst | ArCrUrUrCrUrCrCrUrCrGrUrUr | | |
| _RT1 | UrUrArGrArGrCrUrArGrArArAr | | | _RT1 | UrUrArGrArGrCrUrArGrArArAr | | |
| 3_PB | UrArGrCrArArGrUrUrArArArAr | | | 4_PB | UrArGrCrArArGrUrUrArArArAr | | |
| S12 | UrArArGrGrCrUrArGrUrCrCrGr | | | S12 | UrArArGrGrCrUrArGrUrCrCrGr | | |
| | UrUrArUrCrArArCrUrUrGrArAr | | | | UrUrArUrCrArArCrUrUrGrArAr | | |
| | ArArArGrUrGrGrCrArCrCrGrAr | | | | ArArArGrUrGrGrCrArCrCrGrAr | | |
| | GrUrCrGrGrUrGrCrGrArCrUrUr | | | | GrUrCrGrGrUrGrCrArCrCrUrGr | | |
| | CrUrCrUrArCrArGrGrArGrUrCr | | | | ArCrUrCrCrUrGrUrGrGrArGrAr | | |
| | ArGrGrU*mG*mC*mA | | | | ArGrUrCrU*mG*mC*mC | | |
| HBB | mC*mA*mU*rGrGrUrGrCrArCr | 20693 | +++ | HBB | mG*mU*mA*rArCrGrGrCrArGr | 20783 | ++ |
| 5_inst | CrUrGrArCrUrCrCrUrGrGrUrUr | | | 8_inst | ArCrUrUrCrUrCrCrUrCrGrUrUr | | |
| _RT1 | UrUrArGrArGrCrUrArGrArArAr | | | _RT1 | UrUrArGrArGrCrUrArGrArArAr | | |
| 3_PB | UrArGrCrArArGrUrUrArArArAr | | | 4_PB | UrArGrCrArArGrUrUrArArArAr | | |
| S11 | UrArArGrGrCrUrArGrUrCrCrGr | | | S11 | UrArArGrGrCrUrArGrUrCrCrGr | | |
| | UrUrArUrCrArArCrUrUrGrArAr | | | | UrUrArUrCrArArCrUrUrGrArAr | | |
| | ArArArGrUrGrGrCrArCrCrGrAr | | | | ArArArGrUrGrGrCrArCrCrGrAr | | |
| | GrUrCrGrGrUrGrCrGrArCrUrUr | | | | GrUrCrGrGrUrGrCrArCrCrUrGr | | |
| | CrUrCrUrArCrArGrGrArGrUrCr | | | | ArCrUrCrCrUrGrUrGrGrArGrAr | | |
| | ArGrG*mU*mG*mC | | | | ArGrUrC*mU*mG*mC | | |
| HBB | mC*mA*mU*rGrGrUrGrCrArCr | 20694 | +++ | HBB | mG*mU*mA*rArCrGrGrCrArGr | 20784 | ++ |
| 5_inst | CrUrGrArCrUrCrCrUrGrGrUrUr | | | 8_inst | ArCrUrUrCrUrCrCrUrCrGrUrUr | | |
| _RT1 | UrUrArGrArGrCrUrArGrArArAr | | | _RT1 | UrUrArGrArGrCrUrArGrArArAr | | |
| 3_PB | UrArGrCrArArGrUrUrArArArAr | | | 4_PB | UrArGrCrArArGrUrUrArArArAr | | |
| S10 | UrArArGrGrCrUrArGrUrCrCrGr | | | S10 | UrArArGrGrCrUrArGrUrCrCrGr | | |
| | UrUrArUrCrArArCrUrUrGrArAr | | | | UrUrArUrCrArArCrUrUrGrArAr | | |
| | ArArArGrUrGrGrCrArCrCrGrAr | | | | ArArArGrUrGrGrCrArCrCrGrAr | | |
| | GrUrCrGrGrUrGrCrGrArCrUrUr | | | | GrUrCrGrGrUrGrCrArCrCrUrGr | | |
| | CrUrCrUrArCrArGrGrArGrUrCr | | | | ArCrUrCrCrUrGrUrGrGrArGrAr | | |
| | ArG*mG*mU*mG | | | | ArGrU*mC*mU*mG | | |
| HBB | mC*mA*mU*rGrGrUrGrCrArCr | 20695 | +++ | HBB | mG*mU*mA*rArCrGrGrCrArGr | 20785 | + |
| 5_inst | CrUrGrArCrUrCrCrUrGrGrUrUr | | | 8_inst | ArCrUrUrCrUrCrCrUrCrGrUrUr | | |
| _RT1 | UrUrArGrArGrCrUrArGrArArAr | | | _RT1 | UrUrArGrArGrCrUrArGrArArAr | | |
| 3_PB | UrArGrCrArArGrUrUrArArArAr | | | 4_PB | UrArGrCrArArGrUrUrArArArAr | | |
| S9 | UrArArGrGrCrUrArGrUrCrCrGr | | | S9 | UrArArGrGrCrUrArGrUrCrCrGr | | |
| | UrUrArUrCrArArCrUrUrGrArAr | | | | UrUrArUrCrArArCrUrUrGrArAr | | |
| | ArArArGrUrGrGrCrArCrCrGrAr | | | | ArArArGrUrGrGrCrArCrCrGrAr | | |
| | GrUrCrGrGrUrGrCrGrArCrUrUr | | | | GrUrCrGrGrUrGrCrArCrCrUrGr | | |
| | CrUrCrUrArCrArGrGrArGrUrCr | | | | ArCrUrCrCrUrGrUrGrGrArGrAr | | |
| | A*mG*mG*mU | | | | ArG*mU*mC*mU | | |
| HBB | mC*mA*mU*rGrGrUrGrCrArCr | 20696 | ++ | HBB | mG*mU*mA*rArCrGrGrCrArGr | 20786 | ++ |
| 5_inst | CrUrGrArCrUrCrCrUrGrGrUrUr | | | 8_inst | ArCrUrUrCrUrCrCrUrCrGrUrUr | | |
| _RT1 | UrUrArGrArGrCrUrArGrArArAr | | | _RT1 | UrUrArGrArGrCrUrArGrArArAr | | |
| 3_PB | UrArGrCrArArGrUrUrArArArAr | | | 4_PB | UrArGrCrArArGrUrUrArArArAr | | |
| S8 | UrArArGrGrCrUrArGrUrCrCrGr | | | S8 | UrArArGrGrCrUrArGrUrCrCrGr | | |
| | UrUrArUrCrArArCrUrUrGrArAr | | | | UrUrArUrCrArArCrUrUrGrArAr | | |
| | ArArArGrUrGrGrCrArCrCrGrAr | | | | ArArArGrUrGrGrCrArCrCrGrAr | | |
| | GrUrCrGrGrUrGrCrGrArCrUrUr | | | | GrUrCrGrGrUrGrCrArCrCrUrGr | | |
| | CrUrCrUrArCrArGrGrArGrUrC* | | | | ArCrUrCrCrUrGrUrGrGrArGrAr | | |
| | mA*mG*mG | | | | A*mG*mU*mC | | |
| HBB | mC*mA*mU*rGrGrUrGrCrArCr | 20697 | + | HBB | mG*mU*mA*rArCrGrGrCrArGr | 20787 | + |
| 5_inst | CrUrGrArCrUrCrCrUrGrGrUrUr | | | 8_inst | ArCrUrUrCrUrCrCrUrCrGrUrUr | | |
| _RT1 | UrUrArGrArGrCrUrArGrArArAr | | | _RT1 | UrUrArGrArGrCrUrArGrArArAr | | |
| 2_PB | UrArGrCrArArGrUrUrArArArAr | | | 1_PB | UrArGrCrArArGrUrUrArArArAr | | |
| S17 | UrArArGrGrCrUrArGrUrCrCrGr | | | S17 | UrArArGrGrCrUrArGrUrCrCrGr | | |
| | UrUrArUrCrArArCrUrUrGrArAr | | | | UrUrArUrCrArArCrUrUrGrArAr | | |
| | ArArArGrUrGrGrCrArCrCrGrAr | | | | ArArArGrUrGrGrCrArCrCrGrAr | | |
| | GrUrCrGrGrUrGrCrArCrUrUrCr | | | | GrUrCrGrGrUrGrCrUrGrArCrUr | | |
| | UrCrUrArCrArGrGrArGrUrCrAr | | | | CrCrUrGrUrGrGrArGrArArGrUr | | |
| | GrGrUrGrCrArCrC*mA*mU*m | | | | CrUrGrCrCrGrU*mU*mA*mC | | |
| | G | | | | | | |
| HBB | mC*mA*mU*rGrGrUrGrCrArCr | 20698 | + | HBB | mG*mU*mA*rArCrGrGrCrArGr | 20788 | + |
| 5_inst | CrUrGrArCrUrCrCrUrGrGrUrUr | | | 8_inst | ArCrUrUrCrUrCrCrUrCrGrUrUr | | |
| _RT1 | UrUrArGrArGrCrUrArGrArArAr | | | _RT1 | UrUrArGrArGrCrUrArGrArArAr | | |
| 2_PB | UrArGrCrArArGrUrUrArArArAr | | | 1_PB | UrArGrCrArArGrUrUrArArArAr | | |
| S16 | UrArArGrGrCrUrArGrUrCrCrGr | | | S16 | UrArArGrGrCrUrArGrUrCrCrGr | | |
| | UrUrArUrCrArArCrUrUrGrArAr | | | | UrUrArUrCrArArCrUrUrGrArAr | | |
| | ArArArGrUrGrGrCrArCrCrGrAr | | | | ArArArGrUrGrGrCrArCrCrGrAr | | |
| | GrUrCrGrGrUrGrCrArCrUrUrCr | | | | GrUrCrGrGrUrGrCrUrGrArCrUr | | |
| | UrCrUrArCrArGrGrArGrUrCrAr | | | | CrCrUrGrUrGrGrArGrArArGrUr | | |
| | GrGrUrGrCrArC*mC*mA*mU | | | | CrUrGrCrCrG*mU*mU*mA | | |
| HBB | mC*mA*mU*rGrGrUrGrCrArCr | 20699 | + | HBB | mG*mU*mA*rArCrGrGrCrArGr | 20789 | + |
| 5_inst | CrUrGrArCrUrCrCrUrGrGrUrUr | | | 8_inst | ArCrUrUrCrUrCrCrUrCrGrUrUr | | |
| _RT1 | UrUrArGrArGrCrUrArGrArArAr | | | _RT1 | UrUrArGrArGrCrUrArGrArArAr | | |
| 2_PB | UrArGrCrArArGrUrUrArArArAr | | | 1_PB | UrArGrCrArArGrUrUrArArArAr | | |
| S15 | UrArArGrGrCrUrArGrUrCrCrGr | | | S15 | UrArArGrGrCrUrArGrUrCrCrGr | | |
| | UrUrArUrCrArArCrUrUrGrArAr | | | | UrUrArUrCrArArCrUrUrGrArAr | | |
| | ArArArGrUrGrGrCrArCrCrGrAr | | | | ArArArGrUrGrGrCrArCrCrGrAr | | |
| | GrUrCrGrGrUrGrCrArCrUrUrCr | | | | GrUrCrGrGrUrGrCrUrGrArCrUr | | |
| | UrCrUrArCrArGrGrArGrUrCrAr | | | | CrCrUrGrUrGrGrArGrArArGrUr | | |
| | GrGrUrGrCrA*mC*mC*mA | | | | CrUrGrCrC*mG*mU*mU | | |
| HBB | mC*mA*mU*rGrGrUrGrCrArCr | 20700 | + | HBB | mG*mU*mA*rArCrGrGrCrArGr | 20790 | + |
| 5_inst | CrUrGrArCrUrCrCrUrGrGrUrUr | | | 8_inst | ArCrUrUrCrUrCrCrUrCrGrUrUr | | |
| _RT1 | UrUrArGrArGrCrUrArGrArArAr | | | _RT1 | UrUrArGrArGrCrUrArGrArArAr | | |
| 2_PB | UrArGrCrArArGrUrUrArArArAr | | | 1_PB | UrArGrCrArArGrUrUrArArArAr | | |
| S14 | UrArArGrGrCrUrArGrUrCrCrGr | | | S14 | UrArArGrGrCrUrArGrUrCrCrGr | | |
| | UrUrArUrCrArArCrUrUrGrArAr | | | | UrUrArUrCrArArCrUrUrGrArAr | | |
| | ArArArGrUrGrGrCrArCrCrGrAr | | | | ArArArGrUrGrGrCrArCrCrGrAr | | |
| | GrUrCrGrGrUrGrCrArCrUrUrCr | | | | GrUrCrGrGrUrGrCrUrGrArCrUr | | |
| | UrCrUrArCrArGrGrArGrUrCrAr | | | | CrCrUrGrUrGrGrArGrArArGrUr | | |
| | GrGrUrGrC*mA*mC*mC | | | | CrUrGrC*mC*mG*mU | | |
| HBB | mC*mA*mU*rGrGrUrGrCrArCr | 20701 | + | HBB | mG*mU*mA*rArCrGrGrCrArGr | 20791 | ++ |
| 5_inst | CrUrGrArCrUrCrCrUrGrGrUrUr | | | 8_inst | ArCrUrUrCrUrCrCrUrCrGrUrUr | | |
| _RT1 | UrUrArGrArGrCrUrArGrArArAr | | | _RT1 | UrUrArGrArGrCrUrArGrArArAr | | |
| 2_PB | UrArGrCrArArGrUrUrArArArAr | | | 1_PB | UrArGrCrArArGrUrUrArArArAr | | |
| S13 | UrArArGrGrCrUrArGrUrCrCrGr | | | S13 | UrArArGrGrCrUrArGrUrCrCrGr | | |
| | UrUrArUrCrArArCrUrUrGrArAr | | | | UrUrArUrCrArArCrUrUrGrArAr | | |
| | ArArArGrUrGrGrCrArCrCrGrAr | | | | ArArArGrUrGrGrCrArCrCrGrAr | | |
| | GrUrCrGrGrUrGrCrArCrUrUrCr | | | | GrUrCrGrGrUrGrCrUrGrArCrUr | | |
| | UrCrUrArCrArGrGrArGrUrCrAr | | | | CrCrUrGrUrGrGrArGrArArGrUr | | |
| | GrGrUrG*mC*mA*mC | | | | CrUrG*mC*mC*mG | | |
| HBB | mC*mA*mU*rGrGrUrGrCrArCr | 20702 | ++ | HBB | mG*mU*mA*rArCrGrGrCrArGr | 20792 | ++ |
| 5_inst | CrUrGrArCrUrCrCrUrGrGrUrUr | | | 8_inst | ArCrUrUrCrUrCrCrUrCrGrUrUr | | |
| _RT1 | UrUrArGrArGrCrUrArGrArArAr | | | _RT1 | UrUrArGrArGrCrUrArGrArArAr | | |
| 2_PB | UrArGrCrArArGrUrUrArArArAr | | | 1_PB | UrArGrCrArArGrUrUrArArArAr | | |
| S12 | UrArArGrGrCrUrArGrUrCrCrGr | | | S12 | UrArArGrGrCrUrArGrUrCrCrGr | | |
| | UrUrArUrCrArArCrUrUrGrArAr | | | | UrUrArUrCrArArCrUrUrGrArAr | | |
| | ArArArGrUrGrGrCrArCrCrGrAr | | | | ArArArGrUrGrGrCrArCrCrGrAr | | |
| | GrUrCrGrGrUrGrCrArCrUrUrCr | | | | GrUrCrGrGrUrGrCrUrGrArCrUr | | |
| | UrCrUrArCrArGrGrArGrUrCrAr | | | | CrCrUrGrUrGrGrArGrArArGrUr | | |
| | GrGrU*mG*mC*mA | | | | CrU*mG*mC*mC | | |
| HBB | mC*mA*mU*rGrGrUrGrCrArCr | 20703 | ++ | HBB | mG*mU*mA*rArCrGrGrCrArGr | 20793 | ++ |
| 5_inst | CrUrGrArCrUrCrCrUrGrGrUrUr | | | 8_inst | ArCrUrUrCrUrCrCrUrCrGrUrUr | | |
| _RT1 | UrUrArGrArGrCrUrArGrArArAr | | | _RT1 | UrUrArGrArGrCrUrArGrArArAr | | |
| 2_PB | UrArGrCrArArGrUrUrArArArAr | | | 1_PB | UrArGrCrArArGrUrUrArArArAr | | |
| S11 | UrArArGrGrCrUrArGrUrCrCrGr | | | S11 | UrArArGrGrCrUrArGrUrCrCrGr | | |
| | UrUrArUrCrArArCrUrUrGrArAr | | | | UrUrArUrCrArArCrUrUrGrArAr | | |
| | ArArArGrUrGrGrCrArCrCrGrAr | | | | ArArArGrUrGrGrCrArCrCrGrAr | | |
| | GrUrCrGrGrUrGrCrArCrUrUrCr | | | | GrUrCrGrGrUrGrCrUrGrArCrUr | | |
| | UrCrUrArCrArGrGrArGrUrCrAr | | | | CrCrUrGrUrGrGrArGrArArGrUr | | |
| | GrG*mU*mG*mC | | | | C*mU*mG*mC | | |
| HBB | mC*mA*mU*rGrGrUrGrCrArCr | 20704 | ++ | HBB | mG*mU*mA*rArCrGrGrCrArGr | 20794 | ++ |
| 5_inst | CrUrGrArCrUrCrCrUrGrGrUrUr | | | 8_inst | ArCrUrUrCrUrCrCrUrCrGrUrUr | | |
| _RT1 | UrUrArGrArGrCrUrArGrArArAr | | | _RT1 | UrUrArGrArGrCrUrArGrArArAr | | |
| 2_PB | UrArGrCrArArGrUrUrArArArAr | | | 1_PB | UrArGrCrArArGrUrUrArArArAr | | |
| S10 | UrArArGrGrCrUrArGrUrCrCrGr | | | S10 | UrArArGrGrCrUrArGrUrCrCrGr | | |
| | UrUrArUrCrArArCrUrUrGrArAr | | | | UrUrArUrCrArArCrUrUrGrArAr | | |
| | ArArArGrUrGrGrCrArCrCrGrAr | | | | ArArArGrUrGrGrCrArCrCrGrAr | | |
| | GrUrCrGrGrUrGrCrArCrUrUrCr | | | | GrUrCrGrGrUrGrCrUrGrArCrUr | | |
| | UrCrUrArCrArGrGrArGrUrCrAr | | | | CrCrUrGrUrGrGrArGrArArGrU | | |
| | G*mG*mU*mG | | | | *mC*mU*mG | | |
| HBB | mC*mA*mU*rGrGrUrGrCrArCr | 20705 | ++ | HBB | mG*mU*mA*rArCrGrGrCrArGr | 20795 | + |
| 5_inst | CrUrGrArCrUrCrCrUrGrGrUrUr | | | 8_inst | ArCrUrUrCrUrCrCrUrCrGrUrUr | | |
| _RT1 | UrUrArGrArGrCrUrArGrArArAr | | | _RT1 | UrUrArGrArGrCrUrArGrArArAr | | |
| 2_PB | UrArGrCrArArGrUrUrArArArAr | | | 1_PB | UrArGrCrArArGrUrUrArArArAr | | |
| S9 | UrArArGrGrCrUrArGrUrCrCrGr | | | S9 | UrArArGrGrCrUrArGrUrCrCrGr | | |
| | UrUrArUrCrArArCrUrUrGrArAr | | | | UrUrArUrCrArArCrUrUrGrArAr | | |
| | ArArArGrUrGrGrCrArCrCrGrAr | | | | ArArArGrUrGrGrCrArCrCrGrAr | | |
| | GrUrCrGrGrUrGrCrArCrUrUrCr | | | | GrUrCrGrGrUrGrCrUrGrArCrUr | | |
| | UrCrUrArCrArGrGrArGrUrCrA* | | | | CrCrUrGrUrGrGrArGrArArG*m | | |
| | mG*mG*mU | | | | U*mC*mU | | |
| HBB | mC*mA*mU*rGrGrUrGrCrArCr | 20706 | ++ | HBB | mG*mU*mA*rArCrGrGrCrArGr | 20796 | + |
| 5_inst | CrUrGrArCrUrCrCrUrGrGrUrUr | | | 8_inst | ArCrUrUrCrUrCrCrUrCrGrUrUr | | |
| _RT1 | UrUrArGrArGrCrUrArGrArArAr | | | _RT1 | UrUrArGrArGrCrUrArGrArArAr | | |
| 2_PB | UrArGrCrArArGrUrUrArArArAr | | | 1_PB | UrArGrCrArArGrUrUrArArArAr | | |
| S8 | UrArArGrGrCrUrArGrUrCrCrGr | | | S8 | UrArArGrGrCrUrArGrUrCrCrGr | | |
| | UrUrArUrCrArArCrUrUrGrArAr | | | | UrUrArUrCrArArCrUrUrGrArAr | | |
| | ArArArGrUrGrGrCrArCrCrGrAr | | | | ArArArGrUrGrGrCrArCrCrGrAr | | |
| | GrUrCrGrGrUrGrCrArCrUrUrCr | | | | GrUrCrGrGrUrGrCrUrGrArCrUr | | |
| | UrCrUrArCrArGrGrArGrUrC*m | | | | CrCrUrGrUrGrGrArGrArA*mG* | | |
| | A*mG*mG | | | | mU*mC | | |
| HBB | mC*mA*mU*rGrGrUrGrCrArCr | 20707 | + | HBB | mG*mU*mA*rArCrGrGrCrArGr | 20797 | + |
| 5_inst | CrUrGrArCrUrCrCrUrGrGrUrUr | | | 8_inst | ArCrUrUrCrUrCrCrUrCrGrUrUr | | |
| _RT1 | UrUrArGrArGrCrUrArGrArArAr | | | _RT1 | UrUrArGrArGrCrUrArGrArArAr | | |
| 0_PB | UrArGrCrArArGrUrUrArArArAr | | | 0_PB | UrArGrCrArArGrUrUrArArArAr | | |
| S17 | UrArArGrGrCrUrArGrUrCrCrGr | | | S17 | UrArArGrGrCrUrArGrUrCrCrGr | | |
| | UrUrArUrCrArArCrUrUrGrArAr | | | | UrUrArUrCrArArCrUrUrGrArAr | | |
| | ArArArGrUrGrGrCrArCrCrGrAr | | | | ArArArGrUrGrGrCrArCrCrGrAr | | |
| | GrUrCrGrGrUrGrCrUrUrCrUrCr | | | | GrUrCrGrGrUrGrCrGrArCrUrCr | | |
| | UrArCrArGrGrArGrUrCrArGrGr | | | | CrUrGrUrGrGrArGrArArGrUrCr | | |
| | UrGrCrArCrC*mA*mU*mG | | | | UrGrCrCrGrU*mU*mA*mC | | |
| HBB | mC*mA*mU*rGrGrUrGrCrArCr | 20708 | + | HBB | mG*mU*mA*rArCrGrGrCrArGr | 20798 | + |
| 5_inst | CrUrGrArCrUrCrCrUrGrGrUrUr | | | 8_inst | ArCrUrUrCrUrCrCrUrCrGrUrUr | | |
| _RT1 | UrUrArGrArGrCrUrArGrArArAr | | | _RT1 | UrUrArGrArGrCrUrArGrArArAr | | |
| 0_PB | UrArGrCrArArGrUrUrArArArAr | | | 0_PB | UrArGrCrArArGrUrUrArArArAr | | |
| S16 | UrArArGrGrCrUrArGrUrCrCrGr | | | S16 | UrArArGrGrCrUrArGrUrCrCrGr | | |
| | UrUrArUrCrArArCrUrUrGrArAr | | | | UrUrArUrCrArArCrUrUrGrArAr | | |
| | ArArArGrUrGrGrCrArCrCrGrAr | | | | ArArArGrUrGrGrCrArCrCrGrAr | | |
| | GrUrCrGrGrUrGrCrUrUrCrUrCr | | | | GrUrCrGrGrUrGrCrGrArCrUrCr | | |
| | UrArCrArGrGrArGrUrCrArGrGr | | | | CrUrGrUrGrGrArGrArArGrUrCr | | |
| | UrGrCrArC*mC*mA*mU | | | | UrGrCrCrG*mU*mU*mA | | |
| HBB | mC*mA*mU*rGrGrUrGrCrArCr | 20709 | + | HBB | mG*mU*mA*rArCrGrGrCrArGr | 20799 | + |
| 5_inst | CrUrGrArCrUrCrCrUrGrGrUrUr | | | 8_inst | ArCrUrUrCrUrCrCrUrCrGrUrUr | | |
| _RT1 | UrUrArGrArGrCrUrArGrArArAr | | | _RT1 | UrUrArGrArGrCrUrArGrArArAr | | |
| 0_PB | UrArGrCrArArGrUrUrArArArAr | | | 0_PB | UrArGrCrArArGrUrUrArArArAr | | |
| S15 | UrArArGrGrCrUrArGrUrCrCrGr | | | S15 | UrArArGrGrCrUrArGrUrCrCrGr | | |
| | UrUrArUrCrArArCrUrUrGrArAr | | | | UrUrArUrCrArArCrUrUrGrArAr | | |
| | ArArArGrUrGrGrCrArCrCrGrAr | | | | ArArArGrUrGrGrCrArCrCrGrAr | | |
| | GrUrCrGrGrUrGrCrUrUrCrUrCr | | | | GrUrCrGrGrUrGrCrGrArCrUrCr | | |
| | UrArCrArGrGrArGrUrCrArGrGr | | | | CrUrGrUrGrGrArGrArArGrUrCr | | |
| | UrGrCrA*mC*mC*mA | | | | UrGrCrC*mG*mU*mU | | |
| HBB | mC*mA*mU*rGrGrUrGrCrArCr | 20710 | + | HBB | mG*mU*mA*rArCrGrGrCrArGr | 20800 | + |
| 5_inst | CrUrGrArCrUrCrCrUrGrGrUrUr | | | 8_inst | ArCrUrUrCrUrCrCrUrCrGrUrUr | | |
| _RT1 | UrUrArGrArGrCrUrArGrArArAr | | | RT | UrUrArGrArGrCrUrArGrArArAr | | |
| 0_PB | UrArGrCrArArGrUrUrArArArAr | | | 0_PB | UrArGrCrArArGrUrUrArArArAr | | |
| S14 | UrArArGrGrCrUrArGrUrCrCrGr | | | S14 | UrArArGrGrCrUrArGrUrCrCrGr | | |
| | UrUrArUrCrArArCrUrUrGrArAr | | | | UrUrArUrCrArArCrUrUrGrArAr | | |
| | ArArArGrUrGrGrCrArCrCrGrAr | | | | ArArArGrUrGrGrCrArCrCrGrAr | | |
| | GrUrCrGrGrUrGrCrUrUrCrUrCr | | | | GrUrCrGrGrUrGrCrGrArCrUrCr | | |
| | UrArCrArGrGrArGrUrCrArGrGr | | | | CrUrGrUrGrGrArGrArArGrUrCr | | |
| | UrGrC*mA*mC*mC | | | | UrGrC*mC*mG*mU | | |
| HBB | mC*mA*mU*rGrGrUrGrCrArCr | 20711 | + | HBB | mG*mU*mA*rArCrGrGrCrArGr | 20801 | ++ |
| 5_inst | CrUrGrArCrUrCrCrUrGrGrUrUr | | | 8_inst | ArCrUrUrCrUrCrCrUrCrGrUrUr | | |
| _RT1 | UrUrArGrArGrCrUrArGrArArAr | | | _RT1 | UrUrArGrArGrCrUrArGrArArAr | | |
| 0_PB | UrArGrCrArArGrUrUrArArArAr | | | 0_PB | UrArGrCrArArGrUrUrArArArAr | | |
| S13 | UrArArGrGrCrUrArGrUrCrCrGr | | | S13 | UrArArGrGrCrUrArGrUrCrCrGr | | |
| | UrUrArUrCrArArCrUrUrGrArAr | | | | UrUrArUrCrArArCrUrUrGrArAr | | |
| | ArArArGrUrGrGrCrArCrCrGrAr | | | | ArArArGrUrGrGrCrArCrCrGrAr | | |
| | GrUrCrGrGrUrGrCrUrUrCrUrCr | | | | GrUrCrGrGrUrGrCrGrArCrUrCr | | |
| | UrArCrArGrGrArGrUrCrArGrGr | | | | CrUrGrUrGrGrArGrArArGrUrCr | | |
| | UrG*mC*mA*mC | | | | UrG*mC*mC*mG | | |
| HBB | mC*mA*mU*rGrGrUrGrCrArCr | 20712 | + | HBB | mG*mU*mA*rArCrGrGrCrArGr | 20802 | + |
| 5_inst | CrUrGrArCrUrCrCrUrGrGrUrUr | | | 8_inst | ArCrUrUrCrUrCrCrUrCrGrUrUr | | |
| _RT1 | UrUrArGrArGrCrUrArGrArArAr | | | _RT1 | UrUrArGrArGrCrUrArGrArArAr | | |
| 0_PB | UrArGrCrArArGrUrUrArArArAr | | | 0_PB | UrArGrCrArArGrUrUrArArArAr | | |
| S12 | UrArArGrGrCrUrArGrUrCrCrGr | | | S12 | UrArArGrGrCrUrArGrUrCrCrGr | | |
| | UrUrArUrCrArArCrUrUrGrArAr | | | | UrUrArUrCrArArCrUrUrGrArAr | | |
| | ArArArGrUrGrGrCrArCrCrGrAr | | | | ArArArGrUrGrGrCrArCrCrGrAr | | |
| | GrUrCrGrGrUrGrCrUrUrCrUrCr | | | | GrUrCrGrGrUrGrCrGrArCrUrCr | | |
| | UrArCrArGrGrArGrUrCrArGrGr | | | | CrUrGrUrGrGrArGrArArGrUrCr | | |
| | U*mG*mC*mA | | | | U*mG*mC*mC | | |
| HBB | mC*mA*mU*rGrGrUrGrCrArCr | 20713 | + | HBB | mG*mU*mA*rArCrGrGrCrArGr | 20803 | + |
| 5_inst | CrUrGrArCrUrCrCrUrGrGrUrUr | | | 8_inst | ArCrUrUrCrUrCrCrUrCrGrUrUr | | |
| _RT1 | UrUrArGrArGrCrUrArGrArArAr | | | _RT1 | UrUrArGrArGrCrUrArGrArArAr | | |
| 0_PB | UrArGrCrArArGrUrUrArArArAr | | | 0_PB | UrArGrCrArArGrUrUrArArArAr | | |
| S11 | UrArArGrGrCrUrArGrUrCrCrGr | | | S11 | UrArArGrGrCrUrArGrUrCrCrGr | | |
| | UrUrArUrCrArArCrUrUrGrArAr | | | | UrUrArUrCrArArCrUrUrGrArAr | | |
| | ArArArGrUrGrGrCrArCrCrGrAr | | | | ArArArGrUrGrGrCrArCrCrGrAr | | |
| | GrUrCrGrGrUrGrCrUrUrCrUrCr | | | | GrUrCrGrGrUrGrCrGrArCrUrCr | | |
| | UrArCrArGrGrArGrUrCrArGrG | | | | CrUrGrUrGrGrArGrArArGrUrC | | |
| | *mU*mG*mC | | | | *mU*mG*mC | | |
| HBB | mC*mA*mU*rGrGrUrGrCrArCr | 20714 | + | HBB | mG*mU*mA*rArCrGrGrCrArGr | 20804 | + |
| 5_inst | CrUrGrArCrUrCrCrUrGrGrUrUr | | | 8_inst | ArCrUrUrCrUrCrCrUrCrGrUrUr | | |
| _RT1 | UrUrArGrArGrCrUrArGrArArAr | | | _RT1 | UrUrArGrArGrCrUrArGrArArAr | | |
| 0_PB | UrArGrCrArArGrUrUrArArArAr | | | 0_PB | UrArGrCrArArGrUrUrArArArAr | | |
| S10 | UrArArGrGrCrUrArGrUrCrCrGr | | | S10 | UrArArGrGrCrUrArGrUrCrCrGr | | |
| | UrUrArUrCrArArCrUrUrGrArAr | | | | UrUrArUrCrArArCrUrUrGrArAr | | |
| | ArArArGrUrGrGrCrArCrCrGrAr | | | | ArArArGrUrGrGrCrArCrCrGrAr | | |
| | GrUrCrGrGrUrGrCrUrUrCrUrCr | | | | GrUrCrGrGrUrGrCrGrArCrUrCr | | |
| | UrArCrArGrGrArGrUrCrArG*m | | | | CrUrGrUrGrGrArGrArArGrU*m | | |
| | G*mU*mG | | | | C*mU*mG | | |
| HBB | mC*mA*mU*rGrGrUrGrCrArCr | 20715 | + | HBB | mG*mU*mA*rArCrGrGrCrArGr | 20805 | + |
| 5_inst | CrUrGrArCrUrCrCrUrGrGrUrUr | | | 8_inst | ArCrUrUrCrUrCrCrUrCrGrUrUr | | |
| _RT1 | UrUrArGrArGrCrUrArGrArArAr | | | _RT1 | UrUrArGrArGrCrUrArGrArArAr | | |
| 0_PB | UrArGrCrArArGrUrUrArArArAr | | | 0_PB | UrArGrCrArArGrUrUrArArArAr | | |
| S9 | UrArArGrGrCrUrArGrUrCrCrGr | | | S9 | UrArArGrGrCrUrArGrUrCrCrGr | | |
| | UrUrArUrCrArArCrUrUrGrArAr | | | | UrUrArUrCrArArCrUrUrGrArAr | | |
| | ArArArGrUrGrGrCrArCrCrGrAr | | | | ArArArGrUrGrGrCrArCrCrGrAr | | |
| | GrUrCrGrGrUrGrCrUrUrCrUrCr | | | | GrUrCrGrGrUrGrCrGrArCrUrCr | | |
| | UrArCrArGrGrArGrUrCrA*mG* | | | | CrUrGrUrGrGrArGrArArG*mU* | | |
| | mG*mU | | | | mC*mU | | |
| HBB | mC*mA*mU*rGrGrUrGrCrArCr | 20716 | + | HBB | mG*mU*mA*rArCrGrGrCrArGr | 20806 | + |
| 5_inst | CrUrGrArCrUrCrCrUrGrGrUrUr | | | 8_inst | ArCrUrUrCrUrCrCrUrCrGrUrUr | | |
| _RT1 | UrUrArGrArGrCrUrArGrArArAr | | | _RT1 | UrUrArGrArGrCrUrArGrArArAr | | |
| 0_PB | UrArGrCrArArGrUrUrArArArAr | | | 0_PB | UrArGrCrArArGrUrUrArArArAr | | |
| S8 | UrArArGrGrCrUrArGrUrCrCrGr | | | S8 | UrArArGrGrCrUrArGrUrCrCrGr | | |
| | UrUrArUrCrArArCrUrUrGrArAr | | | | UrUrArUrCrArArCrUrUrGrArAr | | |
| | ArArArGrUrGrGrCrArCrCrGrAr | | | | ArArArGrUrGrGrCrArCrCrGrAr | | |
| | GrUrCrGrGrUrGrCrUrUrCrUrCr | | | | GrUrCrGrGrUrGrCrGrArCrUrCr | | |
| | UrArCrArGrGrArGrUrC*mA*m | | | | CrUrGrUrGrGrArGrArA*mG*m | | |
| | G*mG | | | | U*mC | | |
| HBB | mC*mA*mU*rGrGrUrGrCrArCr | 20717 | + | HBB | mG*mU*mA*rArCrGrGrCrArGr | 20807 | + |
| 5_inst | CrUrGrArCrUrCrCrUrGrGrUrUr | | | 8_inst | ArCrUrUrCrUrCrCrUrCrGrUrUr | | |
| _RT9 | UrUrArGrArGrCrUrArGrArArAr | | | _RT9 | UrUrArGrArGrCrUrArGrArArAr | | |
| _PBS | UrArGrCrArArGrUrUrArArArAr | | | _PBS | UrArGrCrArArGrUrUrArArArAr | | |
| 17 | UrArArGrGrCrUrArGrUrCrCrGr | | | 17 | UrArArGrGrCrUrArGrUrCrCrGr | | |
| | UrUrArUrCrArArCrUrUrGrArAr | | | | UrUrArUrCrArArCrUrUrGrArAr | | |
| | ArArArGrUrGrGrCrArCrCrGrAr | | | | ArArArGrUrGrGrCrArCrCrGrAr | | |
| | GrUrCrGrGrUrGrCrUrCrUrCrUr | | | | GrUrCrGrGrUrGrCrArCrUrCrCr | | |
| | ArCrArGrGrArGrUrCrArGrGrUr | | | | UrGrUrGrGrArGrArArGrUrCrUr | | |
| | GrCrArCrC*mA*mU*mG | | | | GrCrCrGrU*mU*mA*mC | | |
| HBB | mC*mA*mU*rGrGrUrGrCrArCr | 20718 | + | HBB | mG*mU*mA*rArCrGrGrCrArGr | 20808 | + |
| 5_inst | CrUrGrArCrUrCrCrUrGrGrUrUr | | | 8_inst | ArCrUrUrCrUrCrCrUrCrGrUrUr | | |
| _RT9 | UrUrArGrArGrCrUrArGrArArAr | | | _RT9 | UrUrArGrArGrCrUrArGrArArAr | | |
| _PBS | UrArGrCrArArGrUrUrArArArAr | | | _PBS | UrArGrCrArArGrUrUrArArArAr | | |
| 16 | UrArArGrGrCrUrArGrUrCrCrGr | | | 16 | UrArArGrGrCrUrArGrUrCrCrGr | | |
| | UrUrArUrCrArArCrUrUrGrArAr | | | | UrUrArUrCrArArCrUrUrGrArAr | | |
| | ArArArGrUrGrGrCrArCrCrGrAr | | | | ArArArGrUrGrGrCrArCrCrGrAr | | |
| | GrUrCrGrGrUrGrCrUrCrUrCrUr | | | | GrUrCrGrGrUrGrCrArCrUrCrCr | | |
| | ArCrArGrGrArGrUrCrArGrGrUr | | | | UrGrUrGrGrArGrArArGrUrCrUr | | |
| | GrCrArC*mC*mA*mU | | | | GrCrCrG*mU*mU*mA | | |
| HBB | mC*mA*mU*rGrGrUrGrCrArCr | 20719 | + | HBB | mG*mU*mA*rArCrGrGrCrArGr | 20809 | + |
| 5_inst | CrUrGrArCrUrCrCrUrGrGrUrUr | | | 8_inst | ArCrUrUrCrUrCrCrUrCrGrUrUr | | |
| _RT9 | UrUrArGrArGrCrUrArGrArArAr | | | _RT9 | UrUrArGrArGrCrUrArGrArArAr | | |
| _PBS | UrArGrCrArArGrUrUrArArArAr | | | _PBS | UrArGrCrArArGrUrUrArArArAr | | |
| 15 | UrArArGrGrCrUrArGrUrCrCrGr | | | 15 | UrArArGrGrCrUrArGrUrCrCrGr | | |
| | UrUrArUrCrArArCrUrUrGrArAr | | | | UrUrArUrCrArArCrUrUrGrArAr | | |
| | ArArArGrUrGrGrCrArCrCrGrAr | | | | ArArArGrUrGrGrCrArCrCrGrAr | | |
| | GrUrCrGrGrUrGrCrUrCrUrCrUr | | | | GrUrCrGrGrUrGrCrArCrUrCrCr | | |
| | ArCrArGrGrArGrUrCrArGrGrUr | | | | UrGrUrGrGrArGrArArGrUrCrUr | | |
| | GrCrA*mC*mC*mA | | | | GrCrC*mG*mU*mU | | |
| HBB | mC*mA*mU*rGrGrUrGrCrArCr | 20720 | + | HBB | mG*mU*mA*rArCrGrGrCrArGr | 20810 | + |
| 5_inst | CrUrGrArCrUrCrCrUrGrGrUrUr | | | 8_inst | ArCrUrUrCrUrCrCrUrCrGrUrUr | | |
| _RT9 | UrUrArGrArGrCrUrArGrArArAr | | | _RT9 | UrUrArGrArGrCrUrArGrArArAr | | |
| _PBS | UrArGrCrArArGrUrUrArArArAr | | | _PBS | UrArGrCrArArGrUrUrArArArAr | | |
| 14 | UrArArGrGrCrUrArGrUrCrCrGr | | | 14 | UrArArGrGrCrUrArGrUrCrCrGr | | |
| | UrUrArUrCrArArCrUrUrGrArAr | | | | UrUrArUrCrArArCrUrUrGrArAr | | |
| | ArArArGrUrGrGrCrArCrCrGrAr | | | | ArArArGrUrGrGrCrArCrCrGrAr | | |
| | GrUrCrGrGrUrGrCrUrCrUrCrUr | | | | GrUrCrGrGrUrGrCrArCrUrCrCr | | |
| | ArCrArGrGrArGrUrCrArGrGrUr | | | | UrGrUrGrGrArGrArArGrUrCrUr | | |
| | GrC*mA*mC*mC | | | | GrC*mC*mG*mU | | |
| HBB | mC*mA*mU*rGrGrUrGrCrArCr | 20721 | + | HBB | mG*mU*mA*rArCrGrGrCrArGr | 20811 | + |
| 5_inst | CrUrGrArCrUrCrCrUrGrGrUrUr | | | 8_inst | ArCrUrUrCrUrCrCrUrCrGrUrUr | | |
| _RT9 | UrUrArGrArGrCrUrArGrArArAr | | | _RT9 | UrUrArGrArGrCrUrArGrArArAr | | |
| _PBS | UrArGrCrArArGrUrUrArArArAr | | | _PBS | UrArGrCrArArGrUrUrArArArAr | | |
| 13 | UrArArGrGrCrUrArGrUrCrCrGr | | | 13 | UrArArGrGrCrUrArGrUrCrCrGr | | |
| | UrUrArUrCrArArCrUrUrGrArAr | | | | UrUrArUrCrArArCrUrUrGrArAr | | |
| | ArArArGrUrGrGrCrArCrCrGrAr | | | | ArArArGrUrGrGrCrArCrCrGrAr | | |
| | GrUrCrGrGrUrGrCrUrCrUrCrUr | | | | GrUrCrGrGrUrGrCrArCrUrCrCr | | |
| | ArCrArGrGrArGrUrCrArGrGrUr | | | | UrGrUrGrGrArGrArArGrUrCrUr | | |
| | G*mC*mA*mC | | | | G*mC*mC*mG | | |
| HBB | mC*mA*mU*rGrGrUrGrCrArCr | 20722 | + | HBB | mG*mU*mA*rArCrGrGrCrArGr | 20812 | + |
| 5_inst | CrUrGrArCrUrCrCrUrGrGrUrUr | | | 8_inst | ArCrUrUrCrUrCrCrUrCrGrUrUr | | |
| _RT9 | UrUrArGrArGrCrUrArGrArArAr | | | _RT9 | UrUrArGrArGrCrUrArGrArArAr | | |
| _PBS | UrArGrCrArArGrUrUrArArArAr | | | _PBS | UrArGrCrArArGrUrUrArArArAr | | |
| 12 | UrArArGrGrCrUrArGrUrCrCrGr | | | 12 | UrArArGrGrCrUrArGrUrCrCrGr | | |
| | UrUrArUrCrArArCrUrUrGrArAr | | | | UrUrArUrCrArArCrUrUrGrArAr | | |
| | ArArArGrUrGrGrCrArCrCrGrAr | | | | ArArArGrUrGrGrCrArCrCrGrAr | | |
| | GrUrCrGrGrUrGrCrUrCrUrCrUr | | | | GrUrCrGrGrUrGrCrArCrUrCrCr | | |
| | ArCrArGrGrArGrUrCrArGrGrU | | | | UrGrUrGrGrArGrArArGrUrCrU | | |
| | *mG*mC*mA | | | | *mG*mC*mC | | |
| HBB | mC*mA*mU*rGrGrUrGrCrArCr | 20723 | + | HBB | mG*mU*mA*rArCrGrGrCrArGr | 20813 | + |
| 5_inst | CrUrGrArCrUrCrCrUrGrGrUrUr | | | 8_inst | ArCrUrUrCrUrCrCrUrCrGrUrUr | | |
| _RT9 | UrUrArGrArGrCrUrArGrArArAr | | | _RT9 | UrUrArGrArGrCrUrArGrArArAr | | |
| _PBS | UrArGrCrArArGrUrUrArArArAr | | | _PBS | UrArGrCrArArGrUrUrArArArAr | | |
| 11 | UrArArGrGrCrUrArGrUrCrCrGr | | | 11 | UrArArGrGrCrUrArGrUrCrCrGr | | |
| | UrUrArUrCrArArCrUrUrGrArAr | | | | UrUrArUrCrArArCrUrUrGrArAr | | |
| | ArArArGrUrGrGrCrArCrCrGrAr | | | | ArArArGrUrGrGrCrArCrCrGrAr | | |
| | GrUrCrGrGrUrGrCrUrCrUrCrUr | | | | GrUrCrGrGrUrGrCrArCrUrCrCr | | |
| | ArCrArGrGrArGrUrCrArGrG*m | | | | UrGrUrGrGrArGrArArGrUrC*m | | |
| | U*mG*mC | | | | U*mG*mC | | |
| HBB | mC*mA*mU*rGrGrUrGrCrArCr | 20724 | + | HBB | mG*mU*mA*rArCrGrGrCrArGr | 20814 | |
| 5_inst | CrUrGrArCrUrCrCrUrGrGrUrUr | | | 8_inst | ArCrUrUrCrUrCrCrUrCrGrUrUr | | |
| _RT9 | UrUrArGrArGrCrUrArGrArArAr | | | _RT9 | UrUrArGrArGrCrUrArGrArArAr | | |
| _PBS | UrArGrCrArArGrUrUrArArArAr | | | _PBS | UrArGrCrArArGrUrUrArArArAr | | |
| 10 | UrArArGrGrCrUrArGrUrCrCrGr | | | 10 | UrArArGrGrCrUrArGrUrCrCrGr | | |
| | UrUrArUrCrArArCrUrUrGrArAr | | | | UrUrArUrCrArArCrUrUrGrArAr | | |
| | ArArArGrUrGrGrCrArCrCrGrAr | | | | ArArArGrUrGrGrCrArCrCrGrAr | | |
| | GrUrCrGrGrUrGrCrUrCrUrCrUr | | | | GrUrCrGrGrUrGrCrArCrUrCrCr | | |
| | ArCrArGrGrArGrUrCrArG*mG* | | | | UrGrUrGrGrArGrArArGrU*mC* | | |
| | mU*mG | | | | mU*mG | | |
| HBB | mC*mA*mU*rGrGrUrGrCrArCr | 20725 | + | HBB | mG*mU*mA*rArCrGrGrCrArGr | 20815 | + |
| 5_inst | CrUrGrArCrUrCrCrUrGrGrUrUr | | | 8_inst | ArCrUrUrCrUrCrCrUrCrGrUrUr | | |
| _RT9 | UrUrArGrArGrCrUrArGrArArAr | | | _RT9 | UrUrArGrArGrCrUrArGrArArAr | | |
| _PBS | UrArGrCrArArGrUrUrArArArAr | | | _PBS | UrArGrCrArArGrUrUrArArArAr | | |
| 9 | UrArArGrGrCrUrArGrUrCrCrGr | | | 9 | UrArArGrGrCrUrArGrUrCrCrGr | | |
| | UrUrArUrCrArArCrUrUrGrArAr | | | | UrUrArUrCrArArCrUrUrGrArAr | | |
| | ArArArGrUrGrGrCrArCrCrGrAr | | | | ArArArGrUrGrGrCrArCrCrGrAr | | |
| | GrUrCrGrGrUrGrCrUrCrUrCrUr | | | | GrUrCrGrGrUrGrCrArCrUrCrCr | | |
| | ArCrArGrGrArGrUrCrA*mG*m | | | | UrGrUrGrGrArGrArArG*mU*m | | |
| | G*mU | | | | C*mU | | |
| HBB | mC*mA*mU*rGrGrUrGrCrArCr | 20726 | + | HBB | mG*mU*mA*rArCrGrGrCrArGr | 20816 | + |
| 5_inst | CrUrGrArCrUrCrCrUrGrGrUrUr | | | 8_inst | ArCrUrUrCrUrCrCrUrCrGrUrUr | | |
| _RT9 | UrUrArGrArGrCrUrArGrArArAr | | | _RT9 | UrUrArGrArGrCrUrArGrArArAr | | |
| _PBS | UrArGrCrArArGrUrUrArArArAr | | | _PBS | UrArGrCrArArGrUrUrArArArAr | | |
| 8 | UrArArGrGrCrUrArGrUrCrCrGr | | | 8 | UrArArGrGrCrUrArGrUrCrCrGr | | |
| | UrUrArUrCrArArCrUrUrGrArAr | | | | UrUrArUrCrArArCrUrUrGrArAr | | |
| | ArArArGrUrGrGrCrArCrCrGrAr | | | | ArArArGrUrGrGrCrArCrCrGrAr | | |
| | GrUrCrGrGrUrGrCrUrCrUrCrUr | | | | GrUrCrGrGrUrGrCrArCrUrCrCr | | |
| | ArCrArGrGrArGrUrC*mA*mG* | | | | UrGrUrGrGrArGrArA*mG*mU* | | |
| | mG | | | | mC | | |

### Example 4: Screening Configurations of Template RNAs that Correct the SCD Mutation in a Genomic Landing Pad in Human Cells

[0902] This example describes the use of gene modifying system containing a gene modifying polypeptide and template RNAs comprising varied lengths of heterologous object sequences and PBS sequences to identify favorable configurations for correction of the SCD mutation. In this example, a template RNA contains:
[0903] (1) a gRNA spacer;
[0904] (2) a gRNA scaffold;
[0905] (3) a heterologous object sequence; and
[0906] (4) a primer binding site (PBS) sequence.

[0907] The template RNAs were designed to contain 8-17 nt PBS sequences and 9-20 nt heterologous object sequences (Tables A and B). Two different gRNA spacer sequences, designated HBB5 (see Table A) and HBB8 (see Table B), were used to target sites proximal to the SCD mutation in the custom genomic landing pad in human cells. The heterologous object sequences and PBS sequences were designed to correct the SCD mutation in the landing pad by replacing a “T” nucleotide with an “A” nucleotide at the mutation site using a gene modifying system described herein.

[0908] A cell line was created to have a “landing pad” or a stable integration that mimic a region of the HBB gene that contains sequences flanking the SCD mutation site. The DNA for the landing pad was chemically synthesized and cloned into the pLenti-N-tGFP vector. The cloned landing pad into the lentiviral expression vector was confirmed and the sequence was verified by Sanger sequencing of the landing pad. The sequence verified plasmids (9 ug) along with the lentiviral packaging mix (9 ug, obtained from Biosettia) were transfected using Lipofectamine2000TM according to the manufacturer instructions into a packaging cell line, LentiX-293T (Takara Bio). The transfected cells were incubated at 37° C., 5% CO₂ for 48 hours (including one medium change at 24 hrs) and the viral particle containing medium was collected from the cell culture dish. The collected medium was filtered through a 0.2 μm filter to remove cell debris and prepared for transduction of HEK293T cells. The virus-containing medium was diluted in DMEM and mixed with polybrene to prepare a dilution series for transduction of HEK293T cells where the final concentration of polybrene was 8 ug/ml. The HEK293T cells were grown in viral containing medium for 48 hour and then split with fresh medium. The split cells were grown to confluence and transduction efficiency of the different dilutions of virus were measured by GFP expression via flow cytometry and ddPCR detection of the genomic integrated lentivirus that contained GFP and the HBB landing pads.

[0909] A gene modifying system comprising a gene modifying polypeptide (see Table C) and a template RNA was transfected into the HEK293T landing pad cell line. The gene modifying polypeptide and the template RNAs were delivered by nucleofection in RNA format. Specifically, 1 μg of gene modifying polypeptide mRNA was combined with 10 μM template RNAs. The mRNA and template RNAs were added to 25 μL SF buffer containing 250,000 HEK293T landing pad cells and cells were nucleofected using program DS-150. After nucleofection, cells were grown at 37° C., 5% CO₂ for 3 days prior to cell lysis and genomic DNA extraction. To analyze gene editing activity, primers flanking the HBB genomic target site were used to amplify across the locus. Amplicons are analyzed via short read sequencing using an Illumina MiSeq. Gene editing activity with high editing efficiency was detected in the configurations with 9-12nt PBS sequence and 12-14 nt heterologous object sequence, and is shown in Tables A and B. In particular, in Tables A and B, “+” indicates an editing frequency of <3%, “++” indicates an editing frequency of 3-7%, and “+++” indicates an editing frequency of >=7%.

[0910] It is understood that the template RNA sequences shown in Tables A and may be customized depending on the cell being targeted. For example, HEK293T cells have a SNP in the HBB gene (NC_000011.10: g.5227013A>G (T>C in HBB coding strand) relative to human hg38 reference genome), and thus the template RNA sequences shown in Tables A and B are suitable for use in a cell with that SNP. Template RNAs suitable for use in a cell with a different sequence at that SNP position (“no SNP”) may utilize the sequences below, wherein capital letters indicate core sequences and lower case letters indicate flanking sequences, and underlining indicates the mutation region. Similarly, in some embodiments it is desired to inactive a PAM sequence upon editing (“PAM-kill”) and in other embodiments it is preferred to leave the PAM sequence intact (no PAM-kill). The RT template can be designed as a “PAM-kill” or “no PAM-kill” version, for example, as shown below.

HBB5 Spacer (no SNP):
(SEQ ID NO: 21668)
CATGGTGCATCTGACTCCTG
HBB5_PBS (no SNP):
(SEQ ID NO: 21669)
GAGTCAGAtgcaccatg
HBB5 RT template (no PAM-kill):
(SEQ ID NO: 21670)
aacggcagactTCTCGTCAG
HBB8 RT template (no SNP):
(SEQ ID NO: 21671)
tggtgcatctgACTCCTGAG

TABLE A
HBB5 Sequences. The columns indicate, from left to right:
1) Name of the template RNA, 2) gRNA spacer sequence of the template RNA, which contains a SNP relative to hg38 that is
present in HEK293T cells, 3) SpCas9 gRNA scaffold sequence of the template RNA, 4) PBS sequence of the template RNA, which
contains a SNP relative to hg38 that is present in HEK293T cells, 5) RT template sequence of the template RNA, wherein the
PAM-kill mutation is bolded and the mutation region is underlined, 6) full template RNA sequence comprising HEK293T SNP and
PAM-kill edit, 7) Full template RNA sequence depicted as RNA corresponding to column 6, further showing chemical modifications
as used in Example 4, 8) alternative template RNA sequence designed relative to hg38 reference genome (lacking HEK293T SNP)
and comprising PAM-kill edit, 9) alternative template RNA sequence designed relative to hg38 reference genome
(lacking HEK293T SNP) and lacking PAM-kill edit and 10) observed activity
of template RNA of column 7 as defined in Example 4.

| | | | | | | | RT | | | | Template | | Template | | Template | | |
|---|---|---|---|---|---|---|---|---|---|---|---|---|---|---|---|---|---|
| | | | | | | | Template: | | Template | | Sequence | | Sequence | | Sequence | | |
| | | SEQ | gRNA | SEQ | | SEQ | (PAM- | SEQ | Sequence | SEQ | (+SNP | SEQ | (no SNP | SEQ | (no SNP | SEQ | Ac- |
| | | ID | Scaf- | ID | | ID | kill; | ID | (+SNP | ID | +PAM-kill) | ID | +PAM | ID | no PAM- | ID | tiv- |
| Name | Spacer | NO | fold | NO | PBS | NO | Correction) | NO | +PAM-kill) | NO | (RNA) | NO | -kill) | NO | kill) | NO | ity |
| HBB | CAT | 19251 | GTTT | 19341 | GAGT | 19431 | AACGG | 19521 | CATGGTGCACCT | 19611 | mC*mA*mU*rGrGr | 19701 | CATGGTG | 19791 | CATGG | 19881 | ++ |
| 5_RT | GG | | TAGA | | CAGG | | CAGAC | | GACTCCTGGTTT | | UrGrCrArCrCrUrGr | | CATCTGA | | TGCAT | | |
| 20_P | TGC | | GCTA | | TGCA | | TTCTC | | TAGAGCTAGAAA | | ArCrUrCrCrUrGrGr | | CTCCTGG | | CTGAC | | |
| BS17 | AC | | GAA | | CCAT | | TTCAG | | TAGCAAGTTAAA | | UrUrUrUrArGrArGr | | TTTTAGA | | TCCTG | | |
| | CTG | | ATAG | | G | | | | ATAAGGCTAGTC | | CrUrArGrArArArUr | | GCTAGA | | GTTTT | | |
| | ACT | | CAA | | | | | | CGTTATCAACTT | | ArGrCrArArGrUrUr | | AATAGC | | AGAGC | | |
| | CCT | | GTTA | | | | | | GAAAAAGTGGC | | ArArArArUrArArGr | | AAGTTA | | TAGAA | | |
| | G | | AAAT | | | | | | ACCGAGTCGGTG | | GrCrUrArGrUrCrCr | | AAATAA | | ATAGC | | |
| | | | AAG | | | | | | CAACGGCAGACT | | GrUrUrArUrCrArAr | | GGCTAGT | | AAGTT | | |
| | | | GCTA | | | | | | TCTCTTCAGGAG | | CrUrUrGrArArArAr | | CCGTTAT | | AAAAT | | |
| | | | GTCC | | | | | | TCAGGTGCACCA | | ArGrUrGrGrCrArCr | | CAACTTG | | AAGGC | | |
| | | | GTTA | | | | | | TG | | CrGrArGrUrCrGrGr | | AAAAAG | | TAGTC | | |
| | | | TCAA | | | | | | | | UrGrCrArArCrGrGr | | TGGCACC | | CGTTA | | |
| | | | CTTG | | | | | | | | CrArGrArCrUrUrCr | | GAGTCG | | TCAAC | | |
| | | | AAA | | | | | | | | UrCrUrUrCrArGrGr | | GTGCAA | | TTGAA | | |
| | | | AAGT | | | | | | | | ArGrUrCrArGrGrUr | | CGGCAG | | AAAGT | | |
| | | | GGC | | | | | | | | GrCrArCrC*mA*mU | | ACTTCTC | | GGCAC | | |
| | | | ACCG | | | | | | | | *mG | | TTCAGGA | | CGAGT | | |
| | | | AGTC | | | | | | | | | | GTCAGAT | | CGGTG | | |
| | | | GGTG | | | | | | | | | | GCACCAT | | CAACG | | |
| | | | C | | | | | | | | | | G | | GCAGA | | |
| | | | | | | | | | | | | | | | CTTCTC | | |
| | | | | | | | | | | | | | | | GTCAG | | |
| | | | | | | | | | | | | | | | GAGTC | | |
| | | | | | | | | | | | | | | | AGATG | | |
| | | | | | | | | | | | | | | | CACCA | | |
| | | | | | | | | | | | | | | | TG | | |
| HBB | CAT | 19252 | GTTT | 19342 | GAGT | 19432 | AACGG | 19522 | CATGGTGCACCT | 19612 | mC*mA*mU*rGrGr | 19702 | CATGGTG | 19792 | CATGG | 19882 | +++ |
| 5_RT | GG | | TAGA | | CAGG | | CAGAC | | GACTCCTGGTTT | | UrGrCrArCrCrUrGr | | CATCTGA | | TGCAT | | |
| 20_P | TGC | | GCTA | | TGCA | | TTCTC | | TAGAGCTAGAAA | | ArCrUrCrCrUrGrGr | | CTCCTGG | | CTGAC | | |
| BS16 | AC | | GAA | | CCAT | | TTCAG | | TAGCAAGTTAAA | | UrUrUrUrArGrArGr | | TTTTAGA | | TCCTG | | |
| | CTG | | ATAG | | | | | | ATAAGGCTAGTC | | CrUrArGrArArArUr | | GCTAGA | | GTTTT | | |
| | ACT | | CAA | | | | | | CGTTATCAACTT | | ArGrCrArArGrUrUr | | AATAGC | | AGAGC | | |
| | CCT | | GTTA | | | | | | GAAAAAGTGGC | | ArArArArUrArArGr | | AAGTTA | | TAGAA | | |
| | G | | AAAT | | | | | | ACCGAGTCGGTG | | GrCrUrArGrUrCrCr | | AAATAA | | ATAGC | | |
| | | | AAG | | | | | | CAACGGCAGACT | | GrUrUrArUrCrArAr | | GGCTAGT | | AAGTT | | |
| | | | GCTA | | | | | | TCTCTTCAGGAG | | CrUrUrGrArArArAr | | CCGTTAT | | AAAAT | | |
| | | | GTCC | | | | | | TCAGGTGCACCA | | ArGrUrGrGrCrArCr | | CAACTTG | | AAGGC | | |
| | | | GTTA | | | | | | T | | CrGrArGrUrCrGrGr | | AAAAAG | | TAGTC | | |
| | | | TCAA | | | | | | | | UrGrCrArArCrGrGr | | TGGCACC | | CGTTA | | |
| | | | CTTG | | | | | | | | CrArGrArCrUrUrCr | | GAGTCG | | TCAAC | | |
| | | | AAA | | | | | | | | UrCrUrUrCrArGrGr | | GTGCAA | | TTGAA | | |
| | | | AAGT | | | | | | | | ArGrUrCrArGrGrUr | | CGGCAG | | AAAGT | | |
| | | | GGC | | | | | | | | GrCrArC*mC*mA* | | ACTTCTC | | GGCAC | | |
| | | | ACCG | | | | | | | | mU | | TTCAGGA | | CGAGT | | |
| | | | AGTC | | | | | | | | | | GTCAGAT | | CGGTG | | |
| | | | GGTG | | | | | | | | | | GCACCAT | | CAACG | | |
| | | | C | | | | | | | | | | | | GCAGA | | |
| | | | | | | | | | | | | | | | CTTCTC | | |
| | | | | | | | | | | | | | | | GTCAG | | |
| | | | | | | | | | | | | | | | GAGTC | | |
| | | | | | | | | | | | | | | | AGATG | | |
| | | | | | | | | | | | | | | | CACCA | | |
| | | | | | | | | | | | | | | | T | | |
| HBB | CAT | 19253 | GTTT | 19343 | GAGT | 19433 | AACGG | 19523 | CATGGTGCACCT | 19613 | mC*mA*mU*rGrGr | 19703 | CATGGTG | 19793 | CATGG | 19883 | +++ |
| 5_RT | GG | | TAGA | | CAGG | | CAGAC | | GACTCCTGGTTT | | UrGrCrArCrCrUrGr | | CATCTGA | | TGCAT | | |
| 20_P | TGC | | GCTA | | TGCA | | TTCTC | | TAGAGCTAGAAA | | ArCrUrCrCrUrGrGr | | CTCCTGG | | CTGAC | | |
| BS15 | AC | | GAA | | CCA | | TTCAG | | TAGCAAGTTAAA | | UrUrUrUrArGrArGr | | TTTTAGA | | TCCTG | | |
| | CTG | | ATAG | | | | | | ATAAGGCTAGTC | | CrUrArGrArArArUr | | GCTAGA | | GTTTT | | |
| | ACT | | CAA | | | | | | CGTTATCAACTT | | ArGrCrArArGrUrUr | | AATAGC | | AGAGC | | |
| | CCT | | GTTA | | | | | | GAAAAAGTGGC | | ArArArArUrArArGr | | AAGTTA | | TAGAA | | |
| | G | | AAAT | | | | | | ACCGAGTCGGTG | | GrCrUrArGrUrCrCr | | AAATAA | | ATAGC | | |
| | | | AAG | | | | | | CAACGGCAGACT | | GrUrUrArUrCrArAr | | GGCTAGT | | AAGTT | | |
| | | | GCTA | | | | | | TCTCTTCAGGAG | | CrUrUrGrArArArAr | | CCGTTAT | | AAAAT | | |
| | | | GTCC | | | | | | TCAGGTGCACCA | | ArGrUrGrGrCrArCr | | CAACTTG | | AAGGC | | |
| | | | GTTA | | | | | | | | CrGrArGrUrCrGrGr | | AAAAAG | | TAGTC | | |
| | | | TCAA | | | | | | | | UrGrCrArArCrGrGr | | TGGCACC | | CGTTA | | |
| | | | CTTG | | | | | | | | CrArGrArCrUrUrCr | | GAGTCG | | TCAAC | | |
| | | | AAA | | | | | | | | UrCrUrUrCrArGrGr | | GTGCAA | | TTGAA | | |
| | | | AAGT | | | | | | | | ArGrUrCrArGrGrUr | | CGGCAG | | AAAGT | | |
| | | | GGC | | | | | | | | GrCrA*mC*mC*mA | | ACTTCTC | | GGCAC | | |
| | | | ACCG | | | | | | | | | | TTCAGGA | | CGAGT | | |
| | | | AGTC | | | | | | | | | | GTCAGAT | | CGGTG | | |
| | | | GGTG | | | | | | | | | | GCACCA | | CAACG | | |
| | | | C | | | | | | | | | | | | GCAGA | | |
| | | | | | | | | | | | | | | | CTTCTC | | |
| | | | | | | | | | | | | | | | GTCAG | | |
| | | | | | | | | | | | | | | | GAGTC | | |
| | | | | | | | | | | | | | | | AGATG | | |
| | | | | | | | | | | | | | | | CACCA | | |
| HBB | CAT | 19254 | GTTT | 19344 | GAGT | 19434 | AACGG | 19524 | CATGGTGCACCT | 19614 | mC*mA*mU*rGrGr | 19704 | CATGGTG | 19794 | CATGG | 19884 | +++ |
| 5_RT | GG | | TAGA | | CAGG | | CAGAC | | GACTCCTGGTTT | | UrGrCrArCrCrUrGr | | CATCTGA | | TGCAT | | |
| 20_P | TGC | | GCTA | | TGCA | | TTCTC | | TAGAGCTAGAAA | | ArCrUrCrCrUrGrGr | | CTCCTGG | | CTGAC | | |
| BS14 | AC | | GAA | | CC | | TTCAG | | TAGCAAGTTAAA | | UrUrUrUrArGrArGr | | TTTTAGA | | TCCTG | | |
| | CTG | | ATAG | | | | | | ATAAGGCTAGTC | | CrUrArGrArArArUr | | GCTAGA | | GTTTT | | |
| | ACT | | CAA | | | | | | CGTTATCAACTT | | ArGrCrArArGrUrUr | | AATAGC | | AGAGC | | |
| | CCT | | GTTA | | | | | | GAAAAAGTGGC | | ArArArArUrArArGr | | AAGTTA | | TAGAA | | |
| | G | | AAAT | | | | | | ACCGAGTCGGTG | | GrCrUrArGrUrCrCr | | AAATAA | | ATAGC | | |
| | | | AAG | | | | | | CAACGGCAGACT | | GrUrUrArUrCrArAr | | GGCTAGT | | AAGTT | | |
| | | | GCTA | | | | | | TCTCTTCAGGAG | | CrUrUrGrArArArAr | | CCGTTAT | | AAAAT | | |
| | | | GTCC | | | | | | TCAGGTGCACC | | ArGrUrGrGrCrArCr | | CAACTTG | | AAGGC | | |
| | | | GTTA | | | | | | | | CrGrArGrUrCrGrGr | | AAAAAG | | TAGTC | | |
| | | | TCAA | | | | | | | | UrGrCrArArCrGrGr | | TGGCACC | | CGTTA | | |
| | | | CTTG | | | | | | | | CrArGrArCrUrUrCr | | GAGTCG | | TCAAC | | |
| | | | AAA | | | | | | | | UrCrUrUrCrArGrGr | | GTGCAA | | TTGAA | | |
| | | | AAGT | | | | | | | | ArGrUrCrArGrGrUr | | CGGCAG | | AAAGT | | |
| | | | GGC | | | | | | | | GrC*mA*mC*mC | | ACTTCTC | | GGCAC | | |
| | | | ACCG | | | | | | | | | | TTCAGGA | | | | |
| | | | AGTC | | | | | | | | | | GTCAGAT | | CGAGT | | |
| | | | GGTG | | | | | | | | | | GCACC | | CGGTG | | |
| | | | C | | | | | | | | | | | | CAACG | | |
| | | | | | | | | | | | | | | | GCAGA | | |
| | | | | | | | | | | | | | | | CTTCTC | | |
| | | | | | | | | | | | | | | | GTCAG | | |
| | | | | | | | | | | | | | | | GAGTC | | |
| | | | | | | | | | | | | | | | AGATG | | |
| | | | | | | | | | | | | | | | CACC | | |
| HBB | CAT | 19255 | GTTT | 19345 | GAGT | 19435 | AACGG | 19525 | CATGGTGCACCT | 19615 | mC*mA*mU*rGrGr | 19705 | CATGGTG | 19795 | CATGG | 19885 | +++ |
| 5_RT | GG | | TAGA | | CAGG | | CAGAC | | GACTCCTGGTTT | | UrGrCrArCrCrUrGr | | CATCTGA | | TGCAT | | |
| 20_P | TGC | | GCTA | | TGCA | | TTCTC | | TAGAGCTAGAAA | | ArCrUrCrCrUrGrGr | | CTCCTGG | | CTGAC | | |
| BS13 | AC | | GAA | | C | | TTCAG | | TAGCAAGTTAAA | | UrUrUrUrArGrArGr | | TTTTAGA | | TCCTG | | |
| | CTG | | ATAG | | | | | | ATAAGGCTAGTC | | CrUrArGrArArArUr | | GCTAGA | | GTTTT | | |
| | ACT | | CAA | | | | | | CGTTATCAACTT | | ArGrCrArArGrUrUr | | AATAGC | | AGAGC | | |
| | CCT | | GTTA | | | | | | GAAAAAGTGGC | | ArArArArUrArArGr | | AAGTTA | | TAGAA | | |
| | G | | AAAT | | | | | | ACCGAGTCGGTG | | GrCrUrArGrUrCrCr | | AAATAA | | ATAGC | | |
| | | | AAG | | | | | | CAACGGCAGACT | | GrUrUrArUrCrArAr | | GGCTAGT | | AAGTT | | |
| | | | GCTA | | | | | | TCTCTTCAGGAG | | CrUrUrGrArArArAr | | CCGTTAT | | AAAAT | | |
| | | | GTCC | | | | | | TCAGGTGCAC | | ArGrUrGrGrCrArCr | | CAACTTG | | AAGGC | | |
| | | | GTTA | | | | | | | | CrGrArGrUrCrGrGr | | AAAAAG | | TAGTC | | |
| | | | TCAA | | | | | | | | UrGrCrArArCrGrGr | | TGGCACC | | CGTTA | | |
| | | | CTTG | | | | | | | | CrArGrArCrUrUrCr | | GAGTCG | | TCAAC | | |
| | | | AAA | | | | | | | | UrCrUrUrCrArGrGr | | GTGCAA | | TTGAA | | |
| | | | AAGT | | | | | | | | ArGrUrCrArGrGrUr | | CGGCAG | | AAAGT | | |
| | | | GGC | | | | | | | | G*mC*mA*mC | | ACTTCTC | | GGCAC | | |
| | | | ACCG | | | | | | | | | | TTCAGGA | | CGAGT | | |
| | | | AGTC | | | | | | | | | | GTCAGAT | | CGGTG | | |
| | | | GGTG | | | | | | | | | | GCAC | | CAACG | | |
| | | | C | | | | | | | | | | | | GCAGA | | |
| | | | | | | | | | | | | | | | CTTCTC | | |
| | | | | | | | | | | | | | | | GTCAG | | |
| | | | | | | | | | | | | | | | GAGTC | | |
| | | | | | | | | | | | | | | | AGATG | | |
| | | | | | | | | | | | | | | | CAC | | |
| HBB | CAT | 19256 | GTTT | 19346 | GAGT | 19436 | AACGG | 19526 | CATGGTGCACCT | 19616 | mC*mA*mU*rGrGr | 19706 | CATGGTG | 19796 | CATGG | 19886 | +++ |
| 5_RT | GG | | TAGA | | CAGG | | CAGAC | | GACTCCTGGTTT | | UrGrCrArCrCrUrGr | | CATCTGA | | TGCAT | | |
| 20_P | TGC | | GCTA | | TGCA | | TTCTC | | TAGAGCTAGAAA | | ArCrUrCrCrUrGrGr | | CTCCTGG | | CTGAC | | |
| BS12 | AC | | GAA | | | | TTCAG | | TAGCAAGTTAAA | | UrUrUrUrArGrArGr | | TTTTAGA | | TCCTG | | |
| | CTG | | ATAG | | | | | | ATAAGGCTAGTC | | CrUrArGrArArArUr | | GCTAGA | | GTTTT | | |
| | ACT | | CAA | | | | | | CGTTATCAACTT | | ArGrCrArArGrUrUr | | AATAGC | | AGAGC | | |
| | CCT | | GTTA | | | | | | GAAAAAGTGGC | | ArArArArUrArArGr | | AAGTTA | | TAGAA | | |
| | G | | AAAT | | | | | | ACCGAGTCGGTG | | GrCrUrArGrUrCrCr | | AAATAA | | ATAGC | | |
| | | | AAG | | | | | | CAACGGCAGACT | | GrUrUrArUrCrArAr | | GGCTAGT | | AAGTT | | |
| | | | GCTA | | | | | | TCTCTTCAGGAG | | CrUrUrGrArArArAr | | CCGTTAT | | AAAAT | | |
| | | | GTCC | | | | | | TCAGGTGCA | | ArGrUrGrGrCrArCr | | CAACTTG | | AAGGC | | |
| | | | GTTA | | | | | | | | CrGrArGrUrCrGrGr | | AAAAAG | | TAGTC | | |
| | | | TCAA | | | | | | | | UrGrCrArArCrGrGr | | TGGCACC | | CGTTA | | |
| | | | CTTG | | | | | | | | CrArGrArCrUrUrCr | | GAGTCG | | TCAAC | | |
| | | | AAA | | | | | | | | UrCrUrUrCrArGrGr | | GTGCAA | | TTGAA | | |
| | | | AAGT | | | | | | | | ArGrUrCrArGrGrU* | | CGGCAG | | AAAGT | | |
| | | | GGC | | | | | | | | mG*mC*mA | | ACTTCTC | | GGCAC | | |
| | | | ACCG | | | | | | | | | | TTCAGGA | | CGAGT | | |
| | | | AGTC | | | | | | | | | | GTCAGAT | | CGGTG | | |
| | | | GGTG | | | | | | | | | | GCA | | CAACG | | |
| | | | C | | | | | | | | | | | | GCAGA | | |
| | | | | | | | | | | | | | | | CTTCTC | | |
| | | | | | | | | | | | | | | | GTCAG | | |
| | | | | | | | | | | | | | | | GAGTC | | |
| | | | | | | | | | | | | | | | AGATG | | |
| | | | | | | | | | | | | | | | CA | | |
| HBB | CAT | 19257 | GTTT | 19347 | GAGT | 19437 | AACGG | 19527 | CATGGTGCACCT | 19617 | mC*mA*mU*rGrGr | 19707 | CATGGTG | 19797 | CATGG | 19887 | +++ |
| 5_RT | GG | | TAGA | | CAGG | | CAGAC | | GACTCCTGGTTT | | UrGrCrArCrCrUrGr | | CATCTGA | | TGCAT | | |
| 20_P | TGC | | GCTA | | TGC | | TTCTC | | TAGAGCTAGAAA | | ArCrUrCrCrUrGrGr | | CTCCTGG | | CTGAC | | |
| BS11 | AC | | GAA | | | | TTCAG | | TAGCAAGTTAAA | | UrUrUrUrArGrArGr | | TTTTAGA | | TCCTG | | |
| | CTG | | ATAG | | | | | | ATAAGGCTAGTC | | CrUrArGrArArArUr | | GCTAGA | | GTTTT | | |
| | ACT | | CAA | | | | | | CGTTATCAACTT | | ArGrCrArArGrUrUr | | AATAGC | | AGAGC | | |
| | CCT | | GTTA | | | | | | GAAAAAGTGGC | | ArArArArUrArArGr | | AAGTTA | | TAGAA | | |
| | G | | AAAT | | | | | | ACCGAGTCGGTG | | GrCrUrArGrUrCrCr | | AAATAA | | ATAGC | | |
| | | | AAG | | | | | | CAACGGCAGACT | | GrUrUrArUrCrArAr | | GGCTAGT | | AAGTT | | |
| | | | GCTA | | | | | | TCTCTTCAGGAG | | CrUrUrGrArArArAr | | CCGTTAT | | AAAAT | | |
| | | | GTCC | | | | | | TCAGGTGC | | ArGrUrGrGrCrArCr | | CAACTTG | | AAGGC | | |
| | | | GTTA | | | | | | | | CrGrArGrUrCrGrGr | | AAAAAG | | TAGTC | | |
| | | | TCAA | | | | | | | | UrGrCrArArCrGrGr | | TGGCACC | | CGTTA | | |
| | | | CTTG | | | | | | | | CrArGrArCrUrUrCr | | GAGTCG | | TCAAC | | |
| | | | AAA | | | | | | | | UrCrUrUrCrArGrGr | | GTGCAA | | TTGAA | | |
| | | | AAGT | | | | | | | | ArGrUrCrArGrG*m | | CGGCAG | | AAAGT | | |
| | | | GGC | | | | | | | | U*mG*mC | | ACTTCTC | | GGCAC | | |
| | | | ACCG | | | | | | | | | | TTCAGGA | | CGAGT | | |
| | | | AGTC | | | | | | | | | | GTCAGAT | | CGGTG | | |
| | | | GGTG | | | | | | | | | | GC | | CAACG | | |
| | | | C | | | | | | | | | | | | GCAGA | | |
| | | | | | | | | | | | | | | | CTTCTC | | |
| | | | | | | | | | | | | | | | GTCAG | | |
| | | | | | | | | | | | | | | | GAGTC | | |
| | | | | | | | | | | | | | | | AGATG | | |
| | | | | | | | | | | | | | | | C | | |
| HBB | CAT | 19258 | GTTT | 19348 | GAGT | 19438 | AACGG | 19528 | CATGGTGCACCT | 19618 | mC*mA*mU*rGrGr | 19708 | CATGGTG | 19798 | CATGG | 19888 | +++ |
| 5_RT | GG | | TAGA | | CAGG | | CAGAC | | GACTCCTGGTTT | | UrGrCrArCrCrUrGr | | CATCTGA | | TGCAT | | |
| 20_P | TGC | | GCTA | | TG | | TTCTC | | TAGAGCTAGAAA | | ArCrUrCrCrUrGrGr | | CTCCTGG | | CTGAC | | |
| BS10 | AC | | GAA | | | | TTCAG | | TAGCAAGTTAAA | | UrUrUrUrArGrArGr | | TTTTAGA | | TCCTG | | |
| | CTG | | ATAG | | | | | | ATAAGGCTAGTC | | CrUrArGrArArArUr | | GCTAGA | | GTTTT | | |
| | ACT | | CAA | | | | | | CGTTATCAACTT | | ArGrCrArArGrUrUr | | AATAGC | | AGAGC | | |
| | CCT | | GTTA | | | | | | GAAAAAGTGGC | | ArArArArUrArArGr | | AAGTTA | | TAGAA | | |
| | G | | AAAT | | | | | | ACCGAGTCGGTG | | GrCrUrArGrUrCrCr | | AAATAA | | ATAGC | | |
| | | | AAG | | | | | | CAACGGCAGACT | | GrUrUrArUrCrArAr | | GGCTAGT | | AAGTT | | |
| | | | GCTA | | | | | | TCTCTTCAGGAG | | CrUrUrGrArArArAr | | CCGTTAT | | AAAAT | | |
| | | | GTCC | | | | | | TCAGGTG | | ArGrUrGrGrCrArCr | | CAACTTG | | AAGGC | | |
| | | | GTTA | | | | | | | | CrGrArGrUrCrGrGr | | AAAAAG | | TAGTC | | |
| | | | TCAA | | | | | | | | UrGrCrArArCrGrGr | | TGGCACC | | CGTTA | | |
| | | | CTTG | | | | | | | | CrArGrArCrUrUrCr | | GAGTCG | | TCAAC | | |
| | | | AAA | | | | | | | | UrCrUrUrCrArGrGr | | GTGCAA | | TTGAA | | |
| | | | AAGT | | | | | | | | ArGrUrCrArG*mG* | | CGGCAG | | AAAGT | | |
| | | | GGC | | | | | | | | mU*mG | | ACTTCTC | | GGCAC | | |
| | | | ACCG | | | | | | | | | | TTCAGGA | | CGAGT | | |
| | | | AGTC | | | | | | | | | | GTCAGAT | | CGGTG | | |
| | | | GGTG | | | | | | | | | | G | | CAACG | | |
| | | | C | | | | | | | | | | | | GCAGA | | |
| | | | | | | | | | | | | | | | CTTCTC | | |
| | | | | | | | | | | | | | | | GTCAG | | |
| | | | | | | | | | | | | | | | GAGTC | | |
| | | | | | | | | | | | | | | | AGATG | | |
| HBB | CAT | 19259 | GTTT | 19349 | GAGT | | AACGG | 19529 | CATGGTGCACCT | 19619 | mC*mA*mU*rGrGr | 19709 | CATGGTG | 19799 | CATGG | 19889 | +++ |
| 5_RT | GG | | TAGA | | CAGG | | CAGAC | | GACTCCTGGTTT | | UrGrCrArCrCrUrGr | | CATCTGA | | TGCAT | | |
| 20_P | TGC | | GCTA | | T | | TTCTC | | TAGAGCTAGAAA | | ArCrUrCrCrUrGrGr | | CTCCTGG | | CTGAC | | |
| BS9 | AC | | GAA | | | | TTCAG | | TAGCAAGTTAAA | | UrUrUrUrArGrArGr | | TTTTAGA | | TCCTG | | |
| | CTG | | ATAG | | | | | | ATAAGGCTAGTC | | CrUrArGrArArArUr | | GCTAGA | | GTTTT | | |
| | ACT | | CAA | | | | | | CGTTATCAACTT | | ArGrCrArArGrUrUr | | AATAGC | | AGAGC | | |
| | CCT | | GTTA | | | | | | GAAAAAGTGGC | | ArArArArUrArArGr | | AAGTTA | | TAGAA | | |
| | G | | AAAT | | | | | | ACCGAGTCGGTG | | GrCrUrArGrUrCrCr | | AAATAA | | ATAGC | | |
| | | | AAG | | | | | | CAACGGCAGACT | | GrUrUrArUrCrArAr | | GGCTAGT | | AAGTT | | |
| | | | GCTA | | | | | | TCTCTTCAGGAG | | CrUrUrGrArArArAr | | CCGTTAT | | AAAAT | | |
| | | | GTCC | | | | | | TCAGGT | | ArGrUrGrGrCrArCr | | CAACTTG | | AAGGC | | |
| | | | GTTA | | | | | | | | CrGrArGrUrCrGrGr | | AAAAAG | | TAGTC | | |
| | | | TCAA | | | | | | | | UrGrCrArArCrGrGr | | TGGCACC | | CGTTA | | |
| | | | CTTG | | | | | | | | CrArGrArCrUrUrCr | | GAGTCG | | TCAAC | | |
| | | | AAA | | | | | | | | UrCrUrUrCrArGrGr | | GTGCAA | | TTGAA | | |
| | | | AAGT | | | | | | | | ArGrUrCrA*mG*mG | | CGGCAG | | AAAGT | | |
| | | | GGC | | | | | | | | *mU | | ACTTCTC | | GGCAC | | |
| | | | ACCG | | | | | | | | | | TTCAGGA | | CGAGT | | |
| | | | AGTC | | | | | | | | | | GTCAGAT | | CGGTG | | |
| | | | GGTG | | | | | | | | | | | | CAACG | | |
| | | | C | | | | | | | | | | | | GCAGA | | |
| | | | | | | | | | | | | | | | CTTCTC | | |
| | | | | | | | | | | | | | | | GTCAG | | |
| | | | | | | | | | | | | | | | GAGTC | | |
| | | | | | | | | | | | | | | | AGAT | | |
| HBB | CAT | 19260 | GTTT | 19350 | GAGT | | AACGG | 19530 | CATGGTGCACCT | 19620 | mC*mA*mU*rGrGr | 19710 | CATGGTG | 19800 | CATGG | 19890 | +++ |
| 5_RT | GG | | TAGA | | CAGG | | CAGAC | | GACTCCTGGTTT | | UrGrCrArCrCrUrGr | | CATCTGA | | TGCAT | | |
| 20_P | TGC | | GCTA | | | | TTCTC | | TAGAGCTAGAAA | | ArCrUrCrCrUrGrGr | | CTCCTGG | | CTGAC | | |
| BS8 | AC | | GAA | | | | TTCAG | | TAGCAAGTTAAA | | UrUrUrUrArGrArGr | | TTTTAGA | | TCCTG | | |
| | CTG | | ATAG | | | | | | ATAAGGCTAGTC | | CrUrArGrArArArUr | | GCTAGA | | GTTTT | | |
| | ACT | | CAA | | | | | | CGTTATCAACTT | | ArGrCrArArGrUrUr | | AATAGC | | AGAGC | | |
| | CCT | | GTTA | | | | | | GAAAAAGTGGC | | ArArArArUrArArGr | | AAGTTA | | TAGAA | | |
| | G | | AAAT | | | | | | ACCGAGTCGGTG | | GrCrUrArGrUrCrCr | | AAATAA | | ATAGC | | |
| | | | AAG | | | | | | CAACGGCAGACT | | GrUrUrArUrCrArAr | | GGCTAGT | | AAGTT | | |
| | | | GCTA | | | | | | TCTCTTCAGGAG | | CrUrUrGrArArArAr | | CCGTTAT | | AAAAT | | |
| | | | GTCC | | | | | | TCAGG | | ArGrUrGrGrCrArCr | | CAACTTG | | AAGGC | | |
| | | | GTTA | | | | | | | | CrGrArGrUrCrGrGr | | AAAAAG | | TAGTC | | |
| | | | TCAA | | | | | | | | UrGrCrArArCrGrGr | | TGGCACC | | CGTTA | | |
| | | | CTTG | | | | | | | | CrArGrArCrUrUrCr | | GAGTCG | | TCAAC | | |
| | | | AAA | | | | | | | | UrCrUrUrCrArGrGr | | GTGCAA | | TTGAA | | |
| | | | AAGT | | | | | | | | ArGrUrC*mA*mG* | | CGGCAG | | AAAGT | | |
| | | | GGC | | | | | | | | mG | | ACTTCTC | | GGCAC | | |
| | | | ACCG | | | | | | | | | | TTCAGGA | | CGAGT | | |
| | | | AGTC | | | | | | | | | | GTCAGA | | CGGTG | | |
| | | | GGTG | | | | | | | | | | | | CAACG | | |
| | | | C | | | | | | | | | | | | GCAGA | | |
| | | | | | | | | | | | | | | | CTTCTC | | |
| | | | | | | | | | | | | | | | GTCAG | | |
| | | | | | | | | | | | | | | | GAGTC | | |
| | | | | | | | | | | | | | | | AGA | | |
| HBB | CAT | 19261 | GTTT | 19351 | GAGT | 19441 | ACGGC | 19531 | CATGGTGCACCT | 19621 | mC*mA*mU*rGrGr | 19711 | CATGGTG | 19801 | CATGG | 19891 | +++ |
| 5_RT | GG | | TAGA | | CAGG | | AGACT | | GACTCCTGGTTT | | UrGrCrArCrCrUrGr | | CATCTGA | | TGCAT | | |
| 19_P | TGC | | GCTA | | TGCA | | TCTC | | TAGAGCTAGAAA | | ArCrUrCrCrUrGrGr | | CTCCTGG | | CTGAC | | |
| BS17 | AC | | GAA | | CCAT | | TTCAG | | TAGCAAGTTAAA | | UrUrUrUrArGrArGr | | TTTTAGA | | TCCTG | | |
| | CTG | | ATAG | | G | | | | ATAAGGCTAGTC | | CrUrArGrArArArUr | | GCTAGA | | GTTTT | | |
| | ACT | | CAA | | | | | | CGTTATCAACTT | | ArGrCrArArGrUrUr | | AATAGC | | AGAGC | | |
| | CCT | | GTTA | | | | | | GAAAAAGTGGC | | ArArArArUrArArGr | | AAGTTA | | TAGAA | | |
| | G | | AAAT | | | | | | ACCGAGTCGGTG | | GrCrUrArGrUrCrCr | | AAATAA | | ATAGC | | |
| | | | AAG | | | | | | CACGGCAGACTT | | GrUrUrArUrCrArAr | | GGCTAGT | | AAGTT | | |
| | | | GCTA | | | | | | CTCTTCAGGAGT | | CrUrUrGrArArArAr | | CCGTTAT | | AAAAT | | |
| | | | GTCC | | | | | | CAGGTGCACCAT | | ArGrUrGrGrCrArCr | | CAACTTG | | AAGGC | | |
| | | | GTTA | | | | | | G | | CrGrArGrUrCrGrGr | | AAAAAG | | TAGTC | | |
| | | | TCAA | | | | | | | | UrGrCrArCrGrGrCr | | TGGCACC | | CGTTA | | |
| | | | CTTG | | | | | | | | ArGrArCrUrUrCrUr | | GAGTCG | | TCAAC | | |
| | | | AAA | | | | | | | | CrUrUrCrArGrGrAr | | GTGCAC | | TTGAA | | |
| | | | AAGT | | | | | | | | GrUrCrArGrGrUrGr | | GGCAGA | | AAAGT | | |
| | | | GGC | | | | | | | | CrArCrC*mA*mU* | | CTTCTCT | | GGCAC | | |
| | | | ACCG | | | | | | | | mG | | TCAGGA | | CGAGT | | |
| | | | AGTC | | | | | | | | | | GTCAGAT | | CGGTG | | |
| | | | GGTG | | | | | | | | | | GCACCAT | | CACGG | | |
| | | | C | | | | | | | | | | G | | CAGAC | | |
| | | | | | | | | | | | | | | | TTCTC | | |
| | | | | | | | | | | | | | | | GTCAG | | |
| | | | | | | | | | | | | | | | GAGTC | | |
| | | | | | | | | | | | | | | | AGATG | | |
| | | | | | | | | | | | | | | | CACCA | | |
| | | | | | | | | | | | | | | | TG | | |
| HBB | CAT | 19262 | GTTT | 19352 | GAGT | 19442 | ACGGC | 19532 | CATGGTGCACCT | 19622 | mC*mA*mU*rGrGr | 19712 | CATGGTG | 19802 | CATGG | 19892 | +++ |
| 5_RT | GG | | TAGA | | CAGG | | AGACT | | GACTCCTGGTTT | | UrGrCrArCrCrUrGr | | CATCTGA | | TGCAT | | |
| 19_P | TGC | | GCTA | | TGCA | | TCTC | | TAGAGCTAGAAA | | ArCrUrCrCrUrGrGr | | CTCCTGG | | CTGAC | | |
| BS16 | AC | | GAA | | CCAT | | TTCAG | | TAGCAAGTTAAA | | UrUrUrUrArGrArGr | | TTTTAGA | | TCCTG | | |
| | CTG | | ATAG | | | | | | ATAAGGCTAGTC | | CrUrArGrArArArUr | | GCTAGA | | GTTTT | | |
| | ACT | | CAA | | | | | | CGTTATCAACTT | | ArGrCrArArGrUrUr | | AATAGC | | AGAGC | | |
| | CCT | | GTTA | | | | | | GAAAAAGTGGC | | ArArArArUrArArGr | | AAGTTA | | TAGAA | | |
| | G | | AAAT | | | | | | ACCGAGTCGGTG | | GrCrUrArGrUrCrCr | | AAATAA | | ATAGC | | |
| | | | AAG | | | | | | CACGGCAGACTT | | GrUrUrArUrCrArAr | | GGCTAGT | | AAGTT | | |
| | | | GCTA | | | | | | CTCTTCAGGAGT | | CrUrUrGrArArArAr | | CCGTTAT | | AAAAT | | |
| | | | GTCC | | | | | | CAGGTGCACCAT | | ArGrUrGrGrCrArCr | | CAACTTG | | AAGGC | | |
| | | | GTTA | | | | | | | | CrGrArGrUrCrGrGr | | AAAAAG | | TAGTC | | |
| | | | TCAA | | | | | | | | UrGrCrArCrGrGrCr | | TGGCACC | | CGTTA | | |
| | | | CTTG | | | | | | | | ArGrArCrUrUrCrUr | | GAGTCG | | TCAAC | | |
| | | | AAA | | | | | | | | CrUrUrCrArGrGrAr | | GTGCAC | | TTGAA | | |
| | | | AAGT | | | | | | | | GrUrCrArGrGrUrGr | | GGCAGA | | AAAGT | | |
| | | | GGC | | | | | | | | CrArC*mC*mA*mU | | CTTCTCT | | GGCAC | | |
| | | | ACCG | | | | | | | | | | TCAGGA | | CGAGT | | |
| | | | AGTC | | | | | | | | | | GTCAGAT | | CGGTG | | |
| | | | GGTG | | | | | | | | | | GCACCAT | | CACGG | | |
| | | | C | | | | | | | | | | | | CAGAC | | |
| | | | | | | | | | | | | | | | TTCTC | | |
| | | | | | | | | | | | | | | | GTCAG | | |
| | | | | | | | | | | | | | | | GAGTC | | |
| | | | | | | | | | | | | | | | AGATG | | |
| | | | | | | | | | | | | | | | CACCA | | |
| | | | | | | | | | | | | | | | T | | |
| HBB | CAT | 19263 | GTTT | 19353 | GAGT | 19443 | ACGGC | 19533 | CATGGTGCACCT | 19623 | mC*mA*mU*rGrGr | 19713 | CATGGTG | 19803 | CATGG | 19893 | +++ |
| 5_RT | GG | | TAGA | | CAGG | | AGACT | | GACTCCTGGTTT | | UrGrCrArCrCrUrGr | | CATCTGA | | TGCAT | | |
| 19_P | TGC | | GCTA | | TGCA | | TCTC | | TAGAGCTAGAAA | | ArCrUrCrCrUrGrGr | | CTCCTGG | | CTGAC | | |
| BS15 | AC | | GAA | | CCA | | TTCAG | | TAGCAAGTTAAA | | UrUrUrUrArGrArGr | | TTTTAGA | | TCCTG | | |
| | CTG | | ATAG | | | | | | ATAAGGCTAGTC | | CrUrArGrArArArUr | | GCTAGA | | GTTTT | | |
| | ACT | | CAA | | | | | | CGTTATCAACTT | | ArGrCrArArGrUrUr | | AATAGC | | AGAGC | | |
| | CCT | | GTTA | | | | | | GAAAAAGTGGC | | ArArArArUrArArGr | | AAGTTA | | TAGAA | | |
| | G | | AAAT | | | | | | ACCGAGTCGGTG | | GrCrUrArGrUrCrCr | | AAATAA | | ATAGC | | |
| | | | AAG | | | | | | CACGGCAGACTT | | GrUrUrArUrCrArAr | | GGCTAGT | | AAGTT | | |
| | | | GCTA | | | | | | CTCTTCAGGAGT | | CrUrUrGrArArArAr | | CCGTTAT | | AAAAT | | |
| | | | GTCC | | | | | | CAGGTGCACCA | | ArGrUrGrGrCrArCr | | CAACTTG | | AAGGC | | |
| | | | GTTA | | | | | | | | CrGrArGrUrCrGrGr | | AAAAAG | | TAGTC | | |
| | | | TCAA | | | | | | | | UrGrCrArCrGrGrCr | | TGGCACC | | CGTTA | | |
| | | | CTTG | | | | | | | | ArGrArCrUrUrCrUr | | GAGTCG | | TCAAC | | |
| | | | AAA | | | | | | | | CrUrUrCrArGrGrAr | | GTGCAC | | TTGAA | | |
| | | | AAGT | | | | | | | | GrUrCrArGrGrUrGr | | GGCAGA | | AAAGT | | |
| | | | GGC | | | | | | | | CrA*mC*mC*mA | | CTTCTCT | | GGCAC | | |
| | | | ACCG | | | | | | | | | | TCAGGA | | CGAGT | | |
| | | | AGTC | | | | | | | | | | GTCAGAT | | CGGTG | | |
| | | | GGTG | | | | | | | | | | GCACCA | | CACGG | | |
| | | | C | | | | | | | | | | | | CAGAC | | |
| | | | | | | | | | | | | | | | TTCTC | | |
| | | | | | | | | | | | | | | | GTCAG | | |
| | | | | | | | | | | | | | | | GAGTC | | |
| | | | | | | | | | | | | | | | AGATG | | |
| | | | | | | | | | | | | | | | CACCA | | |
| HBB | CAT | 19264 | GTTT | 19354 | GAGT | 19444 | ACGGC | 19534 | CATGGTGCACCT | 19624 | mC*mA*mU*rGrGr | 19714 | CATGGTG | 19804 | CATGG | 19894 | +++ |
| 5_RT | GG | | TAGA | | CAGG | | AGACT | | GACTCCTGGTTT | | UrGrCrArCrCrUrGr | | CATCTGA | | TGCAT | | |
| 19_P | TGC | | GCTA | | TGCA | | TCTC | | TAGAGCTAGAAA | | ArCrUrCrCrUrGrGr | | CTCCTGG | | CTGAC | | |
| BS14 | AC | | GAA | | CC | | TTCAG | | TAGCAAGTTAAA | | UrUrUrUrArGrArGr | | TTTTAGA | | TCCTG | | |
| | CTG | | ATAG | | | | | | ATAAGGCTAGTC | | CrUrArGrArArArUr | | GCTAGA | | GTTTT | | |
| | ACT | | CAA | | | | | | CGTTATCAACTT | | ArGrCrArArGrUrUr | | AATAGC | | AGAGC | | |
| | CCT | | GTTA | | | | | | GAAAAAGTGGC | | ArArArArUrArArGr | | AAGTTA | | TAGAA | | |
| | G | | AAAT | | | | | | ACCGAGTCGGTG | | GrCrUrArGrUrCrCr | | AAATAA | | ATAGC | | |
| | | | AAG | | | | | | CACGGCAGACTT | | GrUrUrArUrCrArAr | | GGCTAGT | | AAGTT | | |
| | | | GCTA | | | | | | CTCTTCAGGAGT | | CrUrUrGrArArArAr | | CCGTTAT | | AAAAT | | |
| | | | GTCC | | | | | | CAGGTGCACC | | ArGrUrGrGrCrArCr | | CAACTTG | | AAGGC | | |
| | | | GTTA | | | | | | | | CrGrArGrUrCrGrGr | | AAAAAG | | TAGTC | | |
| | | | TCAA | | | | | | | | UrGrCrArCrGrGrCr | | TGGCACC | | CGTTA | | |
| | | | CTTG | | | | | | | | ArGrArCrUrUrCrUr | | GAGTCG | | TCAAC | | |
| | | | AAA | | | | | | | | CrUrUrCrArGrGrAr | | GTGCAC | | TTGAA | | |
| | | | AAGT | | | | | | | | GrUrCrArGrGrUrGr | | GGCAGA | | AAAGT | | |
| | | | GGC | | | | | | | | C*mA*mC*mC | | CTTCTCT | | GGCAC | | |
| | | | ACCG | | | | | | | | | | TCAGGA | | CGAGT | | |
| | | | AGTC | | | | | | | | | | GTCAGAT | | CGGTG | | |
| | | | GGTG | | | | | | | | | | GCACC | | CACGG | | |
| | | | C | | | | | | | | | | | | CAGAC | | |
| | | | | | | | | | | | | | | | TTCTC | | |
| | | | | | | | | | | | | | | | GTCAG | | |
| | | | | | | | | | | | | | | | GAGTC | | |
| | | | | | | | | | | | | | | | AGATG | | |
| | | | | | | | | | | | | | | | CACC | | |
| HBB | CAT | 19265 | GTTT | 19355 | GAGT | 19445 | ACGGC | 19535 | CATGGTGCACCT | 19625 | mC*mA*mU*rGrGr | 19715 | CATGGTG | 19805 | CATGG | 19895 | +++ |
| 5_RT | GG | | TAGA | | CAGG | | AGACT | | GACTCCTGGTTT | | UrGrCrArCrCrUrGr | | CATCTGA | | TGCAT | | |
| 19_P | TGC | | GCTA | | TGCA | | TCTC | | TAGAGCTAGAAA | | ArCrUrCrCrUrGrGr | | CTCCTGG | | CTGAC | | |
| BS13 | AC | | GAA | | C | | TTCAG | | TAGCAAGTTAAA | | UrUrUrUrArGrArGr | | TTTTAGA | | TCCTG | | |
| | CTG | | ATAG | | | | | | ATAAGGCTAGTC | | CrUrArGrArArArUr | | GCTAGA | | GTTTT | | |
| | ACT | | CAA | | | | | | CGTTATCAACTT | | ArGrCrArArGrUrUr | | AATAGC | | AGAGC | | |
| | CCT | | GTTA | | | | | | GAAAAAGTGGC | | ArArArArUrArArGr | | AAGTTA | | TAGAA | | |
| | G | | AAAT | | | | | | ACCGAGTCGGTG | | GrCrUrArGrUrCrCr | | AAATAA | | ATAGC | | |
| | | | AAG | | | | | | CACGGCAGACTT | | GrUrUrArUrCrArAr | | GGCTAGT | | AAGTT | | |
| | | | GCTA | | | | | | CTCTTCAGGAGT | | CrUrUrGrArArArAr | | CCGTTAT | | AAAAT | | |
| | | | GTCC | | | | | | CAGGTGCAC | | ArGrUrGrGrCrArCr | | CAACTTG | | AAGGC | | |
| | | | GTTA | | | | | | | | CrGrArGrUrCrGrGr | | AAAAAG | | TAGTC | | |
| | | | TCAA | | | | | | | | UrGrCrArCrGrGrCr | | TGGCACC | | CGTTA | | |
| | | | CTTG | | | | | | | | ArGrArCrUrUrCrUr | | GAGTCG | | TCAAC | | |
| | | | AAA | | | | | | | | CrUrUrCrArGrGrAr | | GTGCAC | | TTGAA | | |
| | | | AAGT | | | | | | | | GrUrCrArGrGrUrG* | | GGCAGA | | AAAGT | | |
| | | | GGC | | | | | | | | mC*mA*mC | | CTTCTCT | | GGCAC | | |
| | | | ACCG | | | | | | | | | | TCAGGA | | CGAGT | | |
| | | | AGTC | | | | | | | | | | GTCAGAT | | CGGTG | | |
| | | | GGTG | | | | | | | | | | GCAC | | CACGG | | |
| | | | C | | | | | | | | | | | | CAGAC | | |
| | | | | | | | | | | | | | | | TTCTC | | |
| | | | | | | | | | | | | | | | GTCAG | | |
| | | | | | | | | | | | | | | | GAGTC | | |
| | | | | | | | | | | | | | | | AGATG | | |
| | | | | | | | | | | | | | | | CAC | | |
| HBB | CAT | 19266 | GTTT | 19356 | GAGT | 19446 | ACGGC | 19536 | CATGGTGCACCT | 19626 | mC*mA*mU*rGrGr | 19716 | CATGGTG | 19806 | CATGG | 19896 | +++ |
| 5_RT | GG | | TAGA | | CAGG | | AGACT | | GACTCCTGGTTT | | UrGrCrArCrCrUrGr | | CATCTGA | | TGCAT | | |
| 19_P | TGC | | GCTA | | TGCA | | TCTC | | TAGAGCTAGAAA | | ArCrUrCrCrUrGrGr | | CTCCTGG | | CTGAC | | |
| BS12 | AC | | GAA | | | | TTCAG | | TAGCAAGTTAAA | | UrUrUrUrArGrArGr | | TTTTAGA | | TCCTG | | |
| | CTG | | ATAG | | | | | | ATAAGGCTAGTC | | CrUrArGrArArArUr | | GCTAGA | | GTTTT | | |
| | ACT | | CAA | | | | | | CGTTATCAACTT | | ArGrCrArArGrUrUr | | AATAGC | | AGAGC | | |
| | CCT | | GTTA | | | | | | GAAAAAGTGGC | | ArArArArUrArArGr | | AAGTTA | | TAGAA | | |
| | G | | AAAT | | | | | | ACCGAGTCGGTG | | GrCrUrArGrUrCrCr | | AAATAA | | ATAGC | | |
| | | | AAG | | | | | | CACGGCAGACTT | | GrUrUrArUrCrArAr | | GGCTAGT | | AAGTT | | |
| | | | GCTA | | | | | | CTCTTCAGGAGT | | CrUrUrGrArArArAr | | CCGTTAT | | AAAAT | | |
| | | | GTCC | | | | | | CAGGTGCA | | ArGrUrGrGrCrArCr | | CAACTTG | | AAGGC | | |
| | | | GTTA | | | | | | | | CrGrArGrUrCrGrGr | | AAAAAG | | TAGTC | | |
| | | | TCAA | | | | | | | | UrGrCrArCrGrGrCr | | TGGCACC | | CGTTA | | |
| | | | CTTG | | | | | | | | ArGrArCrUrUrCrUr | | GAGTCG | | TCAAC | | |
| | | | AAA | | | | | | | | CrUrUrCrArGrGrAr | | GTGCAC | | TTGAA | | |
| | | | AAGT | | | | | | | | GrUrCrArGrGrU*m | | GGCAGA | | AAAGT | | |
| | | | GGC | | | | | | | | G*mC*mA | | CTTCTCT | | GGCAC | | |
| | | | ACCG | | | | | | | | | | TCAGGA | | CGAGT | | |
| | | | AGTC | | | | | | | | | | GTCAGAT | | CGGTG | | |
| | | | GGTG | | | | | | | | | | GCA | | CACGG | | |
| | | | C | | | | | | | | | | | | CAGAC | | |
| | | | | | | | | | | | | | | | TTCTC | | |
| | | | | | | | | | | | | | | | GTCAG | | |
| | | | | | | | | | | | | | | | GAGTC | | |
| | | | | | | | | | | | | | | | AGATG | | |
| | | | | | | | | | | | | | | | CA | | |
| HBB | CAT | 19267 | GTTT | 19357 | GAGT | 19447 | ACGGC | 19537 | CATGGTGCACCT | 19627 | mC*mA*mU*rGrGr | | CATGGTG | | CATGG | | |
| 5_RT | GG | | TAGA | | CAGG | | AGACT | | GACTCCTGGTTT | | UrGrCrArCrCrUrGr | | CATCTGA | | TGCAT | | |
| 19_P | TGC | | GCTA | | TGC | | TCTC | | TAGAGCTAGAAA | | ArCrUrCrCrUrGrGr | | CTCCTGG | | CTGAC | | |
| BS11 | AC | | GAA | | | | TTCAG | | TAGCAAGTTAAA | | UrUrUrUrArGrArGr | | TTTTAGA | | TCCTG | | |
| | CTG | | ATAG | | | | | | ATAAGGCTAGTC | | CrUrArGrArArArUr | | GCTAGA | | GTTTT | | |
| | ACT | | CAA | | | | | | CGTTATCAACTT | | ArGrCrArArGrUrUr | | AATAGC | | AGAGC | | |
| | CCT | | GTTA | | | | | | GAAAAAGTGGC | | ArArArArUrArArGr | | AAGTTA | | TAGAA | | |
| | G | | AAAT | | | | | | ACCGAGTCGGTG | | GrCrUrArGrUrCrCr | | AAATAA | | ATAGC | | |
| | | | AAG | | | | | | CACGGCAGACTT | | GrUrUrArUrCrArAr | | GGCTAGT | | AAGTT | | |
| | | | GCTA | | | | | | CTCTTCAGGAGT | | CrUrUrGrArArArAr | 19717 | CCGTTAT | 19807 | AAAAT | 19897 | +++ |
| | | | GTCC | | | | | | CAGGTGC | | ArGrUrGrGrCrArCr | | CAACTTG | | AAGGC | | |
| | | | GTTA | | | | | | | | CrGrArGrUrCrGrGr | | AAAAAG | | TAGTC | | |
| | | | TCAA | | | | | | | | UrGrCrArCrGrGrCr | | TGGCACC | | CGTTA | | |
| | | | CTTG | | | | | | | | ArGrArCrUrUrCrUr | | GAGTCG | | TCAAC | | |
| | | | AAA | | | | | | | | CrUrUrCrArGrGrAr | | GTGCAC | | TTGAA | | |
| | | | AAGT | | | | | | | | GrUrCrArGrG*mU* | | GGCAGA | | AAAGT | | |
| | | | GGC | | | | | | | | mG*mC | | CTTCTCT | | GGCAC | | |
| | | | ACCG | | | | | | | | | | TCAGGA | | CGAGT | | |
| | | | AGTC | | | | | | | | | | GTCAGAT | | CGGTG | | |
| | | | GGTG | | | | | | | | | | GC | | CACGG | | |
| | | | | | | | | | | | | | | | CAGAC | | |
| | | | | | | | | | | | | | | | TTCTC | | |
| | | | | | | | | | | | | | | | GTCAG | | |
| | | | | | | | | | | | | | | | GAGTC | | |
| | | | | | | | | | | | | | | | AGATG | | |
| | | | | | | | | | | | | | | | C | | |

C

| | | | | | | | | | | | | | | | | | |
|---|---|---|---|---|---|---|---|---|---|---|---|---|---|---|---|---|---|
| HBB | CAT | 19268 | GTTT | 19358 | GAGT | 19448 | ACGGC | 19538 | CATGGTGCACCT | 19628 | mC*mA*mU*rGrGr | 19718 | CATGGTG | 19808 | CATGG | 19898 | +++ |
| 5_RT | GG | | TAGA | | CAGG | | AGACT | | GACTCCTGGTTT | | UrGrCrArCrCrUrGr | | CATCTGA | | TGCAT | | |
| 19_P | TGC | | GCTA | | TG | | TCTC | | TAGAGCTAGAAA | | ArCrUrCrCrUrGrGr | | CTCCTGG | | CTGAC | | |
| BS10 | AC | | GAA | | | | TTCAG | | TAGCAAGTTAAA | | UrUrUrUrArGrArGr | | TTTTAGA | | TCCTG | | |
| | CTG | | ATAG | | | | | | ATAAGGCTAGTC | | CrUrArGrArArArUr | | GCTAGA | | GTTTT | | |
| | ACT | | CAA | | | | | | CGTTATCAACTT | | ArGrCrArArGrUrUr | | AATAGC | | AGAGC | | |
| | CCT | | GTTA | | | | | | GAAAAAGTGGC | | ArArArArUrArArGr | | AAGTTA | | TAGAA | | |
| | G | | AAAT | | | | | | ACCGAGTCGGTG | | GrCrUrArGrUrCrCr | | AAATAA | | ATAGC | | |
| | | | AAG | | | | | | CACGGCAGACTT | | GrUrUrArUrCrArAr | | GGCTAGT | | AAGTT | | |
| | | | GCTA | | | | | | CTCTTCAGGAGT | | CrUrUrGrArArArAr | | CCGTTAT | | AAAAT | | |
| | | | GTCC | | | | | | CAGGTG | | ArGrUrGrGrCrArCr | | CAACTTG | | AAGGC | | |
| | | | GTTA | | | | | | | | CrGrArGrUrCrGrGr | | AAAAAG | | TAGTC | | |
| | | | TCAA | | | | | | | | UrGrCrArCrGrGrCr | | TGGCACC | | CGTTA | | |
| | | | CTTG | | | | | | | | ArGrArCrUrUrCrUr | | GAGTCG | | TCAAC | | |
| | | | AAA | | | | | | | | CrUrUrCrArGrGrAr | | GTGCAC | | TTGAA | | |
| | | | AAGT | | | | | | | | GrUrCrArG*mG*mU | | GGCAGA | | AAAGT | | |
| | | | GGC | | | | | | | | *mG | | CTTCTCT | | GGCAC | | |
| | | | ACCG | | | | | | | | | | TCAGGA | | CGAGT | | |
| | | | AGTC | | | | | | | | | | GTCAGAT | | CGGTG | | |
| | | | GGTG | | | | | | | | | | G | | CACGG | | |
| | | | C | | | | | | | | | | | | CAGAC | | |
| | | | | | | | | | | | | | | | TTCTC | | |
| | | | | | | | | | | | | | | | GTCAG | | |
| | | | | | | | | | | | | | | | GAGTC | | |
| | | | | | | | | | | | | | | | AGATG | | |
| HBB | CAT | 19269 | GTTT | 19359 | GAGT | | ACGGC | 19539 | CATGGTGCACCT | 19629 | mC*mA*mU*rGrGr | 19719 | CATGGTG | 19809 | CATGG | 19899 | +++ |
| 5_RT | GG | | TAGA | | CAGG | | AGACT | | GACTCCTGGTTT | | UrGrCrArCrCrUrGr | | CATCTGA | | TGCAT | | |
| 19_P | TGC | | GCTA | | T | | TCTC | | TAGAGCTAGAAA | | ArCrUrCrCrUrGrGr | | CTCCTGG | | CTGAC | | |
| BS9 | AC | | GAA | | | | TTCAG | | TAGCAAGTTAAA | | UrUrUrUrArGrArGr | | TTTTAGA | | TCCTG | | |
| | CTG | | ATAG | | | | | | ATAAGGCTAGTC | | CrUrArGrArArArUr | | GCTAGA | | GTTTT | | |
| | ACT | | CAA | | | | | | CGTTATCAACTT | | ArGrCrArArGrUrUr | | AATAGC | | AGAGC | | |
| | CCT | | GTTA | | | | | | GAAAAAGTGGC | | ArArArArUrArArGr | | AAGTTA | | TAGAA | | |
| | G | | AAAT | | | | | | ACCGAGTCGGTG | | GrCrUrArGrUrCrCr | | AAATAA | | ATAGC | | |
| | | | AAG | | | | | | CACGGCAGACTT | | GrUrUrArUrCrArAr | | GGCTAGT | | AAGTT | | |
| | | | GCTA | | | | | | CTCTTCAGGAGT | | CrUrUrGrArArArAr | | CCGTTAT | | AAAAT | | |
| | | | GTCC | | | | | | CAGGT | | ArGrUrGrGrCrArCr | | CAACTTG | | AAGGC | | |
| | | | GTTA | | | | | | | | CrGrArGrUrCrGrGr | | AAAAAG | | TAGTC | | |
| | | | TCAA | | | | | | | | UrGrCrArCrGrGrCr | | TGGCACC | | CGTTA | | |
| | | | CTTG | | | | | | | | ArGrArCrUrUrCrUr | | GAGTCG | | TCAAC | | |
| | | | AAA | | | | | | | | CrUrUrCrArGrGrAr | | GTGCAC | | TTGAA | | |
| | | | AAGT | | | | | | | | GrUrCrA*mG*mG* | | GGCAGA | | AAAGT | | |
| | | | GGC | | | | | | | | mU | | CTTCTCT | | GGCAC | | |
| | | | ACCG | | | | | | | | | | TCAGGA | | CGAGT | | |
| | | | AGTC | | | | | | | | | | GTCAGAT | | CGGTG | | |
| | | | GGTG | | | | | | | | | | | | CACGG | | |
| | | | C | | | | | | | | | | | | CAGAC | | |
| | | | | | | | | | | | | | | | TTCTC | | |
| | | | | | | | | | | | | | | | GTCAG | | |
| | | | | | | | | | | | | | | | GAGTC | | |
| | | | | | | | | | | | | | | | AGAT | | |
| HBB | CAT | 19270 | GTTT | 19360 | GAGT | | ACGGC | 19540 | CATGGTGCACCT | 19630 | mC*mA*mU*rGrGr | 19720 | CATGGTG | 19810 | CATGG | 19900 | +++ |
| 5_RT | GG | | TAGA | | CAGG | | AGACT | | GACTCCTGGTTT | | UrGrCrArCrCrUrGr | | CATCTGA | | TGCAT | | |
| 19_P | TGC | | GCTA | | | | TCTC | | TAGAGCTAGAAA | | ArCrUrCrCrUrGrGr | | CTCCTGG | | CTGAC | | |
| BS8 | AC | | GAA | | | | TTCAG | | TAGCAAGTTAAA | | UrUrUrUrArGrArGr | | TTTTAGA | | TCCTG | | |
| | CTG | | ATAG | | | | | | ATAAGGCTAGTC | | CrUrArGrArArArUr | | GCTAGA | | GTTTT | | |
| | ACT | | CAA | | | | | | CGTTATCAACTT | | ArGrCrArArGrUrUr | | AATAGC | | AGAGC | | |
| | CCT | | GTTA | | | | | | GAAAAAGTGGC | | ArArArArUrArArGr | | AAGTTA | | TAGAA | | |
| | G | | AAAT | | | | | | ACCGAGTCGGTG | | GrCrUrArGrUrCrCr | | AAATAA | | ATAGC | | |
| | | | AAG | | | | | | CACGGCAGACTT | | GrUrUrArUrCrArAr | | GGCTAGT | | AAGTT | | |
| | | | GCTA | | | | | | CTCTTCAGGAGT | | CrUrUrGrArArArAr | | CCGTTAT | | AAAAT | | |
| | | | GTCC | | | | | | CAGG | | ArGrUrGrGrCrArCr | | CAACTTG | | AAGGC | | |
| | | | GTTA | | | | | | | | CrGrArGrUrCrGrGr | | AAAAAG | | TAGTC | | |
| | | | TCAA | | | | | | | | UrGrCrArCrGrGrCr | | TGGCACC | | CGTTA | | |
| | | | CTTG | | | | | | | | ArGrArCrUrUrCrUr | | GAGTCG | | TCAAC | | |
| | | | AAA | | | | | | | | CrUrUrCrArGrGrAr | | GTGCAC | | TTGAA | | |
| | | | AAGT | | | | | | | | GrUrC*mA*mG*mG | | GGCAGA | | AAAGT | | |
| | | | GGC | | | | | | | | | | CTTCTCT | | GGCAC | | |
| | | | ACCG | | | | | | | | | | TCAGGA | | CGAGT | | |
| | | | AGTC | | | | | | | | | | GTCAGA | | CGGTG | | |
| | | | GGTG | | | | | | | | | | | | CACGG | | |
| | | | C | | | | | | | | | | | | CAGAC | | |
| | | | | | | | | | | | | | | | TTCTC | | |
| | | | | | | | | | | | | | | | GTCAG | | |
| | | | | | | | | | | | | | | | GAGTC | | |
| | | | | | | | | | | | | | | | AGA | | |
| HBB | CAT | 19271 | GTTT | 19361 | GAGT | 19451 | GGCAG | 19541 | CATGGTGCACCT | 19631 | mC*mA*mU*rGrGr | 19721 | CATGGTG | 19811 | CATGG | 19901 | +++ |
| 5_RT | GG | | TAGA | | CAGG | | ACTTC | | GACTCCTGGTTT | | UrGrCrArCrCrUrGr | | CATCTGA | | TGCAT | | |
| 17_P | TGC | | GCTA | | TGCA | | TCTTC | | TAGAGCTAGAAA | | ArCrUrCrCrUrGrGr | | CTCCTGG | | CTGAC | | |
| BS17 | AC | | GAA | | CCAT | | AG | | TAGCAAGTTAAA | | UrUrUrUrArGrArGr | | TTTTAGA | | TCCTG | | |
| | CTG | | ATAG | | G | | | | ATAAGGCTAGTC | | CrUrArGrArArArUr | | GCTAGA | | GTTTT | | |
| | ACT | | CAA | | | | | | CGTTATCAACTT | | ArGrCrArArGrUrUr | | AATAGC | | AGAGC | | |
| | CCT | | GTTA | | | | | | GAAAAAGTGGC | | ArArArArUrArArGr | | AAGTTA | | TAGAA | | |
| | G | | AAAT | | | | | | ACCGAGTCGGTG | | GrCrUrArGrUrCrCr | | AAATAA | | ATAGC | | |
| | | | AAG | | | | | | CGGCAGACTTCT | | GrUrUrArUrCrArAr | | GGCTAGT | | AAGTT | | |
| | | | GCTA | | | | | | CTTCAGGAGTCA | | CrUrUrGrArArArAr | | CCGTTAT | | AAAAT | | |
| | | | GTCC | | | | | | GGTGCACCATG | | ArGrUrGrGrCrArCr | | CAACTTG | | AAGGC | | |
| | | | GTTA | | | | | | | | CrGrArGrUrCrGrGr | | AAAAAG | | TAGTC | | |
| | | | TCAA | | | | | | | | UrGrCrGrGrCrArGr | | TGGCACC | | CGTTA | | |
| | | | CTTG | | | | | | | | ArCrUrUrCrUrCrUr | | GAGTCG | | TCAAC | | |
| | | | AAA | | | | | | | | UrCrArGrGrArGrUr | | GTGCGG | | TTGAA | | |
| | | | AAGT | | | | | | | | CrArGrGrUrGrCrAr | | CAGACTT | | AAAGT | | |
| | | | GGC | | | | | | | | CrC*mA*mU*mG | | CTCTTCA | | GGCAC | | |
| | | | ACCG | | | | | | | | | | GGAGTC | | CGAGT | | |
| | | | AGTC | | | | | | | | | | AGATGC | | CGGTG | | |
| | | | GGTG | | | | | | | | | | ACCATG | | CGGCA | | |
| | | | C | | | | | | | | | | | | GACTT | | |
| | | | | | | | | | | | | | | | CTCGT | | |
| | | | | | | | | | | | | | | | CAGGA | | |
| | | | | | | | | | | | | | | | GTCAG | | |
| | | | | | | | | | | | | | | | ATGCA | | |
| | | | | | | | | | | | | | | | CCATG | | |
| HBB | CAT | 19272 | GTTT | 19362 | GAGT | 19452 | GGCAG | 19542 | CATGGTGCACCT | 19632 | mC*mA*mU*rGrGr | 19722 | CATGGTG | 19812 | CATGG | 19902 | +++ |
| 5_RT | GG | | TAGA | | CAGG | | ACTTC | | GACTCCTGGTTT | | UrGrCrArCrCrUrGr | | CATCTGA | | TGCAT | | |
| 17_P | TGC | | GCTA | | TGCA | | TCTTC | | TAGAGCTAGAAA | | ArCrUrCrCrUrGrGr | | CTCCTGG | | CTGAC | | |
| BS16 | AC | | GAA | | CCAT | | AG | | TAGCAAGTTAAA | | UrUrUrUrArGrArGr | | TTTTAGA | | TCCTG | | |
| | CTG | | ATAG | | | | | | ATAAGGCTAGTC | | CrUrArGrArArArUr | | GCTAGA | | GTTTT | | |
| | ACT | | CAA | | | | | | CGTTATCAACTT | | ArGrCrArArGrUrUr | | AATAGC | | AGAGC | | |
| | CCT | | GTTA | | | | | | GAAAAAGTGGC | | ArArArArUrArArGr | | AAGTTA | | TAGAA | | |
| | G | | AAAT | | | | | | ACCGAGTCGGTG | | GrCrUrArGrUrCrCr | | AAATAA | | ATAGC | | |
| | | | AAG | | | | | | CGGCAGACTTCT | | GrUrUrArUrCrArAr | | GGCTAGT | | AAGTT | | |
| | | | GCTA | | | | | | CTTCAGGAGTCA | | CrUrUrGrArArArAr | | CCGTTAT | | AAAAT | | |
| | | | GTCC | | | | | | GGTGCACCAT | | ArGrUrGrGrCrArCr | | CAACTTG | | AAGGC | | |
| | | | GTTA | | | | | | | | CrGrArGrUrCrGrGr | | AAAAAG | | TAGTC | | |
| | | | TCAA | | | | | | | | UrGrCrGrGrCrArGr | | TGGCACC | | CGTTA | | |
| | | | CTTG | | | | | | | | ArCrUrUrCrUrCrUr | | GAGTCG | | TCAAC | | |
| | | | AAA | | | | | | | | UrCrArGrGrArGrUr | | GTGCGG | | TTGAA | | |
| | | | AAGT | | | | | | | | CrArGrGrUrGrCrAr | | CAGACTT | | AAAGT | | |
| | | | GGC | | | | | | | | C*mC*mA*mU | | CTCTTCA | | GGCAC | | |
| | | | ACCG | | | | | | | | | | GGAGTC | | CGAGT | | |
| | | | AGTC | | | | | | | | | | AGATGC | | CGGTG | | |
| | | | GGTG | | | | | | | | | | ACCAT | | CGGCA | | |
| | | | C | | | | | | | | | | | | GACTT | | |
| | | | | | | | | | | | | | | | CTCGT | | |
| | | | | | | | | | | | | | | | CAGGA | | |
| | | | | | | | | | | | | | | | GTCAG | | |
| | | | | | | | | | | | | | | | ATGCA | | |
| | | | | | | | | | | | | | | | CCAT | | |
| HBB | CAT | 19273 | GTTT | 19363 | GAGT | 19453 | GGCAG | 19543 | CATGGTGCACCT | 19633 | mC*mA*mU*rGrGr | 19723 | CATGGTG | 19813 | CATGG | 19903 | +++ |
| 5_RT | GG | | TAGA | | CAGG | | ACTTC | | GACTCCTGGTTT | | UrGrCrArCrCrUrGr | | CATCTGA | | TGCAT | | |
| 17_P | TGC | | GCTA | | TGCA | | TCTTC | | TAGAGCTAGAAA | | ArCrUrCrCrUrGrGr | | CTCCTGG | | CTGAC | | |
| BS15 | AC | | GAA | | CCA | | AG | | TAGCAAGTTAAA | | UrUrUrUrArGrArGr | | TTTTAGA | | TCCTG | | |
| | CTG | | ATAG | | | | | | ATAAGGCTAGTC | | CrUrArGrArArArUr | | GCTAGA | | GTTTT | | |
| | ACT | | CAA | | | | | | CGTTATCAACTT | | ArGrCrArArGrUrUr | | AATAGC | | AGAGC | | |
| | CCT | | GTTA | | | | | | GAAAAAGTGGC | | ArArArArUrArArGr | | AAGTTA | | TAGAA | | |
| | G | | AAAT | | | | | | ACCGAGTCGGTG | | GrCrUrArGrUrCrCr | | AAATAA | | ATAGC | | |
| | | | AAG | | | | | | CGGCAGACTTCT | | GrUrUrArUrCrArAr | | GGCTAGT | | AAGTT | | |
| | | | GCTA | | | | | | CTTCAGGAGTCA | | CrUrUrGrArArArAr | | CCGTTAT | | AAAAT | | |
| | | | GTCC | | | | | | GGTGCACCA | | ArGrUrGrGrCrArCr | | CAACTTG | | AAGGC | | |
| | | | GTTA | | | | | | | | CrGrArGrUrCrGrGr | | AAAAAG | | TAGTC | | |
| | | | TCAA | | | | | | | | UrGrCrGrGrCrArGr | | TGGCACC | | CGTTA | | |
| | | | CTTG | | | | | | | | ArCrUrUrCrUrCrUr | | GAGTCG | | TCAAC | | |
| | | | AAA | | | | | | | | UrCrArGrGrArGrUr | | GTGCGG | | TTGAA | | |
| | | | AAGT | | | | | | | | CrArGrGrUrGrCrA* | | CAGACTT | | AAAGT | | |
| | | | GGC | | | | | | | | mC*mC*mA | | CTCTTCA | | GGCAC | | |
| | | | ACCG | | | | | | | | | | GGAGTC | | CGAGT | | |
| | | | AGTC | | | | | | | | | | AGATGC | | CGGTG | | |
| | | | GGTG | | | | | | | | | | ACCA | | CGGCA | | |
| | | | C | | | | | | | | | | | | GACTT | | |
| | | | | | | | | | | | | | | | CTCGT | | |
| | | | | | | | | | | | | | | | CAGGA | | |
| | | | | | | | | | | | | | | | GTCAG | | |
| | | | | | | | | | | | | | | | ATGCA | | |
| | | | | | | | | | | | | | | | CCA | | |
| HBB | CAT | 19274 | GTTT | 19364 | GAGT | 19454 | GGCAG | 19544 | CATGGTGCACCT | 19634 | mC*mA*mU*rGrGr | 19724 | CATGGTG | 19814 | CATGG | 19904 | +++ |
| 5_RT | GG | | TAGA | | CAGG | | ACTTC | | GACTCCTGGTTT | | UrGrCrArCrCrUrGr | | CATCTGA | | TGCAT | | |
| 17_P | TGC | | GCTA | | TGCA | | TCTTC | | TAGAGCTAGAAA | | ArCrUrCrCrUrGrGr | | CTCCTGG | | CTGAC | | |
| BS14 | AC | | GAA | | CC | | AG | | TAGCAAGTTAAA | | UrUrUrUrArGrArGr | | TTTTAGA | | TCCTG | | |
| | CTG | | ATAG | | | | | | ATAAGGCTAGTC | | CrUrArGrArArArUr | | GCTAGA | | GTTTT | | |
| | ACT | | CAA | | | | | | CGTTATCAACTT | | ArGrCrArArGrUrUr | | AATAGC | | AGAGC | | |
| | CCT | | GTTA | | | | | | GAAAAAGTGGC | | ArArArArUrArArGr | | AAGTTA | | TAGAA | | |
| | G | | AAAT | | | | | | ACCGAGTCGGTG | | GrCrUrArGrUrCrCr | | AAATAA | | ATAGC | | |
| | | | AAG | | | | | | CGGCAGACTTCT | | GrUrUrArUrCrArAr | | GGCTAGT | | AAGTT | | |
| | | | GCTA | | | | | | CTTCAGGAGTCA | | CrUrUrGrArArArAr | | CCGTTAT | | AAAAT | | |
| | | | GTCC | | | | | | GGTGCACC | | ArGrUrGrGrCrArCr | | CAACTTG | | AAGGC | | |
| | | | GTTA | | | | | | | | CrGrArGrUrCrGrGr | | AAAAAG | | TAGTC | | |
| | | | TCAA | | | | | | | | UrGrCrGrGrCrArGr | | TGGCACC | | CGTTA | | |
| | | | CTTG | | | | | | | | ArCrUrUrCrUrCrUr | | GAGTCG | | TCAAC | | |
| | | | AAA | | | | | | | | UrCrArGrGrArGrUr | | GTGCGG | | TTGAA | | |
| | | | AAGT | | | | | | | | CrArGrGrUrGrC*mA | | CAGACTT | | AAAGT | | |
| | | | GGC | | | | | | | | *mC*mC | | CTCTTCA | | GGCAC | | |
| | | | ACCG | | | | | | | | | | GGAGTC | | CGAGT | | |
| | | | AGTC | | | | | | | | | | AGATGC | | CGGTG | | |
| | | | GGTG | | | | | | | | | | ACC | | CGGCA | | |
| | | | C | | | | | | | | | | | | GACTT | | |
| | | | | | | | | | | | | | | | CTCGT | | |
| | | | | | | | | | | | | | | | CAGGA | | |
| | | | | | | | | | | | | | | | GTCAG | | |
| | | | | | | | | | | | | | | | ATGCA | | |
| | | | | | | | | | | | | | | | CC | | |
| HBB | CAT | 19 | GTTT | 19365 | GAGT | 19455 | GGCAG | 19545 | CATGGTGCACCT | 19635 | mC*mA*mU*rGrGr | 19725 | CATGGTG | 19815 | CATGG | 199 | +++ |
| 5_RT | GG | 27 | TAGA | | CAGG | | ACTTC | | GACTCCTGGTTT | | UrGrCrArCrCrUrGr | | CATCTGA | | TGCAT | 05 | |
| 17_P | TGC | 5 | GCTA | | TGCA | | TCTTC | | TAGAGCTAGAAA | | ArCrUrCrCrUrGrGr | | CTCCTGG | | CTGAC | | |
| BS13 | AC | | GAA | | C | | AG | | TAGCAAGTTAAA | | UrUrUrUrArGrArGr | | TTTTAGA | | TCCTG | | |
| | CTG | | ATAG | | | | | | ATAAGGCTAGTC | | CrUrArGrArArArUr | | GCTAGA | | GTTTT | | |
| | ACT | | CAA | | | | | | CGTTATCAACTT | | ArGrCrArArGrUrUr | | AATAGC | | AGAGC | | |
| | CCT | | GTTA | | | | | | GAAAAAGTGGC | | ArArArArUrArArGr | | AAGTTA | | TAGAA | | |
| | G | | AAAT | | | | | | ACCGAGTCGGTG | | GrCrUrArGrUrCrCr | | AAATAA | | ATAGC | | |
| | | | AAG | | | | | | CGGCAGACTTCT | | GrUrUrArUrCrArAr | | GGCTAGT | | AAGTT | | |
| | | | GCTA | | | | | | CTTCAGGAGTCA | | CrUrUrGrArArArAr | | CCGTTAT | | AAAAT | | |
| | | | GTCC | | | | | | GGTGCAC | | ArGrUrGrGrCrArCr | | CAACTTG | | AAGGC | | |
| | | | GTTA | | | | | | | | CrGrArGrUrCrGrGr | | AAAAAG | | TAGTC | | |
| | | | TCAA | | | | | | | | UrGrCrGrGrCrArGr | | TGGCACC | | CGTTA | | |
| | | | CTTG | | | | | | | | ArCrUrUrCrUrCrUr | | GAGTCG | | TCAAC | | |
| | | | AAA | | | | | | | | UrCrArGrGrArGrUr | | GTGCGG | | TTGAA | | |
| | | | AAGT | | | | | | | | CrArGrGrUrG*mC* | | CAGACTT | | AAAGT | | |
| | | | GGC | | | | | | | | mA*mC | | CTCTTCA | | GGCAC | | |
| | | | ACCG | | | | | | | | | | GGAGTC | | CGAGT | | |
| | | | AGTC | | | | | | | | | | AGATGC | | CGGTG | | |
| | | | GGTG | | | | | | | | | | AC | | CGGCA | | |
| | | | C | | | | | | | | | | | | GACTT | | |
| | | | | | | | | | | | | | | | CTCGT | | |
| | | | | | | | | | | | | | | | CAGGA | | |
| | | | | | | | | | | | | | | | GTCAG | | |
| | | | | | | | | | | | | | | | ATGCA | | |
| | | | | | | | | | | | | | | | C | | |
| HBB | CAT | 19276 | GTTT | 19366 | GAGT | 19456 | GGCAG | 1954 | CATGGTGCACCT | 19636 | mC*mA*mU*rGrGr | 19726 | CATGGTG | 19816 | CATGG | 19906 | +++ |
| 5_RT | GG | | TAGA | | CAGG | | ACTTC | 6 | GACTCCTGGTTT | | UrGrCrArCrCrUrGr | | CATCTGA | | TGCAT | | |
| 17_P | TGC | | GCTA | | TGCA | | TCTTC | | TAGAGCTAGAAA | | ArCrUrCrCrUrGrGr | | CTCCTGG | | CTGAC | | |
| BS12 | AC | | GAA | | | | AG | | TAGCAAGTTAAA | | UrUrUrUrArGrArGr | | TTTTAGA | | TCCTG | | |
| | CTG | | ATAG | | | | | | ATAAGGCTAGTC | | CrUrArGrArArArUr | | GCTAGA | | GTTTT | | |
| | ACT | | CAA | | | | | | CGTTATCAACTT | | ArGrCrArArGrUrUr | | AATAGC | | AGAGC | | |
| | CCT | | GTTA | | | | | | GAAAAAGTGGC | | ArArArArUrArArGr | | AAGTTA | | TAGAA | | |
| | G | | AAAT | | | | | | ACCGAGTCGGTG | | GrCrUrArGrUrCrCr | | AAATAA | | ATAGC | | |
| | | | AAG | | | | | | CGGCAGACTTCT | | GrUrUrArUrCrArAr | | GGCTAGT | | AAGTT | | |
| | | | GCTA | | | | | | | | CrUrUrGrArArArAr | | CCGTTAT | | AAAAT | | |
| | | | GTCC | | | | | | CTTCAGGAGTCA | | ArGrUrGrGrCrArCr | | CAACTTG | | AAGGC | | |
| | | | GTTA | | | | | | GGTGCA | | CrGrArGrUrCrGrGr | | AAAAAG | | TAGTC | | |
| | | | TCAA | | | | | | | | UrGrCrGrGrCrArGr | | TGGCACC | | CGTTA | | |
| | | | CTTG | | | | | | | | ArCrUrUrCrUrCrUr | | GAGTCG | | TCAAC | | |
| | | | AAA | | | | | | | | UrCrArGrGrArGrUr | | GTGCGG | | TTGAA | | |
| | | | AAGT | | | | | | | | CrArGrGrU*mG*mC | | CAGACTT | | AAAGT | | |
| | | | GGC | | | | | | | | *mA | | CTCTTCA | | GGCAC | | |
| | | | ACCG | | | | | | | | | | GGAGTC | | CGAGT | | |
| | | | AGTC | | | | | | | | | | AGATGC | | CGGTG | | |
| | | | GGTG | | | | | | | | | | A | | CGGCA | | |
| | | | C | | | | | | | | | | | | GACTT | | |
| | | | | | | | | | | | | | | | CTCGT | | |
| | | | | | | | | | | | | | | | CAGGA | | |
| | | | | | | | | | | | | | | | GTCAG | | |
| | | | | | | | | | | | | | | | ATGCA | | |
| HBB | CAT | 19277 | GTTT | 19367 | GAGT | 19457 | GGCAG | 19547 | CATGGTGCACCT | 19637 | mC*mA*mU*rGrGr | 19727 | CATGGTG | 19817 | CATGG | 19907 | +++ |
| 5_RT | GG | | TAGA | | CAGG | | ACTTC | | GACTCCTGGTTT | | UrGrCrArCrCrUrGr | | CATCTGA | | TGCAT | | |
| 17_P | TGC | | GCTA | | TGC | | TCTTC | | TAGAGCTAGAAA | | ArCrUrCrCrUrGrGr | | CTCCTGG | | CTGAC | | |
| BS11 | AC | | GAA | | | | AG | | TAGCAAGTTAAA | | UrUrUrUrArGrArGr | | TTTTAGA | | TCCTG | | |
| | CTG | | ATAG | | | | | | ATAAGGCTAGTC | | CrUrArGrArArArUr | | GCTAGA | | GTTTT | | |
| | ACT | | CAA | | | | | | CGTTATCAACTT | | ArGrCrArArGrUrUr | | AATAGC | | AGAGC | | |
| | CCT | | GTTA | | | | | | GAAAAAGTGGC | | ArArArArUrArArGr | | AAGTTA | | TAGAA | | |
| | G | | AAAT | | | | | | ACCGAGTCGGTG | | GrCrUrArGrUrCrCr | | AAATAA | | ATAGC | | |
| | | | AAG | | | | | | CGGCAGACTTCT | | GrUrUrArUrCrArAr | | GGCTAGT | | AAGTT | | |
| | | | GCTA | | | | | | CTTCAGGAGTCA | | CrUrUrGrArArArAr | | CCGTTAT | | AAAAT | | |
| | | | GTCC | | | | | | GGTGC | | ArGrUrGrGrCrArCr | | CAACTTG | | AAGGC | | |
| | | | GTTA | | | | | | | | CrGrArGrUrCrGrGr | | AAAAAG | | TAGTC | | |
| | | | TCAA | | | | | | | | UrGrCrGrGrCrArGr | | TGGCACC | | CGTTA | | |
| | | | CTTG | | | | | | | | ArCrUrUrCrUrCrUr | | GAGTCG | | TCAAC | | |
| | | | AAA | | | | | | | | UrCrArGrGrArGrUr | | GTGCGG | | TTGAA | | |
| | | | AAGT | | | | | | | | CrArGrG*mU*mG* | | CAGACTT | | AAAGT | | |
| | | | GGC | | | | | | | | mC | | CTCTTCA | | GGCAC | | |
| | | | ACCG | | | | | | | | | | GGAGTC | | CGAGT | | |
| | | | AGTC | | | | | | | | | | AGATGC | | CGGTG | | |
| | | | GGTG | | | | | | | | | | | | CGGCA | | |
| | | | C | | | | | | | | | | | | GACTT | | |
| | | | | | | | | | | | | | | | CTCGT | | |
| | | | | | | | | | | | | | | | CAGGA | | |
| | | | | | | | | | | | | | | | GTCAG | | |
| | | | | | | | | | | | | | | | ATGC | | |
| HBB | CAT | 19278 | GTTT | 19368 | GAGT | 19458 | GGCAG | 19548 | CATGGTGCACCT | 19638 | mC*mA*mU*rGrGr | 19728 | CATGGTG | 19818 | CATGG | 19908 | +++ |
| 5_RT | GG | | TAGA | | CAGG | | ACTTC | | GACTCCTGGTTT | | UrGrCrArCrCrUrGr | | CATCTGA | | TGCAT | | |
| 17_P | TGC | | GCTA | | TG | | TCTTC | | TAGAGCTAGAAA | | ArCrUrCrCrUrGrGr | | CTCCTGG | | CTGAC | | |
| BS10 | AC | | GAA | | | | AG | | TAGCAAGTTAAA | | UrUrUrUrArGrArGr | | TTTTAGA | | TCCTG | | |
| | CTG | | ATAG | | | | | | ATAAGGCTAGTC | | CrUrArGrArArArUr | | GCTAGA | | GTTTT | | |
| | ACT | | CAA | | | | | | CGTTATCAACTT | | ArGrCrArArGrUrUr | | AATAGC | | AGAGC | | |
| | CCT | | GTTA | | | | | | GAAAAAGTGGC | | ArArArArUrArArGr | | AAGTTA | | TAGAA | | |
| | G | | AAAT | | | | | | ACCGAGTCGGTG | | GrCrUrArGrUrCrCr | | AAATAA | | ATAGC | | |
| | | | AAG | | | | | | CGGCAGACTTCT | | GrUrUrArUrCrArAr | | GGCTAGT | | AAGTT | | |
| | | | GCTA | | | | | | CTTCAGGAGTCA | | CrUrUrGrArArArAr | | CCGTTAT | | AAAAT | | |
| | | | TCC | | | | | | GGTG | | ArGrUrGrGrCrArCr | | CAACTTG | | AAGGC | | |
| | | | GTTA | | | | | | | | CrGrArGrUrCrGrGr | | AAAAAG | | TAGTC | | |
| | | | TCAA | | | | | | | | UrGrCrGrGrCrArGr | | TGGCACC | | CGTTA | | |
| | | | CTTG | | | | | | | | ArCrUrUrCrUrCrUr | | GAGTCG | | TCAAC | | |
| | | | AAA | | | | | | | | UrCrArGrGrArGrUr | | GTGCGG | | TTGAA | | |
| | | | AAGT | | | | | | | | CrArG*mG*mU*mG | | CAGACTT | | AAAGT | | |
| | | | GGC | | | | | | | | | | CTCTTCA | | GGCAC | | |
| | | | ACCG | | | | | | | | | | GGAGTC | | CGAGT | | |
| | | | AGTC | | | | | | | | | | AGATG | | CGGTG | | |
| | | | GGTG | | | | | | | | | | | | CGGCA | | |
| | | | C | | | | | | | | | | | | GACTT | | |
| | | | | | | | | | | | | | | | CTCGT | | |
| | | | | | | | | | | | | | | | CAGGA | | |
| | | | | | | | | | | | | | | | GTCAG | | |
| | | | | | | | | | | | | | | | ATG | | |
| HBB | CAT | 19279 | GTTT | 19369 | GAGT | 19559 | GGCAG | 19549 | CATGGTGCACCT | 19639 | mC*mA*mU*rGrGr | 19729 | CATGGTG | 19819 | CATGG | 19909 | +++ |
| 5_RT | GG | | TAGA | | CAGG | | ACTTC | | GACTCCTGGTTT | | UrGrCrArCrCrUrGr | | CATCTGA | | TGCAT | | |
| 17_P | TGC | | GCTA | | T | | TCTTC | | TAGAGCTAGAAA | | ArCrUrCrCrUrGrGr | | CTCCTGG | | CTGAC | | |
| BS9 | AC | | GAA | | | | AG | | TAGCAAGTTAAA | | UrUrUrUrArGrArGr | | TTTTAGA | | TCCTG | | |
| | CTG | | ATAG | | | | | | ATAAGGCTAGTC | | CrUrArGrArArArUr | | GCTAGA | | GTTTT | | |
| | ACT | | CAA | | | | | | CGTTATCAACTT | | ArGrCrArArGrUrUr | | AATAGC | | AGAGC | | |
| | CCT | | GTTA | | | | | | GAAAAAGTGGC | | ArArArArUrArArGr | | AAGTTA | | TAGAA | | |
| | G | | AAAT | | | | | | ACCGAGTCGGTG | | GrCrUrArGrUrCrCr | | AAATAA | | ATAGC | | |
| | | | AAG | | | | | | CGGCAGACTTCT | | GrUrUrArUrCrArAr | | GGCTAGT | | AAGTT | | |
| | | | GCTA | | | | | | CTTCAGGAGTCA | | CrUrUrGrArArArAr | | CCGTTAT | | AAAAT | | |
| | | | GTCC | | | | | | GGT | | ArGrUrGrGrCrArCr | | CAACTTG | | AAGGC | | |
| | | | GTTA | | | | | | | | CrGrArGrUrCrGrGr | | AAAAAG | | TAGTC | | |
| | | | TCAA | | | | | | | | UrGrCrGrGrCrArGr | | TGGCACC | | CGTTA | | |
| | | | CTTG | | | | | | | | ArCrUrUrCrUrCrUr | | GAGTCG | | TCAAC | | |
| | | | AAA | | | | | | | | UrCrArGrGrArGrUr | | GTGCGG | | TTGAA | | |
| | | | AAGT | | | | | | | | CrA*mG*mG*mU | | CAGACTT | | AAAGT | | |
| | | | GGC | | | | | | | | | | CTCTTCA | | GGCAC | | |
| | | | ACCG | | | | | | | | | | GGAGTC | | CGAGT | | |
| | | | AGTC | | | | | | | | | | AGAT | | CGGTG | | |
| | | | GGTG | | | | | | | | | | | | CGGCA | | |
| | | | C | | | | | | | | | | | | GACTT | | |
| | | | | | | | | | | | | | | | CTCGT | | |
| | | | | | | | | | | | | | | | CAGGA | | |
| | | | | | | | | | | | | | | | GTCAG | | |
| | | | | | | | | | | | | | | | AT | | |
| HBB | CAT | 19280 | GTTT | 19370 | GAGT | 19560 | GGCAG | 19550 | CATGGTGCACCT | 19640 | mC*mA*mU*rGrGr | 19730 | CATGGTG | 19820 | CATGG | 19910 | +++ |
| 5_RT | GG | | TAGA | | CAGG | | ACTTC | | GACTCCTGGTTT | | UrGrCrArCrCrUrGr | | CATCTGA | | TGCAT | | |
| 17_P | TGC | | GCTA | | | | TCTTC | | TAGAGCTAGAAA | | ArCrUrCrCrUrGrGr | | CTCCTGG | | CTGAC | | |
| BS8 | AC | | GAA | | | | AG | | TAGCAAGTTAAA | | UrUrUrUrArGrArGr | | TTTTAGA | | TCCTG | | |
| | CTG | | ATAG | | | | | | ATAAGGCTAGTC | | CrUrArGrArArArUr | | GCTAGA | | GTTTT | | |
| | ACT | | CAA | | | | | | CGTTATCAACTT | | ArGrCrArArGrUrUr | | AATAGC | | AGAGC | | |
| | CCT | | GTTA | | | | | | GAAAAAGTGGC | | ArArArArUrArArGr | | AAGTTA | | TAGAA | | |
| | G | | AAAT | | | | | | ACCGAGTCGGTG | | GrCrUrArGrUrCrCr | | AAATAA | | ATAGC | | |
| | | | AAG | | | | | | CGGCAGACTTCT | | GrUrUrArUrCrArAr | | GGCTAGT | | AAGTT | | |
| | | | GCTA | | | | | | CTTCAGGAGTCA | | CrUrUrGrArArArAr | | CCGTTAT | | AAAAT | | |
| | | | GTCC | | | | | | GG | | ArGrUrGrGrCrArCr | | CAACTTG | | AAGGC | | |
| | | | GTTA | | | | | | | | CrGrArGrUrCrGrGr | | AAAAAG | | TAGTC | | |
| | | | TCAA | | | | | | | | UrGrCrGrGrCrArGr | | TGGCACC | | CGTTA | | |
| | | | CTTG | | | | | | | | ArCrUrUrCrUrCrUr | | GAGTCG | | TCAAC | | |
| | | | AAA | | | | | | | | UrCrArGrGrArGrUr | | GTGCGG | | TTGAA | | |
| | | | AAGT | | | | | | | | C*mA*mG*mG | | CAGACTT | | AAAGT | | |
| | | | GGC | | | | | | | | | | CTCTTCA | | GGCAC | | |
| | | | ACCG | | | | | | | | | | GGAGTC | | CGAGT | | |
| | | | AGTC | | | | | | | | | | AGA | | CGGTG | | |
| | | | GGTG | | | | | | | | | | | | CGGCA | | |
| | | | C | | | | | | | | | | | | GACTT | | |
| | | | | | | | | | | | | | | | CTCGT | | |
| | | | | | | | | | | | | | | | CAGGA | | |
| | | | | | | | | | | | | | | | GTCAG | | |
| | | | | | | | | | | | | | | | A | | |
| HBB | CAT | 19281 | GTTT | 19371 | GAGT | 19461 | GCAGA | 19551 | CATGGTGCACCT | 19641 | mC*mA*mU*rGrGr | 19731 | CATGGTG | 19821 | CATGG | 19911 | +++ |
| 5_RT | GG | | TAGA | | CAGG | | CTTCT | | GACTCCTGGTTT | | UrGrCrArCrCrUrGr | | CATCTGA | | TGCAT | | |
| | TGC | | GCTA | | TGCA | | CTTCA | | TAGAGCTAGAAA | | ArCrUrCrCrUrGrGr | | CTCCTGG | | CTGAC | | |
| 16_P | AC | | GAA | | CCAT | | G | | TAGCAAGTTAAA | | UrUrUrUrArGrArGr | | TTTTAGA | | TCCTG | | |
| BS17 | CTG | | ATAG | | G | | | | ATAAGGCTAGTC | | CrUrArGrArArArUr | | GCTAGA | | GTTTT | | |
| | ACT | | CAA | | | | | | CGTTATCAACTT | | ArGrCrArArGrUrUr | | AATAGC | | AGAGC | | |
| | CCT | | GTTA | | | | | | GAAAAAGTGGC | | ArArArArUrArArGr | | AAGTTA | | TAGAA | | |
| | G | | AAAT | | | | | | ACCGAGTCGGTG | | GrCrUrArGrUrCrCr | | AAATAA | | ATAGC | | |
| | | | AAG | | | | | | CGCAGACTTCTC | | GrUrUrArUrCrArAr | | GGCTAGT | | AAGTT | | |
| | | | GCTA | | | | | | TTCAGGAGTCAG | | CrUrUrGrArArArAr | | CCGTTAT | | AAAAT | | |
| | | | GTCC | | | | | | GTGCACCATG | | ArGrUrGrGrCrArCr | | CAACTTG | | AAGGC | | |
| | | | GTTA | | | | | | | | CrGrArGrUrCrGrGr | | AAAAAG | | TAGTC | | |
| | | | TCAA | | | | | | | | UrGrCrGrCrArGrAr | | TGGCACC | | CGTTA | | |
| | | | CTTG | | | | | | | | CrUrUrCrUrCrUrUrC | | GAGTCG | | TCAAC | | |
| | | | AAA | | | | | | | | rArGrGrArGrUrCrAr | | GTGCGC | | TTGAA | | |
| | | | AAGT | | | | | | | | GrGrUrGrCrArCrC* | | AGACTTC | | AAAGT | | |
| | | | GGC | | | | | | | | mA*mU*mG | | TCTTCAG | | GGCAC | | |
| | | | ACCG | | | | | | | | | | GAGTCA | | CGAGT | | |
| | | | AGTC | | | | | | | | | | GATGCA | | CGGTG | | |
| | | | GGTG | | | | | | | | | | CCATG | | CGCAG | | |
| | | | C | | | | | | | | | | | | ACTTC | | |
| | | | | | | | | | | | | | | | TCGTC | | |
| | | | | | | | | | | | | | | | AGGAG | | |
| | | | | | | | | | | | | | | | TCAGA | | |
| | | | | | | | | | | | | | | | TGCAC | | |
| | | | | | | | | | | | | | | | CATG | | |
| HBB | CAT | 19282 | GTTT | 19372 | GAGT | 19462 | GCAGA | 19552 | CATGGTGCACCT | 19642 | mC*mA*mU*rGrGr | 19732 | CATGGTG | 19822 | CATGG | 19912 | +++ |
| 5_RT | GG | | TAGA | | CAGG | | CTTCT | | GACTCCTGGTTT | | UrGrCrArCrCrUrGr | | CATCTGA | | TGCAT | | |
| 16_P | TGC | | GCTA | | TGCA | | CTTCA | | TAGAGCTAGAAA | | ArCrUrCrCrUrGrGr | | CTCCTGG | | CTGAC | | |
| BS16 | AC | | GAA | | CCAT | | G | | TAGCAAGTTAAA | | UrUrUrUrArGrArGr | | TTTTAGA | | TCCTG | | |
| | CTG | | ATAG | | | | | | ATAAGGCTAGTC | | CrUrArGrArArArUr | | GCTAGA | | GTTTT | | |
| | ACT | | CAA | | | | | | CGTTATCAACTT | | ArGrCrArArGrUrUr | | AATAGC | | AGAGC | | |
| | CCT | | GTTA | | | | | | GAAAAAGTGGC | | ArArArArUrArArGr | | AAGTTA | | TAGAA | | |
| | G | | AAAT | | | | | | ACCGAGTCGGTG | | GrCrUrArGrUrCrCr | | AAATAA | | ATAGC | | |
| | | | AAG | | | | | | CGCAGACTTCTC | | GrUrUrArUrCrArAr | | GGCTAGT | | AAGTT | | |
| | | | GCTA | | | | | | TTCAGGAGTCAG | | CrUrUrGrArArArAr | | CCGTTAT | | AAAAT | | |
| | | | GTCC | | | | | | GTGCACCAT | | ArGrUrGrGrCrArCr | | CAACTTG | | AAGGC | | |
| | | | GTTA | | | | | | | | CrGrArGrUrCrGrGr | | AAAAAG | | TAGTC | | |
| | | | TCAA | | | | | | | | UrGrCrGrCrArGrAr | | TGGCACC | | CGTTA | | |
| | | | CTTG | | | | | | | | CrUrUrCrUrCrUrUrC | | GAGTCG | | TCAAC | | |
| | | | AAA | | | | | | | | rArGrGrArGrUrCrAr | | GTGCGC | | TTGAA | | |
| | | | AAGT | | | | | | | | GrGrUrGrCrArC*mC | | AGACTTC | | AAAGT | | |
| | | | GGC | | | | | | | | *mA*mU | | TCTTCAG | | GGCAC | | |
| | | | ACCG | | | | | | | | | | GAGTCA | | CGAGT | | |
| | | | AGTC | | | | | | | | | | GATGCA | | CGGTG | | |
| | | | GGTG | | | | | | | | | | CCAT | | CGCAG | | |
| | | | C | | | | | | | | | | | | ACTTC | | |
| | | | | | | | | | | | | | | | TCGTC | | |
| | | | | | | | | | | | | | | | AGGAG | | |
| | | | | | | | | | | | | | | | TCAGA | | |
| | | | | | | | | | | | | | | | TGCAC | | |
| | | | | | | | | | | | | | | | CAT | | |
| HBB | CAT | 19283 | GTTT | 19373 | GAGT | 19463 | GCAGA | 19553 | CATGGTGCACCT | 19643 | mC*mA*mU*rGrGr | 19733 | CATGGTG | 19823 | CATGG | 19913 | +++ |
| 5_RT | GG | | TAGA | | CAGG | | CTTCT | | GACTCCTGGTTT | | UrGrCrArCrCrUrGr | | CATCTGA | | TGCAT | | |
| 16_P | TGC | | GCTA | | TGCA | | CTTCA | | TAGAGCTAGAAA | | ArCrUrCrCrUrGrGr | | CTCCTGG | | CTGAC | | |
| BS15 | AC | | GAA | | CCA | | G | | TAGCAAGTTAAA | | UrUrUrUrArGrArGr | | TTTTAGA | | TCCTG | | |
| | CTG | | ATAG | | | | | | ATAAGGCTAGTC | | CrUrArGrArArArUr | | GCTAGA | | GTTTT | | |
| | ACT | | CAA | | | | | | CGTTATCAACTT | | ArGrCrArArGrUrUr | | AATAGC | | AGAGC | | |
| | CCT | | GTTA | | | | | | GAAAAAGTGGC | | ArArArArUrArArGr | | AAGTTA | | TAGAA | | |
| | G | | AAAT | | | | | | ACCGAGTCGGTG | | GrCrUrArGrUrCrCr | | AAATAA | | ATAGC | | |
| | | | AAG | | | | | | CGCAGACTTCTC | | GrUrUrArUrCrArAr | | GGCTAGT | | AAGTT | | |
| | | | GCTA | | | | | | TTCAGGAGTCAG | | CrUrUrGrArArArAr | | CCGTTAT | | AAAAT | | |
| | | | GTCC | | | | | | GTGCACCA | | ArGrUrGrGrCrArCr | | CAACTTG | | AAGGC | | |
| | | | GTTA | | | | | | | | CrGrArGrUrCrGrGr | | AAAAAG | | TAGTC | | |
| | | | TCAA | | | | | | | | UrGrCrGrCrArGrAr | | TGGCACC | | CGTTA | | |
| | | | CTTG | | | | | | | | CrUrUrCrUrCrUrUrC | | GAGTCG | | TCAAC | | |
| | | | AAA | | | | | | | | rArGrGrArGrUrCrAr | | GTGCGC | | TTGAA | | |
| | | | AAGT | | | | | | | | GrGrUrGrCrA*mC* | | AGACTTC | | AAAGT | | |
| | | | GGC | | | | | | | | mC*mA | | TCTTCAG | | GGCAC | | |
| | | | ACCG | | | | | | | | | | GAGTCA | | CGAGT | | |
| | | | AGTC | | | | | | | | | | GATGCA | | CGGTG | | |
| | | | GGTG | | | | | | | | | | CCA | | CGCAG | | |
| | | | C | | | | | | | | | | | | ACTTC | | |
| | | | | | | | | | | | | | | | TCGTC | | |
| | | | | | | | | | | | | | | | AGGAG | | |
| | | | | | | | | | | | | | | | TCAGA | | |
| | | | | | | | | | | | | | | | TGCAC | | |
| | | | | | | | | | | | | | | | CA | | |
| HBB | CAT | 19284 | GTTT | 19374 | GAGT | 19464 | GCAGA | 19554 | CATGGTGCACCT | 19644 | mC*mA*mU*rGrGr | 19734 | CATGGTG | 19824 | CATGG | 19914 | +++ |
| 5_RT | GG | | TAGA | | CAGG | | CTTCT | | GACTCCTGGTTT | | UrGrCrArCrCrUrGr | | CATCTGA | | TGCAT | | |
| 16_P | TGC | | GCTA | | TGCA | | CTTCA | | TAGAGCTAGAAA | | ArCrUrCrCrUrGrGr | | CTCCTGG | | CTGAC | | |
| BS14 | AC | | GAA | | CC | | G | | TAGCAAGTTAAA | | UrUrUrUrArGrArGr | | TTTTAGA | | TCCTG | | |
| | CTG | | ATAG | | | | | | ATAAGGCTAGTC | | CrUrArGrArArArUr | | GCTAGA | | GTTTT | | |
| | ACT | | CAA | | | | | | CGTTATCAACTT | | ArGrCrArArGrUrUr | | AATAGC | | AGAGC | | |
| | CCT | | GTTA | | | | | | GAAAAAGTGGC | | ArArArArUrArArGr | | AAGTTA | | TAGAA | | |
| | G | | AAAT | | | | | | ACCGAGTCGGTG | | GrCrUrArGrUrCrCr | | AAATAA | | ATAGC | | |
| | | | AAG | | | | | | CGCAGACTTCTC | | GrUrUrArUrCrArAr | | GGCTAGT | | AAGTT | | |
| | | | GCTA | | | | | | TTCAGGAGTCAG | | CrUrUrGrArArArAr | | CCGTTAT | | AAAAT | | |
| | | | GTCC | | | | | | GTGCACC | | ArGrUrGrGrCrArCr | | CAACTTG | | AAGGC | | |
| | | | GTTA | | | | | | | | CrGrArGrUrCrGrGr | | AAAAAG | | TAGTC | | |
| | | | TCAA | | | | | | | | UrGrCrGrCrArGrAr | | TGGCACC | | CGTTA | | |
| | | | CTTG | | | | | | | | CrUrUrCrUrCrUrUrC | | GAGTCG | | TCAAC | | |
| | | | AAA | | | | | | | | rArGrGrArGrUrCrAr | | GTGCGC | | TTGAA | | |
| | | | AAGT | | | | | | | | GrGrUrGrC*mA*mC | | AGACTTC | | AAAGT | | |
| | | | GGC | | | | | | | | *mC | | TCTTCAG | | GGCAC | | |
| | | | ACCG | | | | | | | | | | GAGTCA | | CGAGT | | |
| | | | AGTC | | | | | | | | | | GATGCA | | CGGTG | | |
| | | | GGTG | | | | | | | | | | CC | | CGCAG | | |
| | | | C | | | | | | | | | | | | ACTTC | | |
| | | | | | | | | | | | | | | | TCGTC | | |
| | | | | | | | | | | | | | | | AGGAG | | |
| | | | | | | | | | | | | | | | TCAGA | | |
| | | | | | | | | | | | | | | | TGCAC | | |
| | | | | | | | | | | | | | | | C | | |
| HBB | CAT | 19285 | GTTT | 19375 | GAGT | 19465 | GCAGA | 19555 | CATGGTGCACCT | 19645 | mC*mA*mU*rGrGr | 19735 | CATGGTG | 19825 | CATGG | 19915 | +++ |
| 5_RT | GG | | TAGA | | CAGG | | CTTCT | | GACTCCTGGTTT | | UrGrCrArCrCrUrGr | | CATCTGA | | TGCAT | | |
| 16_P | TGC | | GCTA | | TGCA | | CTTCA | | TAGAGCTAGAAA | | ArCrUrCrCrUrGrGr | | CTCCTGG | | CTGAC | | |
| BS13 | AC | | GAA | | C | | G | | TAGCAAGTTAAA | | UrUrUrUrArGrArGr | | TTTTAGA | | TCCTG | | |
| | CTG | | ATAG | | | | | | ATAAGGCTAGTC | | CrUrArGrArArArUr | | GCTAGA | | GTTTT | | |
| | ACT | | CAA | | | | | | CGTTATCAACTT | | ArGrCrArArGrUrUr | | AATAGC | | AGAGC | | |
| | CCT | | GTTA | | | | | | GAAAAAGTGGC | | ArArArArUrArArGr | | AAGTTA | | TAGAA | | |
| | G | | AAAT | | | | | | ACCGAGTCGGTG | | GrCrUrArGrUrCrCr | | AAATAA | | ATAGC | | |
| | | | AAG | | | | | | CGCAGACTTCTC | | GrUrUrArUrCrArAr | | GGCTAGT | | AAGTT | | |
| | | | GCTA | | | | | | TTCAGGAGTCAG | | CrUrUrGrArArArAr | | CCGTTAT | | AAAAT | | |
| | | | GTCC | | | | | | GTGCAC | | ArGrUrGrGrCrArCr | | CAACTTG | | AAGGC | | |
| | | | GTTA | | | | | | | | CrGrArGrUrCrGrGr | | AAAAAG | | TAGTC | | |
| | | | TCAA | | | | | | | | UrGrCrGrCrArGrAr | | TGGCACC | | CGTTA | | |
| | | | CTTG | | | | | | | | CrUrUrCrUrCrUrUrC | | GAGTCG | | TCAAC | | |
| | | | AAA | | | | | | | | rArGrGrArGrUrCrAr | | GTGCGC | | TTGAA | | |
| | | | AAGT | | | | | | | | GrGrUrG*mC*mA* | | AGACTTC | | AAAGT | | |
| | | | GGC | | | | | | | | mC | | TCTTCAG | | GGCAC | | |
| | | | ACCG | | | | | | | | | | GAGTCA | | CGAGT | | |
| | | | AGTC | | | | | | | | | | GATGCA | | CGGTG | | |
| | | | GGTG | | | | | | | | | | C | | CGCAG | | |
| | | | C | | | | | | | | | | | | ACTTC | | |
| | | | | | | | | | | | | | | | TCGTC | | |
| | | | | | | | | | | | | | | | AGGAG | | |
| | | | | | | | | | | | | | | | TCAGA | | |
| | | | | | | | | | | | | | | | TGCAC | | |
| HBB | CAT | 19286 | GTTT | 19376 | GAGT | 19466 | GCAGA | 19556 | CATGGTGCACCT | 19646 | mC*mA*mU*rGrGr | 19736 | CATGGTG | 19826 | CATGG | 19916 | +++ |
| 5_RT | GG | | TAGA | | CAGG | | CTTCT | | GACTCCTGGTTT | | UrGrCrArCrCrUrGr | | CATCTGA | | TGCAT | | |
| 16_P | TGC | | GCTA | | TGCA | | CTTCA | | TAGAGCTAGAAA | | ArCrUrCrCrUrGrGr | | CTCCTGG | | CTGAC | | |
| BS12 | AC | | GAA | | | | G | | TAGCAAGTTAAA | | UrUrUrUrArGrArGr | | TTTTAGA | | TCCTG | | |
| | CTG | | ATAG | | | | | | ATAAGGCTAGTC | | CrUrArGrArArArUr | | GCTAGA | | GTTTT | | |
| | ACT | | CAA | | | | | | CGTTATCAACTT | | ArGrCrArArGrUrUr | | AATAGC | | AGAGC | | |
| | CCT | | GTTA | | | | | | GAAAAAGTGGC | | ArArArArUrArArGr | | AAGTTA | | TAGAA | | |
| | G | | AAAT | | | | | | ACCGAGTCGGTG | | GrCrUrArGrUrCrCr | | AAATAA | | ATAGC | | |
| | | | AAG | | | | | | CGCAGACTTCTC | | GrUrUrArUrCrArAr | | GGCTAGT | | AAGTT | | |
| | | | GCTA | | | | | | TTCAGGAGTCAG | | CrUrUrGrArArArAr | | CCGTTAT | | AAAAT | | |
| | | | GTCC | | | | | | GTGCA | | ArGrUrGrGrCrArCr | | CAACTTG | | AAGGC | | |
| | | | GTTA | | | | | | | | CrGrArGrUrCrGrGr | | AAAAAG | | TAGTC | | |
| | | | TCAA | | | | | | | | UrGrCrGrCrArGrAr | | TGGCACC | | CGTTA | | |
| | | | CTTG | | | | | | | | CrUrUrCrUrCrUrUrC | | GAGTCG | | TCAAC | | |
| | | | AAA | | | | | | | | rArGrGrArGrUrCrAr | | GTGCGC | | TTGAA | | |
| | | | AAGT | | | | | | | | GrGrU*mG*mC*mA | | AGACTTC | | AAAGT | | |
| | | | GGC | | | | | | | | | | TCTTCAG | | GGCAC | | |
| | | | ACCG | | | | | | | | | | GAGTCA | | CGAGT | | |
| | | | AGTC | | | | | | | | | | GATGCA | | CGGTG | | |
| | | | GGTG | | | | | | | | | | | | CGCAG | | |
| | | | C | | | | | | | | | | | | ACTTC | | |
| | | | | | | | | | | | | | | | TCGTC | | |
| | | | | | | | | | | | | | | | AGGAG | | |
| | | | | | | | | | | | | | | | TCAGA | | |
| | | | | | | | | | | | | | | | TGCA | | |
| HBB | CAT | 19287 | GTTT | 19377 | GAGT | 19467 | GCAGA | 19557 | CATGGTGCACCT | 19647 | mC*mA*mU*rGrGr | 19737 | CATGGTG | 19827 | CATGG | 19917 | +++ |
| 5_RT | GG | | TAGA | | CAGG | | CTTCT | | GACTCCTGGTTT | | UrGrCrArCrCrUrGr | | CATCTGA | | TGCAT | | |
| 16_P | TGC | | GCTA | | TGC | | CTTCA | | TAGAGCTAGAAA | | ArCrUrCrCrUrGrGr | | CTCCTGG | | CTGAC | | |
| BS11 | AC | | GAA | | | | G | | TAGCAAGTTAAA | | UrUrUrUrArGrArGr | | TTTTAGA | | TCCTG | | |
| | CTG | | ATAG | | | | | | ATAAGGCTAGTC | | CrUrArGrArArArUr | | GCTAGA | | GTTTT | | |
| | ACT | | CAA | | | | | | CGTTATCAACTT | | ArGrCrArArGrUrUr | | AATAGC | | AGAGC | | |
| | CCT | | GTTA | | | | | | GAAAAAGTGGC | | ArArArArUrArArGr | | AAGTTA | | TAGAA | | |
| | G | | AAAT | | | | | | ACCGAGTCGGTG | | GrCrUrArGrUrCrCr | | AAATAA | | ATAGC | | |
| | | | AAG | | | | | | CGCAGACTTCTC | | GrUrUrArUrCrArAr | | GGCTAGT | | AAGTT | | |
| | | | GCTA | | | | | | TTCAGGAGTCAG | | CrUrUrGrArArArAr | | CCGTTAT | | AAAAT | | |
| | | | GTCC | | | | | | GTGC | | ArGrUrGrGrCrArCr | | CAACTTG | | AAGGC | | |
| | | | GTTA | | | | | | | | CrGrArGrUrCrGrGr | | AAAAAG | | TAGTC | | |
| | | | TCAA | | | | | | | | UrGrCrGrCrArGrAr | | TGGCACC | | CGTTA | | |
| | | | CTTG | | | | | | | | CrUrUrCrUrCrUrUrC | | GAGTCG | | TCAAC | | |
| | | | AAA | | | | | | | | rArGrGrArGrUrCrAr | | GTGCGC | | TTGAA | | |
| | | | AAGT | | | | | | | | GrG*mU*mG*mC | | AGACTTC | | AAAGT | | |
| | | | GGC | | | | | | | | | | TCTTCAG | | GGCAC | | |
| | | | ACCG | | | | | | | | | | GAGTCA | | CGAGT | | |
| | | | AGTC | | | | | | | | | | GATGC | | CGGTG | | |
| | | | GGTG | | | | | | | | | | | | CGCAG | | |
| | | | C | | | | | | | | | | | | ACTTC | | |
| | | | | | | | | | | | | | | | TCGTC | | |
| | | | | | | | | | | | | | | | AGGAG | | |
| | | | | | | | | | | | | | | | TCAGA | | |
| | | | | | | | | | | | | | | | TGC | | |
| HBB | CAT | 19288 | GTTT | 19378 | GAGT | 19468 | GCAGA | 19558 | CATGGTGCACCT | 19648 | mC*mA*mU*rGrGr | 19738 | CATGGTG | 19828 | CATGG | 19918 | +++ |
| 5_RT | GG | | TAGA | | CAGG | | CTTCT | | GACTCCTGGTTT | | UrGrCrArCrCrUrGr | | CATCTGA | | TGCAT | | |
| 16_P | TGC | | GCTA | | TG | | CTTCA | | TAGAGCTAGAAA | | ArCrUrCrCrUrGrGr | | CTCCTGG | | CTGAC | | |
| BS10 | AC | | GAA | | | | G | | TAGCAAGTTAAA | | UrUrUrUrArGrArGr | | TTTTAGA | | TCCTG | | |
| | CTG | | ATAG | | | | | | ATAAGGCTAGTC | | CrUrArGrArArArUr | | GCTAGA | | GTTTT | | |
| | ACT | | CAA | | | | | | CGTTATCAACTT | | ArGrCrArArGrUrUr | | AATAGC | | AGAGC | | |
| | CCT | | GTTA | | | | | | GAAAAAGTGGC | | ArArArArUrArArGr | | AAGTTA | | TAGAA | | |
| | G | | AAAT | | | | | | ACCGAGTCGGTG | | GrCrUrArGrUrCrCr | | AAATAA | | ATAGC | | |
| | | | AAG | | | | | | CGCAGACTTCTC | | GrUrUrArUrCrArAr | | GGCTAGT | | AAGTT | | |
| | | | GCTA | | | | | | TTCAGGAGTCAG | | CrUrUrGrArArArAr | | CCGTTAT | | AAAAT | | |
| | | | GTCC | | | | | | GTG | | ArGrUrGrGrCrArCr | | CAACTTG | | AAGGC | | |
| | | | GTTA | | | | | | | | CrGrArGrUrCrGrGr | | AAAAAG | | TAGTC | | |
| | | | TCAA | | | | | | | | UrGrCrGrCrArGrAr | | TGGCACC | | CGTTA | | |
| | | | CTTG | | | | | | | | CrUrUrCrUrCrUrUrC | | GAGTCG | | TCAAC | | |
| | | | AAA | | | | | | | | rArGrGrArGrUrCrAr | | GTGCGC | | TTGAA | | |
| | | | AAGT | | | | | | | | G*mG*mU*mG | | AGACTTC | | AAAGT | | |
| | | | GGC | | | | | | | | | | TCTTCAG | | GGCAC | | |
| | | | ACCG | | | | | | | | | | GAGTCA | | CGAGT | | |
| | | | AGTC | | | | | | | | | | GATG | | CGGTG | | |
| | | | GGTG | | | | | | | | | | | | CGCAG | | |
| | | | C | | | | | | | | | | | | ACTTC | | |
| | | | | | | | | | | | | | | | TCGTC | | |
| | | | | | | | | | | | | | | | AGGAG | | |
| | | | | | | | | | | | | | | | TCAGA | | |
| | | | | | | | | | | | | | | | TG | | |
| HBB | CAT | 19 | GTTT | 19379 | GAGT | 19469 | GCAGA | 19559 | CATGGTGCACCT | 19649 | mC*mA*mU*rGrGr | 19739 | CATGGTG | 19829 | CATGG | 19919 | +++ |
| 5_RT | GG | 28 | TAGA | | CAGG | | CTTCT | | GACTCCTGGTTT | | UrGrCrArCrCrUrGr | | CATCTGA | | TGCAT | | |
| 16_P | TGC | 9 | GCTA | | T | | CTTCA | | TAGAGCTAGAAA | | ArCrUrCrCrUrGrGr | | CTCCTGG | | CTGAC | | |
| BS9 | AC | | GAA | | | | G | | TAGCAAGTTAAA | | UrUrUrUrArGrArGr | | TTTTAGA | | TCCTG | | |
| | CTG | | ATAG | | | | | | ATAAGGCTAGTC | | CrUrArGrArArArUr | | GCTAGA | | GTTTT | | |
| | ACT | | CAA | | | | | | CGTTATCAACTT | | ArGrCrArArGrUrUr | | AATAGC | | AGAGC | | |
| | CCT | | GTTA | | | | | | GAAAAAGTGGC | | ArArArArUrArArGr | | AAGTTA | | TAGAA | | |
| | G | | AAAT | | | | | | ACCGAGTCGGTG | | GrCrUrArGrUrCrCr | | AAATAA | | ATAGC | | |
| | | | AAG | | | | | | CGCAGACTTCTC | | GrUrUrArUrCrArAr | | GGCTAGT | | AAGTT | | |
| | | | GCTA | | | | | | TTCAGGAGTCAG | | CrUrUrGrArArArAr | | CCGTTAT | | AAAAT | | |
| | | | GTCC | | | | | | GT | | ArGrUrGrGrCrArCr | | CAACTTG | | AAGGC | | |
| | | | GTTA | | | | | | | | CrGrArGrUrCrGrGr | | AAAAAG | | TAGTC | | |
| | | | TCAA | | | | | | | | UrGrCrGrCrArGrAr | | TGGCACC | | CGTTA | | |
| | | | CTTG | | | | | | | | CrUrUrCrUrCrUrUrC | | GAGTCG | | TCAAC | | |
| | | | AAA | | | | | | | | rArGrGrArGrUrCrA* | | GTGCGC | | TTGAA | | |
| | | | AAGT | | | | | | | | mG*mG*mU | | AGACTTC | | AAAGT | | |
| | | | GGC | | | | | | | | | | TCTTCAG | | GGCAC | | |
| | | | ACCG | | | | | | | | | | GAGTCA | | CGAGT | | |
| | | | AGTC | | | | | | | | | | GAT | | CGGTG | | |
| | | | GGTG | | | | | | | | | | | | CGCAG | | |
| | | | C | | | | | | | | | | | | ACTTC | | |
| | | | | | | | | | | | | | | | TCGTC | | |
| | | | | | | | | | | | | | | | AGGAG | | |
| | | | | | | | | | | | | | | | TCAGA | | |
| | | | | | | | | | | | | | | | T | | |
| HBB | CAT | 1929 | GTTT | 1938 | GAGT | 19470 | GCAGA | 19560 | CATGGTGCACCT | 19650 | mC*mA*mU*rGrGr | 19740 | CATGGTG | 19830 | CATGG | 19920 | +++ |
| 5_RT | GG | 0 | TAGA | 0 | CAGG | | CTTCT | | GACTCCTGGTTT | | UrGrCrArCrCrUrGr | | CATCTGA | | TGCAT | | |
| 16_P | TGC | | GCTA | | | | CTTCA | | TAGAGCTAGAAA | | ArCrUrCrCrUrGrGr | | CTCCTGG | | CTGAC | | |
| BS8 | AC | | GAA | | | | G | | TAGCAAGTTAAA | | UrUrUrUrArGrArGr | | TTTTAGA | | TCCTG | | |
| | CTG | | ATAG | | | | | | ATAAGGCTAGTC | | CrUrArGrArArArUr | | GCTAGA | | GTTTT | | |
| | ACT | | CAA | | | | | | CGTTATCAACTT | | ArGrCrArArGrUrUr | | AATAGC | | AGAGC | | |
| | CCT | | GTTA | | | | | | GAAAAAGTGGC | | ArArArArUrArArGr | | AAGTTA | | TAGAA | | |
| | G | | AAAT | | | | | | ACCGAGTCGGTG | | GrCrUrArGrUrCrCr | | AAATAA | | ATAGC | | |
| | | | AAG | | | | | | CGCAGACTTCTC | | GrUrUrArUrCrArAr | | GGCTAGT | | AAGTT | | |
| | | | GCTA | | | | | | TTCAGGAGTCAG | | CrUrUrGrArArArAr | | CCGTTAT | | AAAAT | | |
| | | | GTCC | | | | | | G | | ArGrUrGrGrCrArCr | | CAACTTG | | AAGGC | | |
| | | | GTTA | | | | | | | | CrGrArGrUrCrGrGr | | AAAAAG | | TAGTC | | |
| | | | TCAA | | | | | | | | UrGrCrGrCrArGrAr | | TGGCACC | | CGTTA | | |
| | | | CTTG | | | | | | | | CrUrUrCrUrCrUrUrC | | GAGTCG | | TCAAC | | |
| | | | AAA | | | | | | | | rArGrGrArGrUrC*m | | GTGCGC | | TTGAA | | |
| | | | AAGT | | | | | | | | A*mG*mG | | AGACTTC | | AAAGT | | |
| | | | GGC | | | | | | | | | | TCTTCAG | | GGCAC | | |
| | | | ACCG | | | | | | | | | | GAGTCA | | CGAGT | | |
| | | | AGTC | | | | | | | | | | GA | | CGGTG | | |
| | | | GGTG | | | | | | | | | | | | CGCAG | | |
| | | | C | | | | | | | | | | | | ACTTC | | |
| | | | | | | | | | | | | | | | TCGTC | | |
| | | | | | | | | | | | | | | | AGGAG | | |
| | | | | | | | | | | | | | | | TCAGA | | |
| HBB | CAT | 19291 | GTTT | 19381 | GAGT | 19471 | AGACT | 19561 | CATGGTGCACCT | 19651 | mC*mA*mU*rGrGr | 19741 | CATGGTG | 19831 | CATGG | 19921 | +++ |
| 5_RT | GG | | TAGA | | CAGG | | TCTC | | GACTCCTGGTTT | | UrGrCrArCrCrUrGr | | CATCTGA | | TGCAT | | |
| 14_P | TGC | | GCTA | | TGCA | | TTCAG | | TAGAGCTAGAAA | | ArCrUrCrCrUrGrGr | | CTCCTGG | | CTGAC | | |
| BS17 | AC | | GAA | | CCAT | | | | TAGCAAGTTAAA | | UrUrUrUrArGrArGr | | TTTTAGA | | TCCTG | | |
| | CTG | | ATAG | | G | | | | ATAAGGCTAGTC | | CrUrArGrArArArUr | | GCTAGA | | GTTTT | | |
| | ACT | | CAA | | | | | | CGTTATCAACTT | | ArGrCrArArGrUrUr | | AATAGC | | AGAGC | | |
| | CCT | | GTTA | | | | | | GAAAAAGTGGC | | ArArArArUrArArGr | | AAGTTA | | TAGAA | | |
| | G | | AAAT | | | | | | ACCGAGTCGGTG | | GrCrUrArGrUrCrCr | | AAATAA | | ATAGC | | |
| | | | AAG | | | | | | CAGACTTCTCTT | | GrUrUrArUrCrArAr | | GGCTAGT | | AAGTT | | |
| | | | GCTA | | | | | | CAGGAGTCAGGT | | CrUrUrGrArArArAr | | CCGTTAT | | AAAAT | | |
| | | | GTCC | | | | | | GCACCATG | | ArGrUrGrGrCrArCr | | CAACTTG | | AAGGC | | |
| | | | GTTA | | | | | | | | CrGrArGrUrCrGrGr | | AAAAAG | | TAGTC | | |
| | | | TCAA | | | | | | | | UrGrCrArGrArCrUr | | TGGCACC | | CGTTA | | |
| | | | CTTG | | | | | | | | UrCrUrCrUrUrCrAr | | GAGTCG | | TCAAC | | |
| | | | AAA | | | | | | | | GrGrArGrUrCrArGr | | GTGCAG | | TTGAA | | |
| | | | AAGT | | | | | | | | GrUrGrCrArCrC*mA | | ACTTCTC | | AAAGT | | |
| | | | GGC | | | | | | | | *mU*mG | | TTCAGGA | | GGCAC | | |
| | | | ACCG | | | | | | | | | | GTCAGAT | | CGAGT | | |
| | | | AGTC | | | | | | | | | | GCACCAT | | CGGTG | | |
| | | | GGTG | | | | | | | | | | G | | CAGAC | | |
| | | | C | | | | | | | | | | | | TTCTC | | |
| | | | | | | | | | | | | | | | GTCAG | | |
| | | | | | | | | | | | | | | | GAGTC | | |
| | | | | | | | | | | | | | | | AGATG | | |
| | | | | | | | | | | | | | | | CACCA | | |
| | | | | | | | | | | | | | | | TG | | |
| HBB | CAT | 19292 | GTTT | 19382 | GAGT | 19472 | AGACT | 19562 | CATGGTGCACCT | 19652 | mC*mA*mU*rGrGr | 19742 | CATGGTG | 19832 | CATGG | 19922 | +++ |
| 5_RT | GG | | TAGA | | CAGG | | TCTC | | GACTCCTGGTTT | | UrGrCrArCrCrUrGr | | CATCTGA | | TGCAT | | |
| 14_P | TGC | | GCTA | | TGCA | | TTCAG | | TAGAGCTAGAAA | | ArCrUrCrCrUrGrGr | | CTCCTGG | | CTGAC | | |
| BS16 | AC | | GAA | | CCAT | | | | TAGCAAGTTAAA | | UrUrUrUrArGrArGr | | TTTTAGA | | TCCTG | | |
| | CTG | | ATAG | | | | | | ATAAGGCTAGTC | | CrUrArGrArArArUr | | GCTAGA | | GTTTT | | |
| | ACT | | CAA | | | | | | CGTTATCAACTT | | ArGrCrArArGrUrUr | | AATAGC | | AGAGC | | |
| | CCT | | GTTA | | | | | | GAAAAAGTGGC | | ArArArArUrArArGr | | AAGTTA | | TAGAA | | |
| | G | | AAAT | | | | | | ACCGAGTCGGTG | | GrCrUrArGrUrCrCr | | AAATAA | | ATAGC | | |
| | | | AAG | | | | | | CAGACTTCTCTT | | GrUrUrArUrCrArAr | | GGCTAGT | | AAGTT | | |
| | | | GCTA | | | | | | CAGGAGTCAGGT | | CrUrUrGrArArArAr | | CCGTTAT | | AAAAT | | |
| | | | GTCC | | | | | | GCACCAT | | ArGrUrGrGrCrArCr | | CAACTTG | | AAGGC | | |
| | | | GTTA | | | | | | | | CrGrArGrUrCrGrGr | | AAAAAG | | TAGTC | | |
| | | | TCAA | | | | | | | | UrGrCrArGrArCrUr | | TGGCACC | | CGTTA | | |
| | | | CTTG | | | | | | | | UrCrUrCrUrUrCrAr | | GAGTCG | | TCAAC | | |
| | | | AAA | | | | | | | | GrGrArGrUrCrArGr | | GTGCAG | | TTGAA | | |
| | | | AAGT | | | | | | | | GrUrGrCrArC*mC* | | ACTTCTC | | AAAGT | | |
| | | | GGC | | | | | | | | mA*mU | | TTCAGGA | | GGCAC | | |
| | | | ACCG | | | | | | | | | | GTCAGAT | | CGAGT | | |
| | | | AGTC | | | | | | | | | | GCACCAT | | CGGTG | | |
| | | | GGTG | | | | | | | | | | | | CAGAC | | |
| | | | C | | | | | | | | | | | | TTCTC | | |
| | | | | | | | | | | | | | | | GTCAG | | |
| | | | | | | | | | | | | | | | GAGTC | | |
| | | | | | | | | | | | | | | | AGATG | | |
| | | | | | | | | | | | | | | | CACCA | | |
| | | | | | | | | | | | | | | | T | | |
| HBB | CAT | 19293 | GTTT | 19383 | GAGT | 19473 | AGACT | 19563 | CATGGTGCACCT | 19653 | mC*mA*mU*rGrGr | 19743 | CATGGTG | 19833 | CATGG | 19923 | +++ |
| 5_RT | GG | | TAGA | | CAGG | | TCTC | | GACTCCTGGTTT | | UrGrCrArCrCrUrGr | | CATCTGA | | TGCAT | | |
| 14_P | TGC | | GCTA | | TGCA | | TTCAG | | TAGAGCTAGAAA | | ArCrUrCrCrUrGrGr | | CTCCTGG | | CTGAC | | |
| BS15 | AC | | GAA | | CCA | | | | TAGCAAGTTAAA | | UrUrUrUrArGrArGr | | TTTTAGA | | TCCTG | | |
| | CTG | | ATAG | | | | | | ATAAGGCTAGTC | | CrUrArGrArArArUr | | GCTAGA | | GTTTT | | |
| | ACT | | CAA | | | | | | CGTTATCAACTT | | ArGrCrArArGrUrUr | | AATAGC | | AGAGC | | |
| | CCT | | GTTA | | | | | | GAAAAAGTGGC | | ArArArArUrArArGr | | AAGTTA | | TAGAA | | |
| | G | | AAAT | | | | | | ACCGAGTCGGTG | | GrCrUrArGrUrCrCr | | AAATAA | | ATAGC | | |
| | | | AAG | | | | | | CAGACTTCTCTT | | GrUrUrArUrCrArAr | | GGCTAGT | | AAGTT | | |
| | | | GCTA | | | | | | CAGGAGTCAGGT | | CrUrUrGrArArArAr | | CCGTTAT | | AAAAT | | |
| | | | GTCC | | | | | | GCACCA | | ArGrUrGrGrCrArCr | | CAACTTG | | AAGGC | | |
| | | | GTTA | | | | | | | | CrGrArGrUrCrGrGr | | AAAAAG | | TAGTC | | |
| | | | TCAA | | | | | | | | UrGrCrArGrArCrUr | | TGGCACC | | CGTTA | | |
| | | | CTTG | | | | | | | | UrCrUrCrUrUrCrAr | | GAGTCG | | TCAAC | | |
| | | | AAA | | | | | | | | GrGrArGrUrCrArGr | | GTGCAG | | TTGAA | | |
| | | | AAGT | | | | | | | | GrUrGrCrA*mC*mC | | ACTTCTC | | AAAGT | | |
| | | | GGC | | | | | | | | *mA | | TTCAGGA | | GGCAC | | |
| | | | ACCG | | | | | | | | | | GTCAGAT | | CGAGT | | |
| | | | AGTC | | | | | | | | | | GCACCA | | CGGTG | | |
| | | | GGTG | | | | | | | | | | | | CAGAC | | |
| | | | C | | | | | | | | | | | | TTCTC | | |
| | | | | | | | | | | | | | | | GTCAG | | |
| | | | | | | | | | | | | | | | GAGTC | | |
| | | | | | | | | | | | | | | | AGATG | | |
| | | | | | | | | | | | | | | | CACCA | | |
| HBB | CAT | 19294 | GTTT | 19384 | GAGT | 19474 | AGACT | 19564 | CATGGTGCACCT | 19694 | mC*mA*mU*rGrGr | 19744 | CATGGTG | 19834 | CATGG | 19924 | +++ |
| 5_RT | GG | | TAGA | | CAGG | | TCTC | | GACTCCTGGTTT | | UrGrCrArCrCrUrGr | | CATCTGA | | TGCAT | | |
| 14_P | TGC | | GCTA | | TGCA | | TTCAG | | TAGAGCTAGAAA | | ArCrUrCrCrUrGrGr | | CTCCTGG | | CTGAC | | |
| BS14 | AC | | GAA | | CC | | | | TAGCAAGTTAAA | | UrUrUrUrArGrArGr | | TTTTAGA | | TCCTG | | |
| | CTG | | ATAG | | | | | | ATAAGGCTAGTC | | CrUrArGrArArArUr | | GCTAGA | | GTTTT | | |
| | ACT | | CAA | | | | | | CGTTATCAACTT | | ArGrCrArArGrUrUr | | AATAGC | | AGAGC | | |
| | CCT | | GTTA | | | | | | GAAAAAGTGGC | | ArArArArUrArArGr | | AAGTTA | | TAGAA | | |
| | G | | AAAT | | | | | | ACCGAGTCGGTG | | GrCrUrArGrUrCrCr | | AAATAA | | ATAGC | | |
| | | | AAG | | | | | | CAGACTTCTCTT | | GrUrUrArUrCrArAr | | GGCTAGT | | AAGTT | | |
| | | | GCTA | | | | | | CAGGAGTCAGGT | | CrUrUrGrArArArAr | | CCGTTAT | | AAAAT | | |
| | | | GTCC | | | | | | GCACC | | ArGrUrGrGrCrArCr | | CAACTTG | | AAGGC | | |
| | | | GTTA | | | | | | | | CrGrArGrUrCrGrGr | | AAAAAG | | TAGTC | | |
| | | | TCAA | | | | | | | | UrGrCrArGrArCrUr | | TGGCACC | | CGTTA | | |
| | | | CTTG | | | | | | | | UrCrUrCrUrUrCrAr | | GAGTCG | | TCAAC | | |
| | | | AAA | | | | | | | | GrGrArGrUrCrArGr | | GTGCAG | | TTGAA | | |
| | | | AAGT | | | | | | | | GrUrGrC*mA*mC* | | ACTTCTC | | AAAGT | | |
| | | | GGC | | | | | | | | mC | | TTCAGGA | | GGCAC | | |
| | | | ACCG | | | | | | | | | | GTCAGAT | | CGAGT | | |
| | | | AGTC | | | | | | | | | | GCACC | | CGGTG | | |
| | | | GGTG | | | | | | | | | | | | CAGAC | | |
| | | | C | | | | | | | | | | | | TTCTC | | |
| | | | | | | | | | | | | | | | GTCAG | | |
| | | | | | | | | | | | | | | | GAGTC | | |
| | | | | | | | | | | | | | | | AGATG | | |
| | | | | | | | | | | | | | | | CACC | | |
| HBB | CAT | 19295 | GTTT | 19385 | GAGT | 19475 | AGACT | 19565 | CATGGTGCACCT | 19655 | mC*mA*mU*rGrGr | 19745 | CATGGTG | 19835 | CATGG | 19925 | +++ |
| 5_RT | GG | | TAGA | | CAGG | | TCTC | | GACTCCTGGTTT | | UrGrCrArCrCrUrGr | | CATCTGA | | TGCAT | | |
| 14_P | TGC | | GCTA | | TGCA | | TTCAG | | TAGAGCTAGAAA | | ArCrUrCrCrUrGrGr | | CTCCTGG | | CTGAC | | |
| BS13 | AC | | GAA | | C | | | | TAGCAAGTTAAA | | UrUrUrUrArGrArGr | | TTTTAGA | | TCCTG | | |
| | CTG | | ATAG | | | | | | ATAAGGCTAGTC | | CrUrArGrArArArUr | | GCTAGA | | GTTTT | | |
| | ACT | | CAA | | | | | | CGTTATCAACTT | | ArGrCrArArGrUrUr | | AATAGC | | AGAGC | | |
| | CCT | | GTTA | | | | | | GAAAAAGTGGC | | ArArArArUrArArGr | | AAGTTA | | TAGAA | | |
| | G | | AAAT | | | | | | ACCGAGTCGGTG | | GrCrUrArGrUrCrCr | | AAATAA | | ATAGC | | |
| | | | AAG | | | | | | CAGACTTCTCTT | | GrUrUrArUrCrArAr | | GGCTAGT | | AAGTT | | |
| | | | GCTA | | | | | | CAGGAGTCAGGT | | CrUrUrGrArArArAr | | CCGTTAT | | AAAAT | | |
| | | | GTCC | | | | | | GCAC | | ArGrUrGrGrCrArCr | | CAACTTG | | AAGGC | | |
| | | | GTTA | | | | | | | | CrGrArGrUrCrGrGr | | AAAAAG | | TAGTC | | |
| | | | TCAA | | | | | | | | UrGrCrArGrArCrUr | | TGGCACC | | CGTTA | | |
| | | | CTTG | | | | | | | | UrCrUrCrUrUrCrAr | | GAGTCG | | TCAAC | | |
| | | | AAA | | | | | | | | GrGrArGrUrCrArGr | | GTGCAG | | TTGAA | | |
| | | | AAGT | | | | | | | | GrUrG*mC*mA*mC | | ACTTCTC | | AAAGT | | |
| | | | GGC | | | | | | | | | | TTCAGGA | | GGCAC | | |
| | | | ACCG | | | | | | | | | | GTCAGAT | | CGAGT | | |
| | | | AGTC | | | | | | | | | | GCAC | | CGGTG | | |
| | | | GGTG | | | | | | | | | | | | CAGAC | | |
| | | | C | | | | | | | | | | | | TTCTC | | |
| | | | | | | | | | | | | | | | GTCAG | | |
| | | | | | | | | | | | | | | | GAGTC | | |
| | | | | | | | | | | | | | | | AGATG | | |
| | | | | | | | | | | | | | | | CAC | | |
| HBB | CAT | 19296 | GTTT | 19386 | GAGT | 19476 | AGACT | 19566 | CATGGTGCACCT | 19656 | mC*mA*mU*rGrGr | 19746 | CATGGTG | 19836 | CATGG | 19926 | +++ |
| 5_RT | GG | | TAGA | | CAGG | | TCTC | | GACTCCTGGTTT | | UrGrCrArCrCrUrGr | | CATCTGA | | TGCAT | | |
| 14 F | TGC | | GCTA | | TGCA | | TTCAG | | TAGAGCTAGAAA | | ArCrUrCrCrUrGrGr | | CTCCTGG | | CTGAC | | |
| BS12 | AC | | GAA | | | | | | TAGCAAGTTAAA | | UrUrUrUrArGrArGr | | TTTTAGA | | TCCTG | | |
| | CTG | | ATAG | | | | | | ATAAGGCTAGTC | | CrUrArGrArArArUr | | GCTAGA | | GTTTT | | |
| | ACT | | CAA | | | | | | CGTTATCAACTT | | ArGrCrArArGrUrUr | | AATAGC | | AGAGC | | |
| | CCT | | GTTA | | | | | | GAAAAAGTGGC | | ArArArArUrArArGr | | AAGTTA | | TAGAA | | |
| | G | | AAAT | | | | | | ACCGAGTCGGTG | | GrCrUrArGrUrCrCr | | AAATAA | | ATAGC | | |
| | | | AAG | | | | | | CAGACTTCTCTT | | GrUrUrArUrCrArAr | | GGCTAGT | | AAGTT | | |
| | | | GCTA | | | | | | CAGGAGTCAGGT | | CrUrUrGrArArArAr | | CCGTTAT | | AAAAT | | |
| | | | GTCC | | | | | | GCA | | ArGrUrGrGrCrArCr | | CAACTTG | | AAGGC | | |
| | | | GTTA | | | | | | | | CrGrArGrUrCrGrGr | | AAAAAG | | TAGTC | | |
| | | | TCAA | | | | | | | | UrGrCrArGrArCrUr | | TGGCACC | | CGTTA | | |
| | | | CTTG | | | | | | | | UrCrUrCrUrUrCrAr | | GAGTCG | | TCAAC | | |
| | | | AAA | | | | | | | | GrGrArGrUrCrArGr | | GTGCAG | | TTGAA | | |
| | | | AAGT | | | | | | | | GrU*mG*mC*mA | | ACTTCTC | | AAAGT | | |
| | | | GGC | | | | | | | | | | TTCAGGA | | GGCAC | | |
| | | | ACCG | | | | | | | | | | GTCAGAT | | CGAGT | | |
| | | | AGTC | | | | | | | | | | GCA | | CGGTG | | |
| | | | GGTG | | | | | | | | | | | | CAGAC | | |
| | | | C | | | | | | | | | | | | TTCTC | | |
| | | | | | | | | | | | | | | | GTCAG | | |
| | | | | | | | | | | | | | | | GAGTC | | |
| | | | | | | | | | | | | | | | AGATG | | |
| | | | | | | | | | | | | | | | CA | | |
| HBB | CAT | 19297 | GTTT | 19387 | GAGT | 19477 | AGACT | 19567 | CATGGTGCACCT | 19657 | mC*mA*mU*rGrGr | 19747 | CATGGTG | 198 | CATGG | 19927 | +++ |
| 5_RT | GG | | TAGA | | CAGG | | TCTC | | GACTCCTGGTTT | | UrGrCrArCrCrUrGr | | CATCTGA | 37 | TGCAT | | |
| 14_P | TGC | | GCTA | | TGC | | TTCAG | | TAGAGCTAGAAA | | ArCrUrCrCrUrGrGr | | CTCCTGG | | CTGAC | | |
| BS11 | AC | | GAA | | | | | | TAGCAAGTTAAA | | UrUrUrUrArGrArGr | | TTTTAGA | | TCCTG | | |
| | CTG | | ATAG | | | | | | ATAAGGCTAGTC | | CrUrArGrArArArUr | | GCTAGA | | GTTTT | | |
| | ACT | | CAA | | | | | | CGTTATCAACTT | | ArGrCrArArGrUrUr | | AATAGC | | AGAGC | | |
| | CCT | | GTTA | | | | | | GAAAAAGTGGC | | ArArArArUrArArGr | | AAGTTA | | TAGAA | | |
| | G | | AAAT | | | | | | ACCGAGTCGGTG | | GrCrUrArGrUrCrCr | | AAATAA | | ATAGC | | |
| | | | AAG | | | | | | CAGACTTCTCTT | | GrUrUrArUrCrArAr | | GGCTAGT | | AAGTT | | |
| | | | GCTA | | | | | | CAGGAGTCAGGT | | CrUrUrGrArArArAr | | CCGTTAT | | AAAAT | | |
| | | | GTCC | | | | | | GC | | ArGrUrGrGrCrArCr | | CAACTTG | | AAGGC | | |
| | | | GTTA | | | | | | | | CrGrArGrUrCrGrGr | | AAAAAG | | TAGTC | | |
| | | | TCAA | | | | | | | | UrGrCrArGrArCrUr | | TGGCACC | | CGTTA | | |
| | | | CTTG | | | | | | | | UrCrUrCrUrUrCrAr | | GAGTCG | | TCAAC | | |
| | | | AAA | | | | | | | | GrGrArGrUrCrArGr | | GTGCAG | | TTGAA | | |
| | | | AAGT | | | | | | | | G*mU*mG*mC | | ACTTCTC | | AAAGT | | |
| | | | GGC | | | | | | | | | | TTCAGGA | | GGCAC | | |
| | | | ACCG | | | | | | | | | | GTCAGAT | | CGAGT | | |
| | | | AGTC | | | | | | | | | | GC | | CGGTG | | |
| | | | GGTG | | | | | | | | | | | | CAGAC | | |
| | | | C | | | | | | | | | | | | TTCTC | | |
| | | | | | | | | | | | | | | | GTCAG | | |
| | | | | | | | | | | | | | | | GAGTC | | |
| | | | | | | | | | | | | | | | AGATG | | |
| | | | | | | | | | | | | | | | C | | |
| HBB | CAT | 19 | GTTT | 19388 | GAGT | 19478 | AGACT | 19568 | CATGGTGCACCT | 19658 | mC*mA*mU*rGrGr | 19748 | CATGGTG | 19838 | CATGG | 19928 | +++ |
| 5_RT | GG | 298 | TAGA | | CAGG | | TCTC | | GACTCCTGGTTT | | UrGrCrArCrCrUrGr | | CATCTGA | | TGCAT | | |
| 14_P | TGC | | GCTA | | TG | | TTCAG | | TAGAGCTAGAAA | | ArCrUrCrCrUrGrGr | | CTCCTGG | | CTGAC | | |
| BS10 | AC | | GAA | | | | | | TAGCAAGTTAAA | | UrUrUrUrArGrArGr | | TTTTAGA | | TCCTG | | |
| | CTG | | ATAG | | | | | | ATAAGGCTAGTC | | CrUrArGrArArArUr | | GCTAGA | | GTTTT | | |
| | ACT | | CAA | | | | | | CGTTATCAACTT | | ArGrCrArArGrUrUr | | AATAGC | | AGAGC | | |
| | CC′] | | GTTA | | | | | | GAAAAAGTGGC | | ArArArArUrArArGr | | AAGTTA | | TAGAA | | |
| | G | | AAAT | | | | | | ACCGAGTCGGTG | | GrCrUrArGrUrCrCr | | AAATAA | | ATAGC | | |
| | | | AAG | | | | | | CAGACTTCTCTT | | GrUrUrArUrCrArAr | | GGCTAGT | | AAGTT | | |
| | | | GCTA | | | | | | CAGGAGTCAGGT | | CrUrUrGrArArArAr | | CCGTTAT | | AAAAT | | |
| | | | GTCC | | | | | | G | | ArGrUrGrGrCrArCr | | CAACTTG | | AAGGC | | |
| | | | GTTA | | | | | | | | CrGrArGrUrCrGrGr | | AAAAAG | | TAGTC | | |
| | | | TCAA | | | | | | | | UrGrCrArGrArCrUr | | TGGCACC | | CGTTA | | |
| | | | CTTG | | | | | | | | UrCrUrCrUrUrCrAr | | GAGTCG | | TCAAC | | |
| | | | AAA | | | | | | | | GrGrArGrUrCrArG* | | GTGCAG | | TTGAA | | |
| | | | AAGT | | | | | | | | mG*mU*mG | | ACTTCTC | | AAAGT | | |
| | | | GGC | | | | | | | | | | TTCAGGA | | GGCAC | | |
| | | | ACCG | | | | | | | | | | GTCAGAT | | CGAGT | | |
| | | | AGTC | | | | | | | | | | G | | CGGTG | | |
| | | | GGTG | | | | | | | | | | | | CAGAC | | |
| | | | C | | | | | | | | | | | | TTCTC | | |
| | | | | | | | | | | | | | | | GTCAG | | |
| | | | | | | | | | | | | | | | GAGTC | | |
| | | | | | | | | | | | | | | | AGATG | | |
| HBB | CAT | 19299 | GTTT | 19389 | GAGT | | AGACT | 19569 | CATGGTGCACCT | 19659 | mC*mA*mU*rGrGr | 19749 | CATGGTG | 19839 | CATGG | 19929 | +++ |
| 5_RT | GG | | TAGA | | CAGG | | TCTC | | GACTCCTGGTTT | | UrGrCrArCrCrUrGr | | CATCTGA | | TGCAT | | |
| 14_P | TGC | | GCTA | | T | | TTCAG | | TAGAGCTAGAAA | | ArCrUrCrCrUrGrGr | | CTCCTGG | | CTGAC | | |
| BS9 | AC | | GAA | | | | | | TAGCAAGTTAAA | | UrUrUrUrArGrArGr | | TTTTAGA | | TCCTG | | |
| | CTG | | ATAG | | | | | | ATAAGGCTAGTC | | CrUrArGrArArArUr | | GCTAGA | | GTTTT | | |
| | ACT | | CAA | | | | | | CGTTATCAACTT | | ArGrCrArArGrUrUr | | AATAGC | | AGAGC | | |
| | CCT | | GTTA | | | | | | GAAAAAGTGGC | | ArArArArUrArArGr | | AAGTTA | | TAGAA | | |
| | G | | AAAT | | | | | | ACCGAGTCGGTG | | GrCrUrArGrUrCrCr | | AAATAA | | ATAGC | | |
| | | | AAG | | | | | | CAGACTTCTCTT | | GrUrUrArUrCrArAr | | GGCTAGT | | AAGTT | | |
| | | | GCTA | | | | | | CAGGAGTCAGGT | | CrUrUrGrArArArAr | | CCGTTAT | | AAAAT | | |
| | | | GTCC | | | | | | | | ArGrUrGrGrCrArCr | | CAACTTG | | AAGGC | | |
| | | | GTTA | | | | | | | | CrGrArGrUrCrGrGr | | AAAAAG | | TAGTC | | |
| | | | TCAA | | | | | | | | UrGrCrArGrArCrUr | | TGGCACC | | CGTTA | | |
| | | | CTTG | | | | | | | | UrCrUrCrUrUrCrAr | | GAGTCG | | TCAAC | | |
| | | | AAA | | | | | | | | GrGrArGrUrCrA*m | | GTGCAG | | TTGAA | | |
| | | | AAGT | | | | | | | | G*mG*mU | | ACTTCTC | | AAAGT | | |
| | | | GGC | | | | | | | | | | TTCAGGA | | GGCAC | | |
| | | | ACCG | | | | | | | | | | GTCAGAT | | CGAGT | | |
| | | | AGTC | | | | | | | | | | | | CGGTG | | |
| | | | GGTG | | | | | | | | | | | | CAGAC | | |
| | | | C | | | | | | | | | | | | TTCTC | | |
| | | | | | | | | | | | | | | | GTCAG | | |
| | | | | | | | | | | | | | | | GAGTC | | |
| | | | | | | | | | | | | | | | AGAT | | |
| HBB | CAT | 19300 | GTTT | 19390 | GAGT | | AGACT | 19570 | CATGGTGCACCT | 19660 | mC*mA*mU*rGrGr | 19750 | CATGGTG | 19840 | CATGG | 19930 | +++ |
| 5_RT | GG | | TAGA | | CAGG | | TCTC | | GACTCCTGGTTT | | UrGrCrArCrCrUrGr | | CATCTGA | | TGCAT | | |
| 14_P | TGC | | GCTA | | | | TTCAG | | TAGAGCTAGAAA | | ArCrUrCrCrUrGrGr | | CTCCTGG | | CTGAC | | |
| BS8 | AC | | GAA | | | | | | TAGCAAGTTAAA | | UrUrUrUrArGrArGr | | TTTTAGA | | TCCTG | | |
| | CTG | | ATAG | | | | | | ATAAGGCTAGTC | | CrUrArGrArArArUr | | GCTAGA | | GTTTT | | |
| | ACT | | CAA | | | | | | CGTTATCAACTT | | ArGrCrArArGrUrUr | | AATAGC | | AGAGC | | |
| | CCT | | GTTA | | | | | | GAAAAAGTGGC | | ArArArArUrArArGr | | AAGTTA | | TAGAA | | |
| | G | | AAAT | | | | | | ACCGAGTCGGTG | | GrCrUrArGrUrCrCr | | AAATAA | | ATAGC | | |
| | | | AAG | | | | | | CAGACTTCTCTT | | GrUrUrArUrCrArAr | | GGCTAGT | | AAGTT | | |
| | | | GCTA | | | | | | CAGGAGTCAGG | | CrUrUrGrArArArAr | | CCGTTAT | | AAAAT | | |
| | | | GTCC | | | | | | | | ArGrUrGrGrCrArCr | | CAACTTG | | AAGGC | | |
| | | | GTTA | | | | | | | | CrGrArGrUrCrGrGr | | AAAAAG | | TAGTC | | |
| | | | TCAA | | | | | | | | UrGrCrArGrArCrUr | | TGGCACC | | CGTTA | | |
| | | | CTTG | | | | | | | | UrCrUrCrUrUrCrAr | | GAGTCG | | TCAAC | | |
| | | | AAA | | | | | | | | GrGrArGrUrC*mA* | | GTGCAG | | TTGAA | | |
| | | | AAGT | | | | | | | | mG*mG | | ACTTCTC | | AAAGT | | |
| | | | GGC | | | | | | | | | | TTCAGGA | | GGCAC | | |
| | | | ACCG | | | | | | | | | | GTCAGA | | CGAGT | | |
| | | | AGTC | | | | | | | | | | | | CGGTG | | |
| | | | GGTG | | | | | | | | | | | | CAGAC | | |
| | | | C | | | | | | | | | | | | TTCTC | | |
| | | | | | | | | | | | | | | | GTCAG | | |
| | | | | | | | | | | | | | | | GAGTC | | |
| | | | | | | | | | | | | | | | AGA | | |
| HBB | CAT | 19301 | GTTT | 19391 | GAGT | 19481 | GACTT | 19571 | CATGGTGCACCT | 19661 | mC*mA*mU*rGrGr | 19751 | CATGGTG | 19841 | CATGG | 19931 | +++ |
| 5_RT | GG | | TAGA | | CAGG | | CTCTT | | GACTCCTGGTTT | | UrGrCrArCrCrUrGr | | CATCTGA | | TGCAT | | |
| 13_P | TGC | | GCTA | | TGCA | | CAG | | TAGAGCTAGAAA | | ArCrUrCrCrUrGrGr | | CTCCTGG | | CTGAC | | |
| BS17 | AC | | GAA | | CCAT | | | | TAGCAAGTTAAA | | UrUrUrUrArGrArGr | | TTTTAGA | | TCCTG | | |
| | CTG | | ATAG | | G | | | | ATAAGGCTAGTC | | CrUrArGrArArArUr | | GCTAGA | | GTTTT | | |
| | ACT | | CAA | | | | | | CGTTATCAACTT | | ArGrCrArArGrUrUr | | AATAGC | | AGAGC | | |
| | CCT | | GTTA | | | | | | GAAAAAGTGGC | | ArArArArUrArArGr | | AAGTTA | | TAGAA | | |
| | G | | AAAT | | | | | | ACCGAGTCGGTG | | GrCrUrArGrUrCrCr | | AAATAA | | ATAGC | | |
| | | | AAG | | | | | | CGACTTCTCTTC | | GrUrUrArUrCrArAr | | GGCTAGT | | AAGTT | | |
| | | | GCTA | | | | | | AGGAGTCAGGTG | | CrUrUrGrArArArAr | | CCGTTAT | | AAAAT | | |
| | | | GTCC | | | | | | CACCATG | | ArGrUrGrGrCrArCr | | CAACTTG | | AAGGC | | |
| | | | GTTA | | | | | | | | CrGrArGrUrCrGrGr | | AAAAAG | | TAGTC | | |
| | | | TCAA | | | | | | | | UrGrCrGrArCrUrUr | | TGGCACC | | CGTTA | | |
| | | | CTTG | | | | | | | | CrUrCrUrUrCrArGr | | GAGTCG | | TCAAC | | |
| | | | AAA | | | | | | | | GrArGrUrCrArGrGr | | GTGCGA | | TTGAA | | |
| | | | AAGT | | | | | | | | UrGrCrArCrC*mA* | | CTTCTCT | | AAAGT | | |
| | | | GGC | | | | | | | | mU*mG | | TCAGGA | | GGCAC | | |
| | | | ACCG | | | | | | | | | | GTCAGAT | | CGAGT | | |
| | | | AGTC | | | | | | | | | | GCACCAT | | CGGTG | | |
| | | | GGTG | | | | | | | | | | G | | CGACT | | |
| | | | C | | | | | | | | | | | | TCTCG | | |
| | | | | | | | | | | | | | | | TCAGG | | |
| | | | | | | | | | | | | | | | AGTCA | | |
| | | | | | | | | | | | | | | | GATGC | | |
| | | | | | | | | | | | | | | | ACCAT | | |
| | | | | | | | | | | | | | | | G | | |
| HBB | CAT | 19302 | GTTT | 19392 | GAGT | 19482 | GACTT | 19572 | CATGGTGCACCT | 19662 | mC*mA*mU*rGrGr | 19752 | CATGGTG | 19842 | CATGG | 19932 | +++ |
| 5_RT | GG | | TAGA | | CAGG | | CTCTT | | GACTCCTGGTTT | | UrGrCrArCrCrUrGr | | CATCTGA | | TGCAT | | |
| 13_P | TGC | | GCTA | | TGCA | | CAG | | TAGAGCTAGAAA | | ArCrUrCrCrUrGrGr | | CTCCTGG | | CTGAC | | |
| BS16 | AC | | GAA | | CCAT | | | | TAGCAAGTTAAA | | UrUrUrUrArGrArGr | | TTTTAGA | | TCCTG | | |
| | CTG | | ATAG | | | | | | ATAAGGCTAGTC | | CrUrArGrArArArUr | | GCTAGA | | GTTTT | | |
| | ACT | | CAA | | | | | | CGTTATCAACTT | | ArGrCrArArGrUrUr | | AATAGC | | AGAGC | | |
| | CCT | | GTTA | | | | | | GAAAAAGTGGC | | ArArArArUrArArGr | | AAGTTA | | TAGAA | | |
| | G | | AAAT | | | | | | ACCGAGTCGGTG | | GrCrUrArGrUrCrCr | | AAATAA | | ATAGC | | |
| | | | AAG | | | | | | CGACTTCTCTTC | | GrUrUrArUrCrArAr | | GGCTAGT | | AAGTT | | |
| | | | GCTA | | | | | | AGGAGTCAGGTG | | CrUrUrGrArArArAr | | CCGTTAT | | AAAAT | | |
| | | | GTCC | | | | | | CACCAT | | ArGrUrGrGrCrArCr | | CAACTTG | | AAGGC | | |
| | | | GTTA | | | | | | | | CrGrArGrUrCrGrGr | | AAAAAG | | TAGTC | | |
| | | | TCAA | | | | | | | | UrGrCrGrArCrUrUr | | TGGCACC | | CGTTA | | |
| | | | CTTG | | | | | | | | CrUrCrUrUrCrArGr | | GAGTCG | | TCAAC | | |
| | | | AAA | | | | | | | | GrArGrUrCrArGrGr | | GTGCGA | | TTGAA | | |
| | | | AAGT | | | | | | | | UrGrCrArC*mC*mA | | CTTCTCT | | AAAGT | | |
| | | | GGC | | | | | | | | *mU | | TCAGGA | | GGCAC | | |
| | | | ACCG | | | | | | | | | | GTCAGAT | | CGAGT | | |
| | | | AGTC | | | | | | | | | | GCACCAT | | CGGTG | | |
| | | | GGTG | | | | | | | | | | | | CGACT | | |
| | | | C | | | | | | | | | | | | TCTCG | | |
| | | | | | | | | | | | | | | | TCAGG | | |
| | | | | | | | | | | | | | | | AGTCA | | |
| | | | | | | | | | | | | | | | GATGC | | |
| | | | | | | | | | | | | | | | ACCAT | | |
| HBB | CAT | 19303 | GTTT | 19393 | GAGT | 19483 | GACTT | 19573 | CATGGTGCACCT | 19663 | mC*mA*mU*rGrGr | 19753 | CATGGTG | 19843 | CATGG | 19933 | +++ |
| 5_RT | GG | | TAGA | | CAGG | | CTCTT | | GACTCCTGGTTT | | UrGrCrArCrCrUrGr | | CATCTGA | | TGCAT | | |
| 13_P | TGC | | GCTA | | TGCA | | CAG | | TAGAGCTAGAAA | | ArCrUrCrCrUrGrGr | | CTCCTGG | | CTGAC | | |
| BS15 | AC | | GAA | | CCA | | | | TAGCAAGTTAAA | | UrUrUrUrArGrArGr | | TTTTAGA | | TCCTG | | |
| | CTG | | ATAG | | | | | | ATAAGGCTAGTC | | CrUrArGrArArArUr | | GCTAGA | | GTTTT | | |
| | ACT | | CAA | | | | | | CGTTATCAACTT | | ArGrCrArArGrUrUr | | AATAGC | | AGAGC | | |
| | CCT | | GTTA | | | | | | GAAAAAGTGGC | | ArArArArUrArArGr | | AAGTTA | | TAGAA | | |
| | G | | AAAT | | | | | | ACCGAGTCGGTG | | GrCrUrArGrUrCrCr | | AAATAA | | ATAGC | | |
| | | | AAG | | | | | | CGACTTCTCTTC | | GrUrUrArUrCrArAr | | GGCTAGT | | AAGTT | | |
| | | | GCTA | | | | | | | | CrUrUrGrArArArAr | | CCGTTAT | | AAAAT | | |
| | | | GTCC | | | | | | AGGAGTCAGGTG | | ArGrUrGrGrCrArCr | | CAACTTG | | AAGGC | | |
| | | | GTTA | | | | | | CACCA | | CrGrArGrUrCrGrGr | | AAAAAG | | TAGTC | | |
| | | | TCAA | | | | | | | | UrGrCrGrArCrUrUr | | TGGCACC | | CGTTA | | |
| | | | CTTG | | | | | | | | CrUrCrUrUrCrArGr | | GAGTCG | | TCAAC | | |
| | | | AAA | | | | | | | | GrArGrUrCrArGrGr | | GTGCGA | | TTGAA | | |
| | | | AAGT | | | | | | | | UrGrCrA*mC*mC* | | CTTCTCT | | AAAGT | | |
| | | | GGC | | | | | | | | mA | | TCAGGA | | GGCAC | | |
| | | | ACCG | | | | | | | | | | GTCAGAT | | CGAGT | | |
| | | | AGTC | | | | | | | | | | GCACCA | | CGGTG | | |
| | | | GGTG | | | | | | | | | | | | CGACT | | |
| | | | C | | | | | | | | | | | | TCTCG | | |
| | | | | | | | | | | | | | | | TCAGG | | |
| | | | | | | | | | | | | | | | AGTCA | | |
| | | | | | | | | | | | | | | | GATGC | | |
| | | | | | | | | | | | | | | | ACCA | | |
| HBB | CAT | 19304 | GTTT | 19394 | GAGT | 19484 | GACTT | 19574 | CATGGTGCACCT | 19664 | mC*mA*mU*rGrGr | 19754 | CATGGTG | 19844 | CATGG | 19934 | +++ |
| 5_RT | GG | | TAGA | | CAGG | | CTCTTTT | | GACTCCTGGTTT | | UrGrCrArCrCrUrGr | | CATCTGA | | TGCAT | | |
| 13_P | TGC | | GCTA | | TGCA | | CAG | | TAGAGCTAGAAA | | ArCrUrCrCrUrGrGr | | CTCCTGG | | CTGAC | | |
| BS14 | AC | | GAA | | CC | | | | TAGCAAGTTAAA | | UrUrUrUrArGrArGr | | TTTTAGA | | TCCTG | | |
| | CTG | | ATAG | | | | | | ATAAGGCTAGTC | | CrUrArGrArArArUr | | GCTAGA | | GTTTT | | |
| | ACT | | CAA | | | | | | CGTTATCAACTT | | ArGrCrArArGrUrUr | | AATAGC | | AGAGC | | |
| | CCT | | GTTA | | | | | | GAAAAAGTGGC | | ArArArArUrArArGr | | AAGTTA | | TAGAA | | |
| | G | | AAAT | | | | | | ACCGAGTCGGTG | | GrCrUrArGrUrCrCr | | AAATAA | | ATAGC | | |
| | | | AAG | | | | | | CGACTTCTCTTC | | GrUrUrArUrCrArAr | | GGCTAGT | | AAGTT | | |
| | | | GCTA | | | | | | AGGAGTCAGGTG | | CrUrUrGrArArArAr | | CCGTTAT | | AAAAT | | |
| | | | GTCC | | | | | | CACC | | ArGrUrGrGrCrArCr | | CAACTTG | | AAGGC | | |
| | | | GTTA | | | | | | | | CrGrArGrUrCrGrGr | | AAAAAG | | TAGTC | | |
| | | | TCAA | | | | | | | | UrGrCrGrArCrUrUr | | TGGCACC | | CGTTA | | |
| | | | CTTG | | | | | | | | CrUrCrUrUrCrArGr | | GAGTCG | | TCAAC | | |
| | | | AAA | | | | | | | | GrArGrUrCrArGrGr | | GTGCGA | | TTGAA | | |
| | | | AAGT | | | | | | | | UrGrC*mA*mC*mC | | CTTCTCT | | AAAGT | | |
| | | | GGC | | | | | | | | | | TCAGGA | | GGCAC | | |
| | | | ACCG | | | | | | | | | | GTCAGAT | | CGAGT | | |
| | | | AGTC | | | | | | | | | | GCACC | | CGGTG | | |
| | | | GGTG | | | | | | | | | | | | CGACT | | |
| | | | C | | | | | | | | | | | | TCTCG | | |
| | | | | | | | | | | | | | | | TCAGG | | |
| | | | | | | | | | | | | | | | AGTCA | | |
| | | | | | | | | | | | | | | | GATGC | | |
| | | | | | | | | | | | | | | | ACC | | |
| HBB | CAT | 19305 | GTTT | 19395 | GAGT | 19485 | GACTT | 19575 | CATGGTGCACCT | 19665 | mC*mA*mU*rGrGr | 19755 | CATGGTG | 19845 | CATGG | 19935 | +++ |
| 5_RT | GG | | TAGA | | CAGG | | CTCTT | | GACTCCTGGTTT | | UrGrCrArCrCrUrGr | | CATCTGA | | TGCAT | | |
| 13_P | TGC | | GCTA | | TGCA | | CAG | | TAGAGCTAGAAA | | ArCrUrCrCrUrGrGr | | CTCCTGG | | CTGAC | | |
| BS13 | AC | | GAA | | C | | | | TAGCAAGTTAAA | | UrUrUrUrArGrArGr | | TTTTAGA | | TCCTG | | |
| | CTG | | ATAG | | | | | | ATAAGGCTAGTC | | CrUrArGrArArArUr | | GCTAGA | | GTTTT | | |
| | ACT | | CAA | | | | | | CGTTATCAACTT | | ArGrCrArArGrUrUr | | AATAGC | | AGAGC | | |
| | CCT | | GTTA | | | | | | GAAAAAGTGGC | | ArArArArUrArArGr | | AAGTTA | | TAGAA | | |
| | G | | AAAT | | | | | | ACCGAGTCGGTG | | GrCrUrArGrUrCrCr | | AAATAA | | ATAGC | | |
| | | | AAG | | | | | | CGACTTCTCTTC | | GrUrUrArUrCrArAr | | GGCTAGT | | AAGTT | | |
| | | | GCTA | | | | | | AGGAGTCAGGTG | | CrUrUrGrArArArAr | | CCGTTAT | | AAAAT | | |
| | | | GTCC | | | | | | CAC | | ArGrUrGrGrCrArCr | | CAACTTG | | AAGGC | | |
| | | | GTTA | | | | | | | | CrGrArGrUrCrGrGr | | AAAAAG | | TAGTC | | |
| | | | TCAA | | | | | | | | UrGrCrGrArCrUrUr | | TGGCACC | | CGTTA | | |
| | | | CTTG | | | | | | | | CrUrCrUrUrCrArGr | | GAGTCG | | TCAAC | | |
| | | | AAA | | | | | | | | GrArGrUrCrArGrGr | | GTGCGA | | TTGAA | | |
| | | | AAGT | | | | | | | | UrG*mC*mA*mC | | CTTCTCT | | AAAGT | | |
| | | | GGC | | | | | | | | | | TCAGGA | | GGCAC | | |
| | | | ACCG | | | | | | | | | | GTCAGAT | | CGAGT | | |
| | | | AGTC | | | | | | | | | | GCAC | | CGGTG | | |
| | | | GGTG | | | | | | | | | | | | CGACT | | |
| | | | C | | | | | | | | | | | | TCTCG | | |
| | | | | | | | | | | | | | | | TCAGG | | |
| | | | | | | | | | | | | | | | AGTCA | | |
| | | | | | | | | | | | | | | | GATGC | | |
| | | | | | | | | | | | | | | | AC | | |
| HBB | CAT | 19306 | GTTT | 19396 | GAGT | 19486 | GACTT | 19576 | CATGGTGCACCT | 19666 | mC*mA*mU*rGrGr | 19756 | CATGGTG | 198 | CATGG | 199 | +++ |
| 5_RT | GG | | TAGA | | CAGG | | CTCTT | | GACTCCTGGTTT | | UrGrCrArCrCrUrGr | | CATCTGA | 46 | TGCAT | 36 | |
| 13_P | TGC | | GCTA | | TGCA | | CAG | | TAGAGCTAGAAA | | ArCrUrCrCrUrGrGr | | CTCCTGG | | CTGAC | | |
| BS12 | AC | | GAA | | | | | | TAGCAAGTTAAA | | UrUrUrUrArGrArGr | | TTTTAGA | | TCCTG | | |
| | CTG | | ATAG | | | | | | ATAAGGCTAGTC | | CrUrArGrArArArUr | | GCTAGA | | GTTTT | | |
| | ACT | | CAA | | | | | | CGTTATCAACTT | | ArGrCrArArGrUrUr | | AATAGC | | AGAGC | | |
| | CCT | | GTTA | | | | | | GAAAAAGTGGC | | ArArArArUrArArGr | | AAGTTA | | TAGAA | | |
| | G | | AAAT | | | | | | ACCGAGTCGGTG | | GrCrUrArGrUrCrCr | | AAATAA | | ATAGC | | |
| | | | AAG | | | | | | CGACTTCTCTTC | | GrUrUrArUrCrArAr | | GGCTAGT | | AAGTT | | |
| | | | GCTA | | | | | | AGGAGTCAGGTG | | CrUrUrGrArArArAr | | CCGTTAT | | AAAAT | | |
| | | | GTCC | | | | | | CA | | ArGrUrGrGrCrArCr | | CAACTTG | | AAGGC | | |
| | | | GTTA | | | | | | | | CrGrArGrUrCrGrGr | | AAAAAG | | TAGTC | | |
| | | | TCAA | | | | | | | | UrGrCrGrArCrUrUr | | TGGCACC | | CGTTA | | |
| | | | CTTG | | | | | | | | CrUrCrUrUrCrArGr | | GAGTCG | | TCAAC | | |
| | | | AAA | | | | | | | | GrArGrUrCrArGrGr | | GTGCGA | | TTGAA | | |
| | | | AAGT | | | | | | | | U*mG*mC*mA | | CTTCTCT | | AAAGT | | |
| | | | GGC | | | | | | | | | | TCAGGA | | GGCAC | | |
| | | | ACCG | | | | | | | | | | GTCAGAT | | CGAGT | | |
| | | | AGTC | | | | | | | | | | GCA | | CGGTG | | |
| | | | GGTG | | | | | | | | | | | | CGACT | | |
| | | | C | | | | | | | | | | | | TCTCG | | |
| | | | | | | | | | | | | | | | TCAGG | | |
| | | | | | | | | | | | | | | | AGTCA | | |
| | | | | | | | | | | | | | | | GATGC | | |
| | | | | | | | | | | | | | | | A | | |
| HBB | CAT | 19307 | GTTT | 19397 | GAGT | 19487 | GACTT | 19577 | CATGGTGCACCT | 19667 | mC*mA*mU*rGrGr | 19757 | CATGGTG | 19847 | CATGG | 19937 | +++ |
| 5_RT | GG | | TAGA | | CAGG | | CTCTT | | GACTCCTGGTTT | | UrGrCrArCrCrUrGr | | CATCTGA | | TGCAT | | |
| 13_P | TGC | | GCTA | | TGC | | CAG | | TAGAGCTAGAAA | | ArCrUrCrCrUrGrGr | | CTCCTGG | | CTGAC | | |
| BS11 | AC | | GAA | | | | | | TAGCAAGTTAAA | | UrUrUrUrArGrArGr | | TTTTAGA | | TCCTG | | |
| | CTG | | ATAG | | | | | | ATAAGGCTAGTC | | CrUrArGrArArArUr | | GCTAGA | | GTTTT | | |
| | ACT | | CAA | | | | | | CGTTATCAACTT | | ArGrCrArArGrUrUr | | AATAGC | | AGAGC | | |
| | CCT | | GTTA | | | | | | GAAAAAGTGGC | | ArArArArUrArArGr | | AAGTTA | | TAGAA | | |
| | G | | AAAT | | | | | | ACCGAGTCGGTG | | GrCrUrArGrUrCrCr | | AAATAA | | ATAGC | | |
| | | | AAG | | | | | | CGACTTCTCTTC | | GrUrUrArUrCrArAr | | GGCTAGT | | AAGTT | | |
| | | | GCTA | | | | | | AGGAGTCAGGTG | | CrUrUrGrArArArAr | | CCGTTAT | | AAAAT | | |
| | | | GTCC | | | | | | C | | ArGrUrGrGrCrArCr | | CAACTTG | | AAGGC | | |
| | | | GTTA | | | | | | | | CrGrArGrUrCrGrGr | | AAAAAG | | TAGTC | | |
| | | | TCAA | | | | | | | | UrGrCrGrArCrUrUr | | TGGCACC | | CGTTA | | |
| | | | CTTG | | | | | | | | CrUrCrUrUrCrArGr | | GAGTCG | | TCAAC | | |
| | | | AAA | | | | | | | | GrArGrUrCrArGrG* | | GTGCGA | | TTGAA | | |
| | | | AAGT | | | | | | | | mU*mG*mC | | CTTCTCT | | AAAGT | | |
| | | | GGC | | | | | | | | | | TCAGGA | | GGCAC | | |
| | | | ACCG | | | | | | | | | | GTCAGAT | | CGAGT | | |
| | | | AGTC | | | | | | | | | | GC | | CGGTG | | |
| | | | GGTG | | | | | | | | | | | | CGACT | | |
| | | | C | | | | | | | | | | | | TCTCG | | |
| | | | | | | | | | | | | | | | TCAGG | | |
| | | | | | | | | | | | | | | | AGTCA | | |
| | | | | | | | | | | | | | | | GATGC | | |
| HBB | CAT | 19308 | GTTT | 19398 | GAGT | 19488 | GACTT | 19578 | CATGGTGCACCT | 19668 | mC*mA*mU*rGrGr | 19758 | CATGGTG | 19848 | CATGG | 19938 | +++ |
| 5_RT | GG | | TAGA | | CAGG | | CTCTT | | GACTCCTGGTTT | | UrGrCrArCrCrUrGr | | CATCTGA | | TGCAT | | |
| 13_P | TGC | | GCTA | | TG | | CAG | | TAGAGCTAGAAA | | ArCrUrCrCrUrGrGr | | CTCCTGG | | CTGAC | | |
| BS10 | AC | | GAA | | | | | | TAGCAAGTTAAA | | UrUrUrUrArGrArGr | | TTTTAGA | | TCCTG | | |
| | CTG | | ATAG | | | | | | ATAAGGCTAGTC | | CrUrArGrArArArUr | | GCTAGA | | GTTTT | | |
| | ACT | | CAA | | | | | | CGTTATCAACTT | | ArGrCrArArGrUrUr | | AATAGC | | AGAGC | | |
| | CCT | | GTTA | | | | | | GAAAAAGTGGC | | ArArArArUrArArGr | | AAGTTA | | TAGAA | | |
| | G | | AAAT | | | | | | ACCGAGTCGGTG | | GrCrUrArGrUrCrCr | | AAATAA | | ATAGC | | |
| | | | AAG | | | | | | CGACTTCTCTTC | | GrUrUrArUrCrArAr | | GGCTAGT | | AAGTT | | |
| | | | GCTA | | | | | | AGGAGTCAGGTG | | CrUrUrGrArArArAr | | CCGTTAT | | AAAAT | | |
| | | | GTCC | | | | | | | | ArGrUrGrGrCrArCr | | CAACTTG | | AAGGC | | |
| | | | GTTA | | | | | | | | CrGrArGrUrCrGrGr | | AAAAAG | | TAGTC | | |
| | | | TCAA | | | | | | | | UrGrCrGrArCrUrUr | | TGGCACC | | CGTTA | | |
| | | | CTTG | | | | | | | | CrUrCrUrUrCrArGr | | GAGTCG | | TCAAC | | |
| | | | AAA | | | | | | | | GrArGrUrCrArG*m | | GTGCGA | | TTGAA | | |
| | | | AAGT | | | | | | | | G*mU*mG | | CTTCTCT | | AAAGT | | |
| | | | GGC | | | | | | | | | | TCAGGA | | GGCAC | | |
| | | | ACCG | | | | | | | | | | GTCAGAT | | CGAGT | | |
| | | | AGTC | | | | | | | | | | G | | CGGTG | | |
| | | | GGTG | | | | | | | | | | | | CGACT | | |
| | | | C | | | | | | | | | | | | TCTCG | | |
| | | | | | | | | | | | | | | | TCAGG | | |
| | | | | | | | | | | | | | | | AGTCA | | |
| | | | | | | | | | | | | | | | GATG | | |
| HBB | CAT | 19309 | GTTT | 19399 | GAGT | | GACTT | 19579 | CATGGTGCACCT | 19669 | mC*mA*mU*rGrGr | 19759 | CATGGTG | 19849 | CATGG | 19939 | +++ |
| 5_RT | GG | | TAGA | | CAGG | | CTCTT | | GACTCCTGGTTT | | UrGrCrArCrCrUrGr | | CATCTGA | | TGCAT | | |
| 13_P | TGC | | GCTA | | T | | CAG | | TAGAGCTAGAAA | | ArCrUrCrCrUrGrGr | | CTCCTGG | | CTGAC | | |
| BS9 | AC | | GAA | | | | | | TAGCAAGTTAAA | | UrUrUrUrArGrArGr | | TTTTAGA | | TCCTG | | |
| | CTG | | ATAG | | | | | | ATAAGGCTAGTC | | CrUrArGrArArArUr | | GCTAGA | | GTTTT | | |
| | ACT | | CAA | | | | | | CGTTATCAACTT | | ArGrCrArArGrUrUr | | AATAGC | | AGAGC | | |
| | CCT | | GTTA | | | | | | GAAAAAGTGGC | | ArArArArUrArArGr | | AAGTTA | | TAGAA | | |
| | G | | AAAT | | | | | | ACCGAGTCGGTG | | GrCrUrArGrUrCrCr | | AAATAA | | ATAGC | | |
| | | | AAG | | | | | | CGACTTCTCTTC | | GrUrUrArUrCrArAr | | GGCTAGT | | AAGTT | | |
| | | | GCTA | | | | | | AGGAGTCAGGT | | CrUrUrGrArArArAr | | CCGTTAT | | AAAAT | | |
| | | | GTCC | | | | | | | | ArGrUrGrGrCrArCr | | CAACTTG | | AAGGC | | |
| | | | GTTA | | | | | | | | CrGrArGrUrCrGrGr | | AAAAAG | | TAGTC | | |
| | | | TCAA | | | | | | | | UrGrCrGrArCrUrUr | | TGGCACC | | CGTTA | | |
| | | | CTTG | | | | | | | | CrUrCrUrUrCrArGr | | GAGTCG | | TCAAC | | |
| | | | AAA | | | | | | | | GrArGrUrCrA*mG* | | GTGCGA | | TTGAA | | |
| | | | AAGT | | | | | | | | mG*mU | | CTTCTCT | | AAAGT | | |
| | | | GGC | | | | | | | | | | TCAGGA | | GGCAC | | |
| | | | ACCG | | | | | | | | | | GTCAGAT | | CGAGT | | |
| | | | AGTC | | | | | | | | | | | | CGGTG | | |
| | | | GGTG | | | | | | | | | | | | CGACT | | |
| | | | C | | | | | | | | | | | | TCTCG | | |
| | | | | | | | | | | | | | | | TCAGG | | |
| | | | | | | | | | | | | | | | AGTCA | | |
| | | | | | | | | | | | | | | | GAT | | |
| HBB | CAT | 19310 | GTTT | 19400 | GAGT | | GACTT | 19580 | CATGGTGCACCT | 19670 | mC*mA*mU*rGrGr | 19760 | CATGGTG | 19850 | CATGG | 19940 | ++ |
| 5_RT | GG | | TAGA | | CAGG | | CTCTT | | GACTCCTGGTTT | | UrGrCrArCrCrUrGr | | CATCTGA | | TGCAT | | |
| 13_P | TGC | | GCTA | | | | CAG | | TAGAGCTAGAAA | | ArCrUrCrCrUrGrGr | | CTCCTGG | | CTGAC | | |
| BS8 | AC | | GAA | | | | | | TAGCAAGTTAAA | | UrUrUrUrArGrArGr | | TTTTAGA | | TCCTG | | |
| | CTG | | ATAG | | | | | | ATAAGGCTAGTC | | CrUrArGrArArArUr | | GCTAGA | | GTTTT | | |
| | ACT | | CAA | | | | | | CGTTATCAACTT | | ArGrCrArArGrUrUr | | AATAGC | | AGAGC | | |
| | CCT | | GTTA | | | | | | GAAAAAGTGGC | | ArArArArUrArArGr | | AAGTTA | | TAGAA | | |
| | G | | AAAT | | | | | | ACCGAGTCGGTG | | GrCrUrArGrUrCrCr | | AAATAA | | ATAGC | | |
| | | | AAG | | | | | | CGACTTCTCTTC | | GrUrUrArUrCrArAr | | GGCTAGT | | AAGTT | | |
| | | | GCTA | | | | | | AGGAGTCAGG | | CrUrUrGrArArArAr | | CCGTTAT | | AAAAT | | |
| | | | GTCC | | | | | | | | ArGrUrGrGrCrArCr | | CAACTTG | | AAGGC | | |
| | | | GTTA | | | | | | | | CrGrArGrUrCrGrGr | | AAAAAG | | TAGTC | | |
| | | | TCAA | | | | | | | | UrGrCrGrArCrUrUr | | TGGCACC | | CGTTA | | |
| | | | CTTG | | | | | | | | CrUrCrUrUrCrArGr | | GAGTCG | | TCAAC | | |
| | | | AAA | | | | | | | | GrArGrUrC*mA*mG | | GTGCGA | | TTGAA | | |
| | | | AAGT | | | | | | | | *mG | | CTTCTCT | | AAAGT | | |
| | | | GGC | | | | | | | | | | TCAGGA | | GGCAC | | |
| | | | ACCG | | | | | | | | | | GTCAGA | | CGAGT | | |
| | | | AGTC | | | | | | | | | | | | CGGTG | | |
| | | | GGTG | | | | | | | | | | | | CGACT | | |
| | | | C | | | | | | | | | | | | TCTCG | | |
| | | | | | | | | | | | | | | | TCAGG | | |
| | | | | | | | | | | | | | | | AGTCA | | |
| | | | | | | | | | | | | | | | GA | | |
| HBB | CAT | 19311 | GTTT | 19401 | GAGT | 19491 | ACTTC | 19581 | CATGGTGCACCT | 19671 | mC*mA*mU*rGrGr | 19761 | CATGGTG | 19851 | CATGG | 19941 | +++ |
| 5_RT | GG | | TAGA | | CAGG | | TCTTC | | GACTCCTGGTTT | | UrGrCrArCrCrUrGr | | CATCTGA | | TGCAT | | |
| 12_P | TGC | | GCTA | | TGCA | | AG | | TAGAGCTAGAAA | | ArCrUrCrCrUrGrGr | | CTCCTGG | | CTGAC | | |
| BS17 | AC | | GAA | | CCAT | | | | TAGCAAGTTAAA | | UrUrUrUrArGrArGr | | TTTTAGA | | TCCTG | | |
| | CTG | | ATAG | | G | | | | ATAAGGCTAGTC | | CrUrArGrArArArUr | | GCTAGA | | GTTTT | | |
| | ACT | | CAA | | | | | | CGTTATCAACTT | | ArGrCrArArGrUrUr | | AATAGC | | AGAGC | | |
| | CCT | | GTTA | | | | | | GAAAAAGTGGC | | ArArArArUrArArGr | | AAGTTA | | TAGAA | | |
| | G | | AAAT | | | | | | ACCGAGTCGGTG | | GrCrUrArGrUrCrCr | | AAATAA | | ATAGC | | |
| | | | AAG | | | | | | CACTTCTCTTCA | | GrUrUrArUrCrArAr | | GGCTAGT | | AAGTT | | |
| | | | GCTA | | | | | | GGAGTCAGGTGC | | CrUrUrGrArArArAr | | CCGTTAT | | AAAAT | | |
| | | | GTCC | | | | | | ACCATG | | ArGrUrGrGrCrArCr | | CAACTTG | | AAGGC | | |
| | | | GTTA | | | | | | | | CrGrArGrUrCrGrGr | | AAAAAG | | TAGTC | | |
| | | | TCAA | | | | | | | | UrGrCrArCrUrUrCr | | TGGCACC | | CGTTA | | |
| | | | CTTG | | | | | | | | UrCrUrUrCrArGrGr | | GAGTCG | | TCAAC | | |
| | | | AAA | | | | | | | | ArGrUrCrArGrGrUr | | GTGCACT | | TTGAA | | |
| | | | AAGT | | | | | | | | GrCrArCrC*mA*mU | | TCTCTTC | | AAAGT | | |
| | | | GGC | | | | | | | | *mG | | AGGAGT | | GGCAC | | |
| | | | ACCG | | | | | | | | | | CAGATG | | CGAGT | | |
| | | | AGTC | | | | | | | | | | CACCATG | | CGGTG | | |
| | | | GGTG | | | | | | | | | | | | CACTT | | |
| | | | C | | | | | | | | | | | | CTCGT | | |
| | | | | | | | | | | | | | | | CAGGA | | |
| | | | | | | | | | | | | | | | GTCAG | | |
| | | | | | | | | | | | | | | | ATGCA | | |
| | | | | | | | | | | | | | | | CCATG | | |
| HBB | CAT | 19312 | GTTT | 19402 | GAGT | 19492 | ACTTC | 19582 | CATGGTGCACCT | 19672 | mC*mA*mU*rGrGr | 19762 | CATGGTG | 19852 | CATGG | 19942 | +++ |
| 5_RT | GG | | TAGA | | CAGG | | TCTTC | | GACTCCTGGTTT | | UrGrCrArCrCrUrGr | | CATCTGA | | TGCAT | | |
| 12_P | TGC | | GCTA | | TGCA | | AG | | TAGAGCTAGAAA | | ArCrUrCrCrUrGrGr | | CTCCTGG | | CTGAC | | |
| BS16 | AC | | GAA | | CCAT | | | | TAGCAAGTTAAA | | UrUrUrUrArGrArGr | | TTTTAGA | | TCCTG | | |
| | CTG | | ATAG | | | | | | ATAAGGCTAGTC | | CrUrArGrArArArUr | | GCTAGA | | GTTTT | | |
| | ACT | | CAA | | | | | | CGTTATCAACTT | | ArGrCrArArGrUrUr | | AATAGC | | AGAGC | | |
| | CCT | | GTTA | | | | | | GAAAAAGTGGC | | ArArArArUrArArGr | | AAGTTA | | TAGAA | | |
| | G | | AAAT | | | | | | ACCGAGTCGGTG | | GrCrUrArGrUrCrCr | | AAATAA | | ATAGC | | |
| | | | AAG | | | | | | CACTTCTCTTCA | | GrUrUrArUrCrArAr | | GGCTAGT | | AAGTT | | |
| | | | GCTA | | | | | | GGAGTCAGGTGC | | CrUrUrGrArArArAr | | CCGTTAT | | AAAAT | | |
| | | | GTCC | | | | | | ACCAT | | ArGrUrGrGrCrArCr | | CAACTTG | | AAGGC | | |
| | | | GTTA | | | | | | | | CrGrArGrUrCrGrGr | | AAAAAG | | TAGTC | | |
| | | | TCAA | | | | | | | | UrGrCrArCrUrUrCr | | TGGCACC | | CGTTA | | |
| | | | CTTG | | | | | | | | UrCrUrUrCrArGrGr | | GAGTCG | | TCAAC | | |
| | | | AAA | | | | | | | | ArGrUrCrArGrGrUr | | GTGCACT | | TTGAA | | |
| | | | AAGT | | | | | | | | GrCrArC*mC*mA* | | TCTCTTC | | AAAGT | | |
| | | | GGC | | | | | | | | mU | | AGGAGT | | GGCAC | | |
| | | | ACCG | | | | | | | | | | CAGATG | | CGAGT | | |
| | | | AGTC | | | | | | | | | | CACCAT | | CGGTG | | |
| | | | GGTG | | | | | | | | | | | | CACTT | | |
| | | | C | | | | | | | | | | | | CTCGT | | |
| | | | | | | | | | | | | | | | CAGGA | | |
| | | | | | | | | | | | | | | | GTCAG | | |
| | | | | | | | | | | | | | | | ATGCA | | |
| | | | | | | | | | | | | | | | CCAT | | |
| HBB | CAT | 19313 | GTTT | 19403 | GAGT | 19493 | ACTTC | 19583 | CATGGTGCACCT | 19673 | mC*mA*mU*rGrGr | 19763 | CATGGTG | 19853 | CATGG | 19943 | +++ |
| 5_RT | GG | | TAGA | | CAGG | | TCTTC | | GACTCCTGGTTT | | UrGrCrArCrCrUrGr | | CATCTGA | | TGCAT | | |
| 12_P | TGC | | GCTA | | TGCA | | AG | | TAGAGCTAGAAA | | ArCrUrCrCrUrGrGr | | CTCCTGG | | CTGAC | | |
| BS15 | AC | | GAA | | CCA | | | | TAGCAAGTTAAA | | UrUrUrUrArGrArGr | | TTTTAGA | | TCCTG | | |
| | CTG | | ATAG | | | | | | ATAAGGCTAGTC | | CrUrArGrArArArUr | | GCTAGA | | GTTTT | | |
| | ACT | | CAA | | | | | | CGTTATCAACTT | | ArGrCrArArGrUrUr | | AATAGC | | AGAGC | | |
| | CCT | | GTTA | | | | | | GAAAAAGTGGC | | ArArArArUrArArGr | | AAGTTA | | TAGAA | | |
| | G | | AAAT | | | | | | ACCGAGTCGGTG | | GrCrUrArGrUrCrCr | | AAATAA | | ATAGC | | |
| | | | AAG | | | | | | CACTTCTCTTCA | | GrUrUrArUrCrArAr | | GGCTAGT | | AAGTT | | |
| | | | GCTA | | | | | | GGAGTCAGGTGC | | CrUrUrGrArArArAr | | CCGTTAT | | AAAAT | | |
| | | | GTCC | | | | | | ACCA | | ArGrUrGrGrCrArCr | | CAACTTG | | AAGGC | | |
| | | | GTTA | | | | | | | | CrGrArGrUrCrGrGr | | AAAAAG | | TAGTC | | |
| | | | TCAA | | | | | | | | UrGrCrArCrUrUrCr | | TGGCACC | | CGTTA | | |
| | | | CTTG | | | | | | | | UrCrUrUrCrArGrGr | | GAGTCG | | TCAAC | | |
| | | | AAA | | | | | | | | ArGrUrCrArGrGrUr | | GTGCACT | | TTGAA | | |
| | | | AAGT | | | | | | | | GrCrA*mC*mC*mA | | TCTCTTC | | AAAGT | | |
| | | | GGC | | | | | | | | | | AGGAGT | | GGCAC | | |
| | | | ACCG | | | | | | | | | | CAGATG | | CGAGT | | |
| | | | AGTC | | | | | | | | | | CACCA | | CGGTG | | |
| | | | GGTG | | | | | | | | | | | | CACTT | | |
| | | | C | | | | | | | | | | | | CTCGT | | |
| | | | | | | | | | | | | | | | CAGGA | | |
| | | | | | | | | | | | | | | | GTCAG | | |
| | | | | | | | | | | | | | | | ATGCA | | |
| | | | | | | | | | | | | | | | CCA | | |
| HBB | CAT | 19314 | GTTT | 19404 | GAGT | 19494 | ACTTC | 19584 | CATGGTGCACCT | 19674 | mC*mA*mU*rGrGr | 19764 | CATGGTG | 19854 | CATGG | 19944 | +++ |
| 5_RT | GG | | TAGA | | CAGG | | TCTTC | | GACTCCTGGTTT | | UrGrCrArCrCrUrGr | | CATCTGA | | TGCAT | | |
| 12_P | TGC | | GCTA | | TGCA | | AG | | TAGAGCTAGAAA | | ArCrUrCrCrUrGrGr | | CTCCTGG | | CTGAC | | |
| BS14 | AC | | GAA | | CC | | | | TAGCAAGTTAAA | | UrUrUrUrArGrArGr | | TTTTAGA | | TCCTG | | |
| | CTG | | ATAG | | | | | | ATAAGGCTAGTC | | CrUrArGrArArArUr | | GCTAGA | | GTTTT | | |
| | ACT | | CAA | | | | | | CGTTATCAACTT | | ArGrCrArArGrUrUr | | AATAGC | | AGAGC | | |
| | CCT | | GTTA | | | | | | GAAAAAGTGGC | | ArArArArUrArArGr | | AAGTTA | | TAGAA | | |
| | G | | AAAT | | | | | | ACCGAGTCGGTG | | GrCrUrArGrUrCrCr | | AAATAA | | ATAGC | | |
| | | | AAG | | | | | | CACTTCTCTTCA | | GrUrUrArUrCrArAr | | GGCTAGT | | AAGTT | | |
| | | | GCTA | | | | | | GGAGTCAGGTGC | | CrUrUrGrArArArAr | | CCGTTAT | | AAAAT | | |
| | | | GTCC | | | | | | ACC | | ArGrUrGrGrCrArCr | | CAACTTG | | AAGGC | | |
| | | | GTTA | | | | | | | | CrGrArGrUrCrGrGr | | AAAAAG | | TAGTC | | |
| | | | TCAA | | | | | | | | UrGrCrArCrUrUrCr | | TGGCACC | | CGTTA | | |
| | | | CTTG | | | | | | | | UrCrUrUrCrArGrGr | | GAGTCG | | TCAAC | | |
| | | | AAA | | | | | | | | ArGrUrCrArGrGrUr | | GTGCACT | | TTGAA | | |
| | | | AAGT | | | | | | | | GrC*mA*mC*mC | | TCTCTTC | | AAAGT | | |
| | | | GGC | | | | | | | | | | AGGAGT | | GGCAC | | |
| | | | ACCG | | | | | | | | | | CAGATG | | CGAGT | | |
| | | | AGTC | | | | | | | | | | CACC | | CGGTG | | |
| | | | GGTG | | | | | | | | | | | | CACTT | | |
| | | | C | | | | | | | | | | | | CTCGT | | |
| | | | | | | | | | | | | | | | CAGGA | | |
| | | | | | | | | | | | | | | | GTCAG | | |
| | | | | | | | | | | | | | | | ATGCA | | |
| | | | | | | | | | | | | | | | CC | | |
| HBB | CAT | 19315 | GTTT | 19405 | GAGT | 19495 | ACTTC | 19585 | CATGGTGCACCT | 19675 | mC*mA*mU*rGrGr | 19765 | CATGGTG | 19855 | CATGG | 19945 | +++ |
| 5_RT | GG | | TAGA | | CAGG | | TCTTC | | GACTCCTGGTTT | | UrGrCrArCrCrUrGr | | CATCTGA | | TGCAT | | |
| 12_P | TGC | | GCTA | | TGCA | | AG | | TAGAGCTAGAAA | | ArCrUrCrCrUrGrGr | | CTCCTGG | | CTGAC | | |
| BS13 | AC | | GAA | | C | | | | TAGCAAGTTAAA | | UrUrUrUrArGrArGr | | TTTTAGA | | TCCTG | | |
| | CTG | | ATAG | | | | | | ATAAGGCTAGTC | | CrUrArGrArArArUr | | GCTAGA | | GTTTT | | |
| | ACT | | CAA | | | | | | CGTTATCAACTT | | ArGrCrArArGrUrUr | | AATAGC | | AGAGC | | |
| | CCT | | GTTA | | | | | | GAAAAAGTGGC | | ArArArArUrArArGr | | AAGTTA | | TAGAA | | |
| | G | | AAAT | | | | | | ACCGAGTCGGTG | | GrCrUrArGrUrCrCr | | AAATAA | | ATAGC | | |
| | CAT | | AAG | | | | | | CACTTCTCTTCA | | GrUrUrArUrCrArAr | | GGCTAGT | | AAGTT | | |
| | | | GCTA | | | | | | GGAGTCAGGTGC | | CrUrUrGrArArArAr | | CCGTTAT | | AAAAT | | |
| | | | GTCC | | | | | | AC | | ArGrUrGrGrCrArCr | | CAACTTG | | AAGGC | | |
| | | | GTTA | | | | | | | | CrGrArGrUrCrGrGr | | AAAAAG | | TAGTC | | |
| | | | TCAA | | | | | | | | UrGrCrArCrUrUrCr | | TGGCACC | | CGTTA | | |
| | | | CTTG | | | | | | | | UrCrUrUrCrArGrGr | | GAGTCG | | TCAAC | | |
| | | | AAA | | | | | | | | ArGrUrCrArGrGrUr | | GTGCACT | | TTGAA | | |
| | | | AAGT | | | | | | | | G*mC*mA*mC | | TCTCTTC | | AAAGT | | |
| | | | GGC | | | | | | | | | | AGGAGT | | GGCAC | | |
| | | | ACCG | | | | | | | | | | CAGATG | | CGAGT | | |
| | | | AGTC | | | | | | | | | | CAC | | CGGTG | | |
| | | | GGTG | | | | | | | | | | | | CACTT | | |
| | | | C | | | | | | | | | | | | CTCGT | | |
| | | | | | | | | | | | | | | | CAGGA | | |
| | | | | | | | | | | | | | | | GTCAG | | |
| | | | | | | | | | | | | | | | ATGCA | | |
| | | | | | | | | | | | | | | | C | | |
| HBB | GG | 19316 | GTTT | 19406 | GAGT | 19496 | ACTTC | 19586 | CATGGTGCACCT | 19676 | mC*mA*mU*rGrGr | 19766 | CATGGTG | 19856 | CATGG | 19946 | +++ |
| 5_RT | TGC | | TAGA | | CAGG | | TCTTC | | GACTCCTGGTTT | | UrGrCrArCrCrUrGr | | CATCTGA | | TGCAT | | |
| 12_P | AC | | GCTA | | TGCA | | AG | | TAGAGCTAGAAA | | ArCrUrCrCrUrGrGr | | CTCCTGG | | CTGAC | | |
| BS12 | CTG | | GAA | | | | | | TAGCAAGTTAAA | | UrUrUrUrArGrArGr | | TTTTAGA | | TCCTG | | |
| | ACT | | ATAG | | | | | | ATAAGGCTAGTC | | CrUrArGrArArArUr | | GCTAGA | | GTTTT | | |
| | CCT | | CAA | | | | | | CGTTATCAACTT | | ArGrCrArArGrUrUr | | AATAGC | | AGAGC | | |
| | G | | GTTA | | | | | | GAAAAAGTGGC | | ArArArArUrArArGr | | AAGTTA | | TAGAA | | |
| | | | AAAT | | | | | | ACCGAGTCGGTG | | GrCrUrArGrUrCrCr | | AAATAA | | ATAGC | | |
| | | | AAG | | | | | | CACTTCTCTTCA | | GrUrUrArUrCrArAr | | GGCTAGT | | AAGTT | | |
| | | | GCTA | | | | | | GGAGTCAGGTGC | | CrUrUrGrArArArAr | | CCGTTAT | | AAAAT | | |
| | | | GTCC | | | | | | A | | ArGrUrGrGrCrArCr | | CAACTTG | | AAGGC | | |
| | | | GTTA | | | | | | | | CrGrArGrUrCrGrGr | | AAAAAG | | TAGTC | | |
| | | | TCAA | | | | | | | | UrGrCrArCrUrUrCr | | TGGCACC | | CGTTA | | |
| | | | CTTG | | | | | | | | UrCrUrUrCrArGrGr | | GAGTCG | | TCAAC | | |
| | | | AAA | | | | | | | | ArGrUrCrArGrGrU* | | GTGCACT | | TTGAA | | |
| | | | AAGT | | | | | | | | mG*mC*mA | | TCTCTTC | | AAAGT | | |
| | | | GGC | | | | | | | | | | AGGAGT | | GGCAC | | |
| | | | ACCG | | | | | | | | | | CAGATG | | CGAGT | | |
| | | | AGTC | | | | | | | | | | CA | | CGGTG | | |
| | | | GGTG | | | | | | | | | | | | CACTT | | |
| | | | C | | | | | | | | | | | | CTCGT | | |
| | | | | | | | | | | | | | | | CAGGA | | |
| | | | | | | | | | | | | | | | GTCAG | | |
| | | | | | | | | | | | | | | | ATGCA | | |
| HBB | CAT | 19317 | GTTT | 19407 | GAGT | 19497 | ACTTC | 19587 | CATGGTGCACCT | 19677 | mC*mA*mU*rGrGr | 19767 | CATGGTG | 19857 | CATGG | 19947 | +++ |
| 5_RT | GG | | TAGA | | CAGG | | TCTTC | | GACTCCTGGTTT | | UrGrCrArCrCrUrGr | | CATCTGA | | TGCAT | | |
| 12_P | TGC | | GCTA | | TGC | | AG | | TAGAGCTAGAAA | | ArCrUrCrCrUrGrGr | | CTCCTGG | | CTGAC | | |
| BS11 | AC | | GAA | | | | | | TAGCAAGTTAAA | | UrUrUrUrArGrArGr | | TTTTAGA | | TCCTG | | |
| | CTG | | ATAG | | | | | | ATAAGGCTAGTC | | CrUrArGrArArArUr | | GCTAGA | | GTTTT | | |
| | ACT | | CAA | | | | | | CGTTATCAACTT | | ArGrCrArArGrUrUr | | AATAGC | | AGAGC | | |
| | CCT | | GTTA | | | | | | GAAAAAGTGGC | | ArArArArUrArArGr | | AAGTTA | | TAGAA | | |
| | G | | AAAT | | | | | | ACCGAGTCGGTG | | GrCrUrArGrUrCrCr | | AAATAA | | ATAGC | | |
| | | | AAG | | | | | | CACTTCTCTTCA | | GrUrUrArUrCrArAr | | GGCTAGT | | AAGTT | | |
| | | | GCTA | | | | | | GGAGTCAGGTGC | | CrUrUrGrArArArAr | | CCGTTAT | | AAAAT | | |
| | | | GTCC | | | | | | | | ArGrUrGrGrCrArCr | | CAACTTG | | AAGGC | | |
| | | | GTTA | | | | | | | | CrGrArGrUrCrGrGr | | AAAAAG | | TAGTC | | |
| | | | TCAA | | | | | | | | UrGrCrArCrUrUrCr | | TGGCACC | | CGTTA | | |
| | | | CTTG | | | | | | | | UrCrUrUrCrArGrGr | | GAGTCG | | TCAAC | | |
| | | | AAA | | | | | | | | ArGrUrCrArGrG*m | | GTGCACT | | TTGAA | | |
| | | | AAGT | | | | | | | | U*mG*mC | | TCTCTTC | | AAAGT | | |
| | | | GGC | | | | | | | | | | AGGAGT | | GGCAC | | |
| | | | ACCG | | | | | | | | | | CAGATG | | CGAGT | | |
| | | | AGTC | | | | | | | | | | C | | CGGTG | | |
| | | | GGTG | | | | | | | | | | | | CACTT | | |
| | | | C | | | | | | | | | | | | CTCGT | | |
| | | | | | | | | | | | | | | | CAGGA | | |
| | | | | | | | | | | | | | | | GTCAG | | |
| | | | | | | | | | | | | | | | ATGC | | |
| HBB | CAT | 19318 | GTTT | 19408 | GAGT | 19498 | ACTTC | 1958 | CATGGTGCACCT | 19678 | mC*mA*mU*rGrGr | 19768 | CATGGTG | 19858 | CATGG | 19948 | +++ |
| 5_RT | GG | | TAGA | | CAGG | | TCTTC | 8 | GACTCCTGGTTT | | UrGrCrArCrCrUrGr | | CATCTGA | | TGCAT | | |
| 12_P | TGC | | GCTA | | TG | | AG | | TAGAGCTAGAAA | | ArCrUrCrCrUrGrGr | | CTCCTGG | | CTGAC | | |
| BS10 | AC | | GAA | | | | | | TAGCAAGTTAAA | | UrUrUrUrArGrArGr | | TTTTAGA | | TCCTG | | |
| | CTG | | ATAG | | | | | | ATAAGGCTAGTC | | CrUrArGrArArArUr | | GCTAGA | | GTTTT | | |
| | ACT | | CAA | | | | | | CGTTATCAACTT | | ArGrCrArArGrUrUr | | AATAGC | | AGAGC | | |
| | CCT | | GTTA | | | | | | GAAAAAGTGGC | | ArArArArUrArArGr | | AAGTTA | | TAGAA | | |
| | G | | AAAT | | | | | | ACCGAGTCGGTG | | GrCrUrArGrUrCrCr | | AAATAA | | ATAGC | | |
| | | | AAG | | | | | | CACTTCTCTTCA | | GrUrUrArUrCrArAr | | GGCTAGT | | AAGTT | | |
| | | | GCTA | | | | | | GGAGTCAGGTG | | CrUrUrGrArArArAr | | CCGTTAT | | AAAAT | | |
| | | | GTCC | | | | | | | | ArGrUrGrGrCrArCr | | CAACTTG | | AAGGC | | |
| | | | GTTA | | | | | | | | CrGrArGrUrCrGrGr | | AAAAAG | | TAGTC | | |
| | | | TCAA | | | | | | | | UrGrCrArCrUrUrCr | | TGGCACC | | CGTTA | | |
| | | | CTTG | | | | | | | | UrCrUrUrCrArGrGr | | GAGTCG | | TCAAC | | |
| | | | AAA | | | | | | | | ArGrUrCrArG*mG* | | GTGCACT | | TTGAA | | |
| | | | AAGT | | | | | | | | mU*mG | | TCTCTTC | | AAAGT | | |
| | | | GGC | | | | | | | | | | AGGAGT | | GGCAC | | |
| | | | ACCG | | | | | | | | | | CAGATG | | CGAGT | | |
| | | | AGTC | | | | | | | | | | | | CGGTG | | |
| | | | GGTG | | | | | | | | | | | | CACTT | | |
| | | | C | | | | | | | | | | | | CTCGT | | |
| | | | | | | | | | | | | | | | CAGGA | | |
| | | | | | | | | | | | | | | | GTCAG | | |
| | | | | | | | | | | | | | | | ATG | | |
| HBB | CAT | 19319 | GTTT | 19409 | GAGT | | ACTTC | 19589 | CATGGTGCACCT | 1967 | mC*mA*mU*rGrGr | 19769 | CATGGTG | 19859 | CATGG | 19949 | +++ |
| 5_RT | GG | | TAGA | | CAGG | | TCTTC | | GACTCCTGGTTT | | UrGrCrArCrCrUrGr | | CATCTGA | | TGCAT | | |
| 12_P | TGC | | GCTA | | T | | AG | | TAGAGCTAGAAA | | ArCrUrCrCrUrGrGr | | CTCCTGG | | CTGAC | | |
| BS9 | AC | | GAA | | | | | | TAGCAAGTTAAA | | UrUrUrUrArGrArGr | | TTTTAGA | | TCCTG | | |
| | CTG | | ATAG | | | | | | ATAAGGCTAGTC | | CrUrArGrArArArUr | | GCTAGA | | GTTTT | | |
| | ACT | | CAA | | | | | | CGTTATCAACTT | | ArGrCrArArGrUrUr | | AATAGC | | AGAGC | | |
| | CCT | | GTTA | | | | | | GAAAAAGTGGC | | ArArArArUrArArGr | | AAGTTA | | TAGAA | | |
| | G | | AAAT | | | | | | ACCGAGTCGGTG | | GrCrUrArGrUrCrCr | | AAATAA | | ATAGC | | |
| | | | AAG | | | | | | CACTTCTCTTCA | | GrUrUrArUrCrArAr | | GGCTAGT | | AAGTT | | |
| | | | GCTA | | | | | | GGAGTCAGGT | | CrUrUrGrArArArAr | | CCGTTAT | | AAAAT | | |
| | | | GTCC | | | | | | | | ArGrUrGrGrCrArCr | | CAACTTG | | AAGGC | | |
| | | | GTTA | | | | | | | | CrGrArGrUrCrGrGr | | AAAAAG | | TAGTC | | |
| | | | TCAA | | | | | | | | UrGrCrArCrUrUrCr | | TGGCACC | | CGTTA | | |
| | | | CTTG | | | | | | | | UrCrUrUrCrArGrGr | | GAGTCG | | TCAAC | | |
| | | | AAA | | | | | | | | ArGrUrCrA*mG*mG | | GTGCACT | | TTGAA | | |
| | | | AAGT | | | | | | | | *mU | | TCTCTTC | | AAAGT | | |
| | | | GGC | | | | | | | | | | AGGAGT | | GGCAC | | |
| | | | ACCG | | | | | | | | | | CAGAT | | CGAGT | | |
| | | | AGTC | | | | | | | | | | | | CGGTG | | |
| | | | GGTG | | | | | | | | | | | | CACTT | | |
| | | | C | | | | | | | | | | | | CTCGT | | |
| | | | | | | | | | | | | | | | CAGGA | | |
| | | | | | | | | | | | | | | | GTCAG | | |
| | | | | | | | | | | | | | | | AT | | |
| HBB | CAT | 19320 | GTTT | 19410 | GAGT | | ACTTC | 19590 | CATGGTGCACCT | 19680 | mC*mA*mU*rGrGr | 19770 | CATGGTG | 19860 | CATGG | 19950 | +++ |
| 5_RT | GG | | TAGA | | CAGG | | TCTTC | | GACTCCTGGTTT | | UrGrCrArCrCrUrGr | | CATCTGA | | TGCAT | | |
| 12_P | TGC | | GCTA | | | | AG | | TAGAGCTAGAAA | | ArCrUrCrCrUrGrGr | | CTCCTGG | | CTGAC | | |
| BS8 | AC | | GAA | | | | | | TAGCAAGTTAAA | | UrUrUrUrArGrArGr | | TTTTAGA | | TCCTG | | |
| | CTG | | ATAG | | | | | | ATAAGGCTAGTC | | CrUrArGrArArArUr | | GCTAGA | | GTTTT | | |
| | ACT | | CAA | | | | | | CGTTATCAACTT | | ArGrCrArArGrUrUr | | AATAGC | | AGAGC | | |
| | CCT | | GTTA | | | | | | GAAAAAGTGGC | | ArArArArUrArArGr | | AAGTTA | | TAGAA | | |
| | G | | AAAT | | | | | | ACCGAGTCGGTG | | GrCrUrArGrUrCrCr | | AAATAA | | ATAGC | | |
| | | | AAG | | | | | | CACTTCTCTTCA | | GrUrUrArUrCrArAr | | GGCTAGT | | AAGTT | | |
| | | | GCTA | | | | | | GGAGTCAGG | | CrUrUrGrArArArAr | | CCGTTAT | | AAAAT | | |
| | | | GTCC | | | | | | | | ArGrUrGrGrCrArCr | | CAACTTG | | AAGGC | | |
| | | | GTTA | | | | | | | | CrGrArGrUrCrGrGr | | AAAAAG | | TAGTC | | |
| | | | TCAA | | | | | | | | UrGrCrArCrUrUrCr | | TGGCACC | | CGTTA | | |
| | | | CTTG | | | | | | | | UrCrUrUrCrArGrGr | | GAGTCG | | TCAAC | | |
| | | | AAA | | | | | | | | ArGrUrC*mA*mG* | | GTGCACT | | TTGAA | | |
| | | | AAGT | | | | | | | | mG | | TCTCTTC | | AAAGT | | |
| | | | GGC | | | | | | | | | | AGGAGT | | GGCAC | | |
| | | | ACCG | | | | | | | | | | CAGA | | CGAGT | | |
| | | | AGTC | | | | | | | | | | | | CGGTG | | |
| | | | GGTG | | | | | | | | | | | | CACTT | | |
| | | | C | | | | | | | | | | | | CTCGT | | |
| | | | | | | | | | | | | | | | CAGGA | | |
| | | | | | | | | | | | | | | | GTCAG | | |
| | | | | | | | | | | | | | | | A | | |
| HBB | CAT | 19321 | GTTT | 19411 | GAGT | 19501 | TTCTC | 19591 | CATGGTGCACCT | 19681 | mC*mA*mU*rGrGr | 19771 | CATGGTG | 19861 | CATGG | 19951 | +++ |
| 5_RT | GG | | TAGA | | CAGG | | TTCAG | | GACTCCTGGTTT | | UrGrCrArCrCrUrGr | | CATCTGA | | TGCAT | | |
| 10_P | TGC | | GCTA | | TGCA | | | | TAGAGCTAGAAA | | ArCrUrCrCrUrGrGr | | CTCCTGG | | CTGAC | | |
| BS17 | AC | | GAA | | CCAT | | | | TAGCAAGTTAAA | | UrUrUrUrArGrArGr | | TTTTAGA | | TCCTG | | |
| | CTG | | ATAG | | G | | | | ATAAGGCTAGTC | | CrUrArGrArArArUr | | GCTAGA | | GTTTT | | |
| | ACT | | CAA | | | | | | CGTTATCAACTT | | ArGrCrArArGrUrUr | | AATAGC | | AGAGC | | |
| | CCT | | GTTA | | | | | | GAAAAAGTGGC | | ArArArArUrArArGr | | AAGTTA | | TAGAA | | |
| | G | | AAAT | | | | | | ACCGAGTCGGTG | | GrCrUrArGrUrCrCr | | AAATAA | | ATAGC | | |
| | | | AAG | | | | | | CTTCTCTTCAGG | | GrUrUrArUrCrArAr | | GGCTAGT | | AAGTT | | |
| | | | GCTA | | | | | | AGTCAGGTGCAC | | CrUrUrGrArArArAr | | CCGTTAT | | AAAAT | | |
| | | | GTCC | | | | | | CATG | | ArGrUrGrGrCrArCr | | CAACTTG | | AAGGC | | |
| | | | GTTA | | | | | | | | CrGrArGrUrCrGrGr | | AAAAAG | | TAGTC | | |
| | | | TCAA | | | | | | | | UrGrCrUrUrCrUrCr | | TGGCACC | | CGTTA | | |
| | | | CTTG | | | | | | | | UrUrCrArGrGrArGr | | GAGTCG | | TCAAC | | |
| | | | AAA | | | | | | | | UrCrArGrGrUrGrCr | | GTGCTTC | | TTGAA | | |
| | | | AAGT | | | | | | | | ArCrC*mA*mU*mG | | TCTTCAG | | AAAGT | | |
| | | | GGC | | | | | | | | | | GAGTCA | | GGCAC | | |
| | | | ACCG | | | | | | | | | | GATGCA | | CGAGT | | |
| | | | AGTC | | | | | | | | | | CCATG | | CGGTG | | |
| | | | GGTG | | | | | | | | | | | | CTTCTC | | |
| | | | C | | | | | | | | | | | | GTCAG | | |
| | | | | | | | | | | | | | | | GAGTC | | |
| | | | | | | | | | | | | | | | AGATG | | |
| | | | | | | | | | | | | | | | CACCA | | |
| | | | | | | | | | | | | | | | TG | | |
| HBB | CAT | 19322 | GTTT | 19412 | GAGT | 19502 | TTCTC | 19592 | CATGGTGCACCT | 19682 | mC*mA*mU*rGrGr | 19772 | CATGGTG | 19862 | CATGG | 19952 | +++ |
| 5_RT | GG | | TAGA | | CAGG | | TTCAG | | GACTCCTGGTTT | | UrGrCrArCrCrUrGr | | CATCTGA | | TGCAT | | |
| 10_P | TGC | | GCTA | | TGCA | | | | TAGAGCTAGAAA | | ArCrUrCrCrUrGrGr | | CTCCTGG | | CTGAC | | |
| BS16 | AC | | GAA | | CCAT | | | | TAGCAAGTTAAA | | UrUrUrUrArGrArGr | | TTTTAGA | | TCCTG | | |
| | CTG | | ATAG | | | | | | ATAAGGCTAGTC | | CrUrArGrArArArUr | | GCTAGA | | GTTTT | | |
| | ACT | | CAA | | | | | | CGTTATCAACTT | | ArGrCrArArGrUrUr | | AATAGC | | AGAGC | | |
| | CCT | | GTTA | | | | | | GAAAAAGTGGC | | ArArArArUrArArGr | | AAGTTA | | TAGAA | | |
| | G | | AAAT | | | | | | ACCGAGTCGGTG | | GrCrUrArGrUrCrCr | | AAATAA | | ATAGC | | |
| | | | AAG | | | | | | CTTCTCTTCAGG | | GrUrUrArUrCrArAr | | GGCTAGT | | AAGTT | | |
| | | | GCTA | | | | | | AGTCAGGTGCAC | | CrUrUrGrArArArAr | | CCGTTAT | | AAAAT | | |
| | | | GTCC | | | | | | CAT | | ArGrUrGrGrCrArCr | | CAACTTG | | AAGGC | | |
| | | | GTTA | | | | | | | | CrGrArGrUrCrGrGr | | AAAAAG | | TAGTC | | |
| | | | TCAA | | | | | | | | UrGrCrUrUrCrUrCr | | TGGCACC | | CGTTA | | |
| | | | CTTG | | | | | | | | UrUrCrArGrGrArGr | | GAGTCG | | TCAAC | | |
| | | | AAA | | | | | | | | UrCrArGrGrUrGrCr | | GTGCTTC | | TTGAA | | |
| | | | AAGT | | | | | | | | ArC*mC*mA*mU | | TCTTCAG | | AAAGT | | |
| | | | GGC | | | | | | | | | | GAGTCA | | GGCAC | | |
| | | | ACCG | | | | | | | | | | GATGCA | | CGAGT | | |
| | | | AGTC | | | | | | | | | | CCAT | | CGGTG | | |
| | | | GGTG | | | | | | | | | | | | CTTCTC | | |
| | | | C | | | | | | | | | | | | GTCAG | | |
| | | | | | | | | | | | | | | | GAGTC | | |
| | | | | | | | | | | | | | | | AGATG | | |
| | | | | | | | | | | | | | | | CACCA | | |
| | | | | | | | | | | | | | | | T | | |
| HBB | CAT | 19323 | GTTT | 19413 | GAGT | 19503 | TTCTC | 19593 | CATGGTGCACCT | 19683 | mC*mA*mU*rGrGr | 19773 | CATGGTG | 19863 | CATGG | 19953 | +++ |
| 5_RT | GG | | TAGA | | CAGG | | TTCAG | | GACTCCTGGTTT | | UrGrCrArCrCrUrGr | | CATCTGA | | TGCAT | | |
| 10_P | TGC | | GCTA | | TGCA | | | | TAGAGCTAGAAA | | ArCrUrCrCrUrGrGr | | CTCCTGG | | CTGAC | | |
| BS15 | AC | | GAA | | CCA | | | | TAGCAAGTTAAA | | UrUrUrUrArGrArGr | | TTTTAGA | | TCCTG | | |
| | CTG | | ATAG | | | | | | ATAAGGCTAGTC | | CrUrArGrArArArUr | | GCTAGA | | GTTTT | | |
| | ACT | | CAA | | | | | | CGTTATCAACTT | | ArGrCrArArGrUrUr | | AATAGC | | AGAGC | | |
| | CCT | | GTTA | | | | | | GAAAAAGTGGC | | ArArArArUrArArGr | | AAGTTA | | TAGAA | | |
| | G | | AAAT | | | | | | ACCGAGTCGGTG | | GrCrUrArGrUrCrCr | | AAATAA | | ATAGC | | |
| | CAT | | AAG | | | | | | CTTCTCTTCAGG | | GrUrUrArUrCrArAr | | GGCTAGT | | AAGTT | | |
| | GG | | GCTA | | | | | | AGTCAGGTGCAC | | CrUrUrGrArArArAr | | CCGTTAT | | AAAAT | | |
| | | | GTCC | | | | | | CA | | ArGrUrGrGrCrArCr | | CAACTTG | | AAGGC | | |
| | | | GTTA | | | | | | | | CrGrArGrUrCrGrGr | | AAAAAG | | TAGTC | | |
| | | | TCAA | | | | | | | | UrGrCrUrUrCrUrCr | | TGGCACC | | CGTTA | | |
| | | | CTTG | | | | | | | | UrUrCrArGrGrArGr | | GAGTCG | | TCAAC | | |
| | | | AAA | | | | | | | | UrCrArGrGrUrGrCr | | GTGCTTC | | TTGAA | | |
| | | | AAGT | | | | | | | | A*mC*mC*mA | | TCTTCAG | | AAAGT | | |
| | | | GGC | | | | | | | | | | GAGTCA | | GGCAC | | |
| | | | ACCG | | | | | | | | | | GATGCA | | CGAGT | | |
| | | | AGTC | | | | | | | | | | CCA | | CGGTG | | |
| | | | GGTG | | | | | | | | | | | | CTTCTC | | |
| | | | C | | | | | | | | | | | | GTCAG | | |
| | | | | | | | | | | | | | | | GAGTC | | |
| | | | | | | | | | | | | | | | AGATG | | |
| | | | | | | | | | | | | | | | CACCA | | |
| HBB | TGC | 19324 | GTTT | 19414 | GAGT | 19504 | TTCTC | 19594 | CATGGTGCACCT | 19684 | mC*mA*mU*rGrGr | 19774 | CATGGTG | 19864 | CATGG | 19954 | +++ |
| 5_RT | AC | | TAGA | | CAGG | | TTCAG | | GACTCCTGGTTT | | UrGrCrArCrCrUrGr | | CATCTGA | | TGCAT | | |
| 10_P | CTG | | GCTA | | TGCA | | | | TAGAGCTAGAAA | | ArCrUrCrCrUrGrGr | | CTCCTGG | | CTGAC | | |
| BS14 | ACT | | GAA | | CC | | | | TAGCAAGTTAAA | | UrUrUrUrArGrArGr | | TTTTAGA | | TCCTG | | |
| | CCT | | ATAG | | | | | | ATAAGGCTAGTC | | CrUrArGrArArArUr | | GCTAGA | | GTTTT | | |
| | G | | CAA | | | | | | CGTTATCAACTT | | ArGrCrArArGrUrUr | | AATAGC | | AGAGC | | |
| | | | GTTA | | | | | | GAAAAAGTGGC | | ArArArArUrArArGr | | AAGTTA | | TAGAA | | |
| | | | AAAT | | | | | | ACCGAGTCGGTG | | GrCrUrArGrUrCrCr | | AAATAA | | ATAGC | | |
| | | | AAG | | | | | | CTTCTCTTCAGG | | GrUrUrArUrCrArAr | | GGCTAGT | | AAGTT | | |
| | | | GCTA | | | | | | AGTCAGGTGCAC | | CrUrUrGrArArArAr | | CCGTTAT | | AAAAT | | |
| | | | GTCC | | | | | | C | | ArGrUrGrGrCrArCr | | CAACTTG | | AAGGC | | |
| | | | GTTA | | | | | | | | CrGrArGrUrCrGrGr | | AAAAAG | | TAGTC | | |
| | | | TCAA | | | | | | | | UrGrCrUrUrCrUrCr | | TGGCACC | | CGTTA | | |
| | | | CTTG | | | | | | | | UrUrCrArGrGrArGr | | GAGTCG | | TCAAC | | |
| | | | AAA | | | | | | | | UrCrArGrGrUrGrC* | | GTGCTTC | | TTGAA | | |
| | | | AAGT | | | | | | | | mA*mC*mC | | TCTTCAG | | AAAGT | | |
| | | | GGC | | | | | | | | | | GAGTCA | | GGCAC | | |
| | | | ACCG | | | | | | | | | | GATGCA | | CGAGT | | |
| | | | AGTC | | | | | | | | | | CC | | CGGTG | | |
| | | | GGTG | | | | | | | | | | | | CTTCTC | | |
| | | | C | | | | | | | | | | | | GTCAG | | |
| | | | | | | | | | | | | | | | GAGTC | | |
| | | | | | | | | | | | | | | | AGATG | | |
| | | | | | | | | | | | | | | | CACC | | |
| HBB | CAT | 19325 | GTTT | 19415 | GAGT | 19505 | TTCTC | 19595 | CATGGTGCACCT | 19685 | mC*mA*mU*rGrGr | 19775 | CATGGTG | 19865 | CATGG | 19955 | +++ |
| 5_RT | GG | | TAGA | | CAGG | | TTCAG | | GACTCCTGGTTT | | UrGrCrArCrCrUrGr | | CATCTGA | | TGCAT | | |
| 10_P | TGC | | GCTA | | TGCA | | | | TAGAGCTAGAAA | | ArCrUrCrCrUrGrGr | | CTCCTGG | | CTGAC | | |
| BS13 | AC | | GAA | | C | | | | TAGCAAGTTAAA | | UrUrUrUrArGrArGr | | TTTTAGA | | TCCTG | | |
| | CTG | | ATAG | | | | | | ATAAGGCTAGTC | | CrUrArGrArArArUr | | GCTAGA | | GTTTT | | |
| | ACT | | CAA | | | | | | CGTTATCAACTT | | ArGrCrArArGrUrUr | | AATAGC | | AGAGC | | |
| | CCT | | GTTA | | | | | | GAAAAAGTGGC | | ArArArArUrArArGr | | AAGTTA | | TAGAA | | |
| | G | | AAAT | | | | | | ACCGAGTCGGTG | | GrCrUrArGrUrCrCr | | AAATAA | | ATAGC | | |
| | | | AAG | | | | | | CTTCTCTTCAGG | | GrUrUrArUrCrArAr | | GGCTAGT | | AAGTT | | |
| | | | GCTA | | | | | | AGTCAGGTGCAC | | CrUrUrGrArArArAr | | CCGTTAT | | AAAAT | | |
| | | | GTCC | | | | | | | | ArGrUrGrGrCrArCr | | CAACTTG | | AAGGC | | |
| | | | GTTA | | | | | | | | CrGrArGrUrCrGrGr | | AAAAAG | | TAGTC | | |
| | | | TCAA | | | | | | | | UrGrCrUrUrCrUrCr | | TGGCACC | | CGTTA | | |
| | | | CTTG | | | | | | | | UrUrCrArGrGrArGr | | GAGTCG | | TCAAC | | |
| | | | AAA | | | | | | | | UrCrArGrGrUrG*mC | | GTGCTTC | | TTGAA | | |
| | | | AAGT | | | | | | | | *mA*mC | | TCTTCAG | | AAAGT | | |
| | | | GGC | | | | | | | | | | GAGTCA | | GGCAC | | |
| | | | ACCG | | | | | | | | | | GATGCA | | CGAGT | | |
| | | | AGTC | | | | | | | | | | C | | CGGTG | | |
| | | | GGTG | | | | | | | | | | | | CTTCTC | | |
| | | | C | | | | | | | | | | | | GTCAG | | |
| | | | | | | | | | | | | | | | GAGTC | | |
| | | | | | | | | | | | | | | | AGATG | | |
| | | | | | | | | | | | | | | | CAC | | |
| HBB | CAT | 19326 | GTTT | 19416 | GAGT | 19506 | TTCTC | 19596 | CATGGTGCACCT | 19686 | mC*mA*mU*rGrGr | 19776 | CATGGTG | 19866 | CATGG | 19956 | +++ |
| 5_RT | GG | | TAGA | | CAGG | | TTCAG | | GACTCCTGGTTT | | UrGrCrArCrCrUrGr | | CATCTGA | | TGCAT | | |
| | TGC | | GCTA | | TGCA | | | | TAGAGCTAGAAA | | ArCrUrCrCrUrGrGr | | CTCCTGG | | CTGAC | | |
| 10_P | AC | | GAA | | | | | | TAGCAAGTTAAA | | UrUrUrUrArGrArGr | | TTTTAGA | | TCCTG | | |
| BS12 | CTG | | ATAG | | | | | | ATAAGGCTAGTC | | CrUrArGrArArArUr | | GCTAGA | | GTTTT | | |
| | ACT | | CAA | | | | | | CGTTATCAACTT | | ArGrCrArArGrUrUr | | AATAGC | | AGAGC | | |
| | CCT | | GTTA | | | | | | GAAAAAGTGGC | | ArArArArUrArArGr | | AAGTTA | | TAGAA | | |
| | G | | AAAT | | | | | | ACCGAGTCGGTG | | GrCrUrArGrUrCrCr | | AAATAA | | ATAGC | | |
| | | | AAG | | | | | | CTTCTCTTCAGG | | GrUrUrArUrCrArAr | | GGCTAGT | | AAGTT | | |
| | | | GCTA | | | | | | AGTCAGGTGCA | | CrUrUrGrArArArAr | | CCGTTAT | | AAAAT | | |
| | | | GTCC | | | | | | | | ArGrUrGrGrCrArCr | | CAACTTG | | AAGGC | | |
| | | | GTTA | | | | | | | | CrGrArGrUrCrGrGr | | AAAAAG | | TAGTC | | |
| | | | TCAA | | | | | | | | UrGrCrUrUrCrUrCr | | TGGCACC | | CGTTA | | |
| | | | CTTG | | | | | | | | UrUrCrArGrGrArGr | | GAGTCG | | TCAAC | | |
| | | | AAA | | | | | | | | UrCrArGrGrU*mG* | | GTGCTTC | | TTGAA | | |
| | | | AAGT | | | | | | | | mC*mA | | TCTTCAG | | AAAGT | | |
| | | | GGC | | | | | | | | | | GAGTCA | | GGCAC | | |
| | | | ACCG | | | | | | | | | | GATGCA | | CGAGT | | |
| | | | AGTC | | | | | | | | | | | | CGGTG | | |
| | | | GGTG | | | | | | | | | | | | CTTCTC | | |
| | | | C | | | | | | | | | | | | GTCAG | | |
| | | | | | | | | | | | | | | | GAGTC | | |
| | | | | | | | | | | | | | | | AGATG | | |
| | | | | | | | | | | | | | | | CA | | |
| HBB | CAT | 19327 | GTTT | 19417 | GAGT | 19507 | TTCTC | 19597 | CATGGTGCACCT | 19687 | mC*mA*mU*rGrGr | 19777 | CATGGTG | 19867 | CATGG | 19957 | +++ |
| 5_RT | GG | | TAGA | | CAGG | | TTCAG | | GACTCCTGGTTT | | UrGrCrArCrCrUrGr | | CATCTGA | | TGCAT | | |
| 10_P | TGC | | GCTA | | TGC | | | | TAGAGCTAGAAA | | ArCrUrCrCrUrGrGr | | CTCCTGG | | CTGAC | | |
| BS11 | AC | | GAA | | | | | | TAGCAAGTTAAA | | UrUrUrUrArGrArGr | | TTTTAGA | | TCCTG | | |
| | CTG | | ATAG | | | | | | ATAAGGCTAGTC | | CrUrArGrArArArUr | | GCTAGA | | GTTTT | | |
| | ACT | | CAA | | | | | | CGTTATCAACTT | | ArGrCrArArGrUrUr | | AATAGC | | AGAGC | | |
| | CCT | | GTTA | | | | | | GAAAAAGTGGC | | ArArArArUrArArGr | | AAGTTA | | TAGAA | | |
| | G | | AAAT | | | | | | ACCGAGTCGGTG | | GrCrUrArGrUrCrCr | | AAATAA | | ATAGC | | |
| | | | AAG | | | | | | CTTCTCTTCAGG | | GrUrUrArUrCrArAr | | GGCTAGT | | AAGTT | | |
| | | | GCTA | | | | | | AGTCAGGTGC | | CrUrUrGrArArArAr | | CCGTTAT | | AAAAT | | |
| | | | GTCC | | | | | | | | ArGrUrGrGrCrArCr | | CAACTTG | | AAGGC | | |
| | | | GTTA | | | | | | | | CrGrArGrUrCrGrGr | | AAAAAG | | TAGTC | | |
| | | | TCAA | | | | | | | | UrGrCrUrUrCrUrCr | | TGGCACC | | CGTTA | | |
| | | | CTTG | | | | | | | | UrUrCrArGrGrArGr | | GAGTCG | | TCAAC | | |
| | | | AAA | | | | | | | | UrCrArGrG*mU*mG | | GTGCTTC | | TTGAA | | |
| | | | AAGT | | | | | | | | *mC | | TCTTCAG | | AAAGT | | |
| | | | GGC | | | | | | | | | | GAGTCA | | GGCAC | | |
| | | | ACCG | | | | | | | | | | GATGC | | CGAGT | | |
| | | | AGTC | | | | | | | | | | | | CGGTG | | |
| | | | GGTG | | | | | | | | | | | | CTTCTC | | |
| | | | C | | | | | | | | | | | | GTCAG | | |
| | | | | | | | | | | | | | | | GAGTC | | |
| | | | | | | | | | | | | | | | AGATG | | |
| | | | | | | | | | | | | | | | C | | |
| HBB | CAT | 19328 | GTTT | 19418 | GAGT | 19508 | TTCTC | 19598 | CATGGTGCACCT | 19688 | mC*mA*mU*rGrGr | 19778 | CATGGTG | 19868 | CATGG | 19958 | +++ |
| 5_RT | GG | | TAGA | | CAGG | | TTCAG | | GACTCCTGGTTT | | UrGrCrArCrCrUrGr | | CATCTGA | | TGCAT | | |
| 10_P | TGC | | GCTA | | TG | | | | TAGAGCTAGAAA | | ArCrUrCrCrUrGrGr | | CTCCTGG | | CTGAC | | |
| BS10 | AC | | GAA | | | | | | TAGCAAGTTAAA | | UrUrUrUrArGrArGr | | TTTTAGA | | TCCTG | | |
| | CTG | | ATAG | | | | | | ATAAGGCTAGTC | | CrUrArGrArArArUr | | GCTAGA | | GTTTT | | |
| | ACT | | CAA | | | | | | CGTTATCAACTT | | ArGrCrArArGrUrUr | | AATAGC | | AGAGC | | |
| | CCT | | GTTA | | | | | | GAAAAAGTGGC | | ArArArArUrArArGr | | AAGTTA | | TAGAA | | |
| | G | | AAAT | | | | | | ACCGAGTCGGTG | | GrCrUrArGrUrCrCr | | AAATAA | | ATAGC | | |
| | | | AAG | | | | | | CTTCTCTTCAGG | | GrUrUrArUrCrArAr | | GGCTAGT | | AAGTT | | |
| | | | GCTA | | | | | | AGTCAGGTG | | CrUrUrGrArArArAr | | CCGTTAT | | AAAAT | | |
| | | | GTCC | | | | | | | | ArGrUrGrGrCrArCr | | CAACTTG | | AAGGC | | |
| | | | GTTA | | | | | | | | CrGrArGrUrCrGrGr | | AAAAAG | | TAGTC | | |
| | | | TCAA | | | | | | | | UrGrCrUrUrCrUrCr | | TGGCACC | | CGTTA | | |
| | | | CTTG | | | | | | | | UrUrCrArGrGrArGr | | GAGTCG | | TCAAC | | |
| | | | AAA | | | | | | | | UrCrArG*mG*mU* | | GTGCTTC | | TTGAA | | |
| | | | AAGT | | | | | | | | mG | | TCTTCAG | | AAAGT | | |
| | | | GGC | | | | | | | | | | GAGTCA | | GGCAC | | |
| | | | ACCG | | | | | | | | | | GATG | | CGAGT | | |
| | | | AGTC | | | | | | | | | | | | CGGTG | | |
| | | | GGTG | | | | | | | | | | | | CTTCTC | | |
| | | | C | | | | | | | | | | | | GTCAG | | |
| | | | | | | | | | | | | | | | GAGTC | | |
| | | | | | | | | | | | | | | | AGATG | | |
| HBB | CAT | 19329 | GTTT | 19419 | GAGT | | TTCTC | 19599 | CATGGTGCACCT | 19689 | mC*mA*mU*rGrGr | 19779 | CATGGTG | 19869 | CATGG | 19959 | +++ |
| 5_RT | GG | | TAGA | | CAGG | | TTCAG | | GACTCCTGGTTT | | UrGrCrArCrCrUrGr | | CATCTGA | | TGCAT | | |
| 10_P | TGC | | GCTA | | T | | | | TAGAGCTAGAAA | | ArCrUrCrCrUrGrGr | | CTCCTGG | | CTGAC | | |
| BS9 | AC | | GAA | | | | | | TAGCAAGTTAAA | | UrUrUrUrArGrArGr | | TTTTAGA | | TCCTG | | |
| | CTG | | ATAG | | | | | | ATAAGGCTAGTC | | CrUrArGrArArArUr | | GCTAGA | | GTTTT | | |
| | ACT | | CAA | | | | | | CGTTATCAACTT | | ArGrCrArArGrUrUr | | AATAGC | | AGAGC | | |
| | CCT | | GTTA | | | | | | GAAAAAGTGGC | | ArArArArUrArArGr | | AAGTTA | | TAGAA | | |
| | G | | AAAT | | | | | | ACCGAGTCGGTG | | GrCrUrArGrUrCrCr | | AAATAA | | ATAGC | | |
| | | | AAG | | | | | | CTTCTCTTCAGG | | GrUrUrArUrCrArAr | | GGCTAGT | | AAGTT | | |
| | | | GCTA | | | | | | AGTCAGGT | | CrUrUrGrArArArAr | | CCGTTAT | | AAAAT | | |
| | | | GTCC | | | | | | | | ArGrUrGrGrCrArCr | | CAACTTG | | AAGGC | | |
| | | | GTTA | | | | | | | | CrGrArGrUrCrGrGr | | AAAAAG | | TAGTC | | |
| | | | TCAA | | | | | | | | UrGrCrUrUrCrUrCr | | TGGCACC | | CGTTA | | |
| | | | CTTG | | | | | | | | UrUrCrArGrGrArGr | | GAGTCG | | TCAAC | | |
| | | | AAA | | | | | | | | UrCrA*mG*mG*mU | | GTGCTTC | | TTGAA | | |
| | | | AAGT | | | | | | | | | | TCTTCAG | | AAAGT | | |
| | | | GGC | | | | | | | | | | GAGTCA | | GGCAC | | |
| | | | ACCG | | | | | | | | | | GAT | | CGAGT | | |
| | | | AGTC | | | | | | | | | | | | CGGTG | | |
| | | | GGTG | | | | | | | | | | | | CTTCTC | | |
| | | | C | | | | | | | | | | | | GTCAG | | |
| | | | | | | | | | | | | | | | GAGTC | | |
| | | | | | | | | | | | | | | | AGAT | | |
| HBB | CAT | 19330 | GTTT | 19420 | GAGT | | TTCTC | 19600 | CATGGTGCACCT | 19690 | mC*mA*mU*rGrGr | 19780 | CATGGTG | 19870 | CATGG | 19960 | +++ |
| 5_RT | GG | | TAGA | | CAGG | | TTCAG | | GACTCCTGGTTT | | UrGrCrArCrCrUrGr | | CATCTGA | | TGCAT | | |
| 10_P | TGC | | GCTA | | | | | | TAGAGCTAGAAA | | ArCrUrCrCrUrGrGr | | CTCCTGG | | CTGAC | | |
| BS8 | AC | | GAA | | | | | | TAGCAAGTTAAA | | UrUrUrUrArGrArGr | | TTTTAGA | | TCCTG | | |
| | CTG | | ATAG | | | | | | ATAAGGCTAGTC | | CrUrArGrArArArUr | | GCTAGA | | GTTTT | | |
| | ACT | | CAA | | | | | | CGTTATCAACTT | | ArGrCrArArGrUrUr | | AATAGC | | AGAGC | | |
| | CCT | | GTTA | | | | | | GAAAAAGTGGC | | ArArArArUrArArGr | | AAGTTA | | TAGAA | | |
| | G | | AAAT | | | | | | ACCGAGTCGGTG | | GrCrUrArGrUrCrCr | | AAATAA | | ATAGC | | |
| | | | AAG | | | | | | CTTCTCTTCAGG | | GrUrUrArUrCrArAr | | GGCTAGT | | AAGTT | | |
| | | | GCTA | | | | | | AGTCAGG | | CrUrUrGrArArArAr | | CCGTTAT | | AAAAT | | |
| | | | GTCC | | | | | | | | ArGrUrGrGrCrArCr | | CAACTTG | | AAGGC | | |
| | | | GTTA | | | | | | | | CrGrArGrUrCrGrGr | | AAAAAG | | TAGTC | | |
| | | | TCAA | | | | | | | | UrGrCrUrUrCrUrCr | | TGGCACC | | CGTTA | | |
| | | | CTTG | | | | | | | | UrUrCrArGrGrArGr | | GAGTCG | | TCAAC | | |
| | | | AAA | | | | | | | | UrC*mA*mG*mG | | GTGCTTC | | TTGAA | | |
| | | | AAGT | | | | | | | | | | TCTTCAG | | AAAGT | | |
| | | | GGC | | | | | | | | | | GAGTCA | | GGCAC | | |
| | | | ACCG | | | | | | | | | | GA | | CGAGT | | |
| | | | AGTC | | | | | | | | | | | | CGGTG | | |
| | | | GGTG | | | | | | | | | | | | CTTCTC | | |
| | | | C | | | | | | | | | | | | GTCAG | | |
| | | | | | | | | | | | | | | | GAGTC | | |
| | | | | | | | | | | | | | | | AGA | | |
| HBB | CAT | 19331 | GTTT | 19421 | GAGT | 19511 | TCTC | | CATGGTGCACCT | 19691 | mC*mA*mU*rGrGr | 19781 | CATGGTG | 19871 | CATGG | 19961 | + |
| 5_RT | GG | | TAGA | | CAGG | | TTCAG | | GACTCCTGGTTT | | UrGrCrArCrCrUrGr | | CATCTGA | | TGCAT | | |
| 9_PB | TGC | | GCTA | | TGCA | | | | TAGAGCTAGAAA | | ArCrUrCrCrUrGrGr | | CTCCTGG | | CTGAC | | |
| S17 | AC | | GAA | | CCAT | | | | TAGCAAGTTAAA | | UrUrUrUrArGrArGr | | TTTTAGA | | TCCTG | | |
| | CTG | | ATAG | | G | | | | ATAAGGCTAGTC | | CrUrArGrArArArUr | | GCTAGA | | GTTTT | | |
| | ACT | | CAA | | | | | | CGTTATCAACTT | | ArGrCrArArGrUrUr | | AATAGC | | AGAGC | | |
| | | | GTTA | | | | | | GAAAAAGTGGC | | ArArArArUrArArGr | | AAGTTA | | TAGAA | | |
| | CCT | | AAAT | | | | | | ACCGAGTCGGTG | | GrCrUrArGrUrCrCr | | AAATAA | | ATAGC | | |
| | G | | AAG | | | | | | CTCTCTTCAGGA | | GrUrUrArUrCrArAr | | GGCTAGT | | AAGTT | | |
| | | | GCTA | | | | | | GTCAGGTGCACC | | CrUrUrGrArArArAr | | CCGTTAT | | AAAAT | | |
| | | | GTCC | | | | | | ATG | | ArGrUrGrGrCrArCr | | CAACTTG | | AAGGC | | |
| | | | GTTA | | | | | | | | CrGrArGrUrCrGrGr | | AAAAAG | | TAGTC | | |
| | | | TCAA | | | | | | | | UrGrCrUrCrUrCrUr | | TGGCACC | | CGTTA | | |
| | | | CTTG | | | | | | | | UrCrArGrGrArGrUr | | GAGTCG | | TCAAC | | |
| | | | AAA | | | | | | | | CrArGrGrUrGrCrAr | | GTGCTCT | | TTGAA | | |
| | | | AAGT | | | | | | | | CrC*mA*mU*mG | | CTTCAGG | | AAAGT | | |
| | | | GGC | | | | | | | | | | AGTCAG | | GGCAC | | |
| | | | ACCG | | | | | | | | | | ATGCACC | | CGAGT | | |
| | | | AGTC | | | | | | | | | | ATG | | CGGTG | | |
| | | | GGTG | | | | | | | | | | | | CTCTC | | |
| | | | C | | | | | | | | | | | | GTCAG | | |
| | | | | | | | | | | | | | | | GAGTC | | |
| | | | | | | | | | | | | | | | AGATG | | |
| | | | | | | | | | | | | | | | CACCA | | |
| | | | | | | | | | | | | | | | TG | | |
| HBB | CAT | 19332 | GTTT | 19422 | GAGT | 19512 | TCTC | | CATGGTGCACCT | 19692 | mC*mA*mU*rGrGr | 19782 | CATGGTG | 19872 | CATGG | 19962 | ++ |
| 5_RT | GG | | TAGA | | CAGG | | TTCAG | | GACTCCTGGTTT | | UrGrCrArCrCrUrGr | | CATCTGA | | TGCAT | | |
| 9_PB | TGC | | GCTA | | TGCA | | | | TAGAGCTAGAAA | | ArCrUrCrCrUrGrGr | | CTCCTGG | | CTGAC | | |
| S16 | AC | | GAA | | CCAT | | | | TAGCAAGTTAAA | | UrUrUrUrArGrArGr | | TTTTAGA | | TCCTG | | |
| | CTG | | ATAG | | | | | | ATAAGGCTAGTC | | CrUrArGrArArArUr | | GCTAGA | | GTTTT | | |
| | ACT | | CAA | | | | | | CGTTATCAACTT | | ArGrCrArArGrUrUr | | AATAGC | | AGAGC | | |
| | CCT | | GTTA | | | | | | GAAAAAGTGGC | | ArArArArUrArArGr | | AAGTTA | | TAGAA | | |
| | G | | AAAT | | | | | | ACCGAGTCGGTG | | GrCrUrArGrUrCrCr | | AAATAA | | ATAGC | | |
| | | | AAG | | | | | | CTCTCTTCAGGA | | GrUrUrArUrCrArAr | | GGCTAGT | | AAGTT | | |
| | | | GCTA | | | | | | GTCAGGTGCACC | | CrUrUrGrArArArAr | | CCGTTAT | | AAAAT | | |
| | | | GTCC | | | | | | AT | | ArGrUrGrGrCrArCr | | CAACTTG | | AAGGC | | |
| | | | GTTA | | | | | | | | CrGrArGrUrCrGrGr | | AAAAAG | | TAGTC | | |
| | | | TCAA | | | | | | | | UrGrCrUrCrUrCrUr | | TGGCACC | | CGTTA | | |
| | | | CTTG | | | | | | | | UrCrArGrGrArGrUr | | GAGTCG | | TCAAC | | |
| | | | AAA | | | | | | | | CrArGrGrUrGrCrAr | | GTGCTCT | | TTGAA | | |
| | | | AAGT | | | | | | | | C*mC*mA*mU | | CTTCAGG | | AAAGT | | |
| | | | GGC | | | | | | | | | | AGTCAG | | GGCAC | | |
| | | | ACCG | | | | | | | | | | ATGCACC | | CGAGT | | |
| | | | AGTC | | | | | | | | | | AT | | CGGTG | | |
| | | | GGTG | | | | | | | | | | | | CTCTC | | |
| | | | C | | | | | | | | | | | | GTCAG | | |
| | | | | | | | | | | | | | | | GAGTC | | |
| | | | | | | | | | | | | | | | AGATG | | |
| | | | | | | | | | | | | | | | CACCA | | |
| | | | | | | | | | | | | | | | T | | |
| HBB | CAT | 19333 | GTTT | 19423 | GAGT | 19513 | TCTC | | CATGGTGCACCT | 19693 | mC*mA*mU*rGrGr | 19783 | CATGGTG | 19873 | CATGG | 19963 | ++ |
| 5_RT | GG | | TAGA | | CAGG | | TTCAG | | GACTCCTGGTTT | | UrGrCrArCrCrUrGr | | CATCTGA | | TGCAT | | |
| 9_PB | TGC | | GCTA | | TGCA | | | | TAGAGCTAGAAA | | ArCrUrCrCrUrGrGr | | CTCCTGG | | CTGAC | | |
| S15 | AC | | GAA | | CCA | | | | TAGCAAGTTAAA | | UrUrUrUrArGrArGr | | TTTTAGA | | TCCTG | | |
| | CTG | | ATAG | | | | | | ATAAGGCTAGTC | | CrUrArGrArArArUr | | GCTAGA | | GTTTT | | |
| | ACT | | CAA | | | | | | CGTTATCAACTT | | ArGrCrArArGrUrUr | | AATAGC | | AGAGC | | |
| | CCT | | GTTA | | | | | | GAAAAAGTGGC | | ArArArArUrArArGr | | AAGTTA | | TAGAA | | |
| | G | | AAAT | | | | | | ACCGAGTCGGTG | | GrCrUrArGrUrCrCr | | AAATAA | | ATAGC | | |
| | | | AAG | | | | | | CTCTCTTCAGGA | | GrUrUrArUrCrArAr | | GGCTAGT | | AAGTT | | |
| | | | GCTA | | | | | | GTCAGGTGCACC | | CrUrUrGrArArArAr | | CCGTTAT | | AAAAT | | |
| | | | GTCC | | | | | | A | | ArGrUrGrGrCrArCr | | CAACTTG | | AAGGC | | |
| | | | GTTA | | | | | | | | CrGrArGrUrCrGrGr | | AAAAAG | | TAGTC | | |
| | | | TCAA | | | | | | | | UrGrCrUrCrUrCrUr | | TGGCACC | | CGTTA | | |
| | | | CTTG | | | | | | | | UrCrArGrGrArGrUr | | GAGTCG | | TCAAC | | |
| | | | AAA | | | | | | | | CrArGrGrUrGrCrA* | | GTGCTCT | | TTGAA | | |
| | | | AAGT | | | | | | | | mC*mC*mA | | CTTCAGG | | AAAGT | | |
| | | | GGC | | | | | | | | | | AGTCAG | | GGCAC | | |
| | | | ACCG | | | | | | | | | | ATGCACC | | CGAGT | | |
| | | | AGTC | | | | | | | | | | A | | CGGTG | | |
| | | | GGTG | | | | | | | | | | | | CTCTC | | |
| | | | C | | | | | | | | | | | | GTCAG | | |
| | | | | | | | | | | | | | | | GAGTC | | |
| | | | | | | | | | | | | | | | AGATG | | |
| | | | | | | | | | | | | | | | CACCA | | |
| HBB | CAT | 19334 | GTTT | 19424 | GAGT | 19514 | TCTC | | CATGGTGCACCT | 19594 | mC*mA*mU*rGrGr | 19784 | CATGGTG | 19874 | CATGG | 19964 | ++ |
| 5_RT | GG | | TAGA | | CAGG | | TTCAG | | GACTCCTGGTTT | | UrGrCrArCrCrUrGr | | CATCTGA | | TGCAT | | |
| 9_PB | TGC | | GCTA | | TGCA | | | | TAGAGCTAGAAA | | ArCrUrCrCrUrGrGr | | CTCCTGG | | CTGAC | | |
| S14 | AC | | GAA | | CC | | | | TAGCAAGTTAAA | | UrUrUrUrArGrArGr | | TTTTAGA | | TCCTG | | |
| | CTG | | ATAG | | | | | | ATAAGGCTAGTC | | CrUrArGrArArArUr | | GCTAGA | | GTTTT | | |
| | ACT | | CAA | | | | | | CGTTATCAACTT | | ArGrCrArArGrUrUr | | AATAGC | | AGAGC | | |
| | CCT | | GTTA | | | | | | GAAAAAGTGGC | | ArArArArUrArArGr | | AAGTTA | | TAGAA | | |
| | G | | AAAT | | | | | | ACCGAGTCGGTG | | GrCrUrArGrUrCrCr | | AAATAA | | ATAGC | | |
| | | | AAG | | | | | | CTCTCTTCAGGA | | GrUrUrArUrCrArAr | | GGCTAGT | | AAGTT | | |
| | | | GCTA | | | | | | GTCAGGTGCACC | | CrUrUrGrArArArAr | | CCGTTAT | | AAAAT | | |
| | | | GTCC | | | | | | | | ArGrUrGrGrCrArCr | | CAACTTG | | AAGGC | | |
| | | | GTTA | | | | | | | | CrGrArGrUrCrGrGr | | AAAAAG | | TAGTC | | |
| | | | TCAA | | | | | | | | UrGrCrUrCrUrCrUr | | TGGCACC | | CGTTA | | |
| | | | CTTG | | | | | | | | UrCrArGrGrArGrUr | | GAGTCG | | TCAAC | | |
| | | | AAA | | | | | | | | CrArGrGrUrGrC*mA | | GTGCTCT | | TTGAA | | |
| | | | AAGT | | | | | | | | *mC*mC | | CTTCAGG | | AAAGT | | |
| | | | GGC | | | | | | | | | | AGTCAG | | GGCAC | | |
| | | | ACCG | | | | | | | | | | ATGCACC | | CGAGT | | |
| | | | AGTC | | | | | | | | | | | | CGGTG | | |
| | | | GGTG | | | | | | | | | | | | CTCTC | | |
| | | | C | | | | | | | | | | | | GTCAG | | |
| | | | | | | | | | | | | | | | GAGTC | | |
| | | | | | | | | | | | | | | | AGATG | | |
| | | | | | | | | | | | | | | | CACC | | |
| HBB | CAT | 19335 | GTTT | 19425 | GAGT | 19515 | TCTC | | CATGGTGCACCT | 19695 | mC*mA*mU*rGrGr | 19785 | CATGGTG | 19875 | CATGG | 19965 | ++ |
| 5_RT | GG | | TAGA | | CAGG | | TTCAG | | GACTCCTGGTTT | | UrGrCrArCrCrUrGr | | CATCTGA | | TGCAT | | |
| 9_PB | TGC | | GCTA | | TGCA | | | | TAGAGCTAGAAA | | ArCrUrCrCrUrGrGr | | CTCCTGG | | CTGAC | | |
| S13 | AC | | GAA | | C | | | | TAGCAAGTTAAA | | UrUrUrUrArGrArGr | | TTTTAGA | | TCCTG | | |
| | CTG | | ATAG | | | | | | ATAAGGCTAGTC | | CrUrArGrArArArUr | | GCTAGA | | GTTTT | | |
| | ACT | | CAA | | | | | | CGTTATCAACTT | | ArGrCrArArGrUrUr | | AATAGC | | AGAGC | | |
| | CCT | | GTTA | | | | | | GAAAAAGTGGC | | ArArArArUrArArGr | | AAGTTA | | TAGAA | | |
| | G | | AAAT | | | | | | ACCGAGTCGGTG | | GrCrUrArGrUrCrCr | | AAATAA | | ATAGC | | |
| | | | AAG | | | | | | CTCTCTTCAGGA | | GrUrUrArUrCrArAr | | GGCTAGT | | AAGTT | | |
| | | | GCTA | | | | | | GTCAGGTGCAC | | CrUrUrGrArArArAr | | CCGTTAT | | AAAAT | | |
| | | | GTCC | | | | | | | | ArGrUrGrGrCrArCr | | CAACTTG | | AAGGC | | |
| | | | GTTA | | | | | | | | CrGrArGrUrCrGrGr | | AAAAAG | | TAGTC | | |
| | | | TCAA | | | | | | | | UrGrCrUrCrUrCrUr | | TGGCACC | | CGTTA | | |
| | | | CTTG | | | | | | | | UrCrArGrGrArGrUr | | GAGTCG | | TCAAC | | |
| | | | AAA | | | | | | | | CrArGrGrUrG*mC* | | GTGCTCT | | TTGAA | | |
| | | | AAGT | | | | | | | | mA*mC | | CTTCAGG | | AAAGT | | |
| | | | GGC | | | | | | | | | | AGTCAG | | GGCAC | | |
| | | | ACCG | | | | | | | | | | ATGCAC | | CGAGT | | |
| | | | AGTC | | | | | | | | | | | | CGGTG | | |
| | | | GGTG | | | | | | | | | | | | CTCTC | | |
| | | | C | | | | | | | | | | | | GTCAG | | |
| | | | | | | | | | | | | | | | GAGTC | | |
| | | | | | | | | | | | | | | | AGATG | | |
| | | | | | | | | | | | | | | | CAC | | |
| HBB | CAT | 19336 | GTTT | 19426 | GAGT | 19516 | TCTC | | CATGGTGCACCT | 19696 | mC*mA*mU*rGrGr | 19786 | CATGGTG | 19876 | CATGG | 19966 | +++ |
| 5_RT | GG | | TAGA | | CAGG | | TTCAG | | GACTCCTGGTTT | | UrGrCrArCrCrUrGr | | CATCTGA | | TGCAT | | |
| 9_PB | TGC | | GCTA | | TGCA | | | | TAGAGCTAGAAA | | ArCrUrCrCrUrGrGr | | CTCCTGG | | CTGAC | | |
| S12 | AC | | GAA | | | | | | TAGCAAGTTAAA | | UrUrUrUrArGrArGr | | TTTTAGA | | TCCTG | | |
| | CTG | | ATAG | | | | | | ATAAGGCTAGTC | | CrUrArGrArArArUr | | GCTAGA | | GTTTT | | |
| | ACT | | CAA | | | | | | CGTTATCAACTT | | ArGrCrArArGrUrUr | | AATAGC | | AGAGC | | |
| | CCT | | GTTA | | | | | | GAAAAAGTGGC | | ArArArArUrArArGr | | AAGTTA | | TAGAA | | |
| | G | | AAAT | | | | | | ACCGAGTCGGTG | | GrCrUrArGrUrCrCr | | AAATAA | | ATAGC | | |
| | | | AAG | | | | | | CTCTCTTCAGGA | | GrUrUrArUrCrArAr | | GGCTAGT | | AAGTT | | |
| | | | GCTA | | | | | | GTCAGGTGCA | | CrUrUrGrArArArAr | | CCGTTAT | | AAAAT | | |
| | | | GTCC | | | | | | | | ArGrUrGrGrCrArCr | | CAACTTG | | AAGGC | | |
| | | | GTTA | | | | | | | | CrGrArGrUrCrGrGr | | AAAAAG | | TAGTC | | |
| | | | TCAA | | | | | | | | UrGrCrUrCrUrCrUr | | TGGCACC | | CGTTA | | |
| | | | CTTG | | | | | | | | UrCrArGrGrArGrUr | | GAGTCG | | TCAAC | | |
| | | | AAA | | | | | | | | CrArGrGrU*mG*mC | | GTGCTCT | | TTGAA | | |
| | | | AAGT | | | | | | | | *mA | | CTTCAGG | | AAAGT | | |
| | | | GGC | | | | | | | | | | AGTCAG | | GGCAC | | |
| | | | ACCG | | | | | | | | | | ATGCA | | CGAGT | | |
| | | | AGTC | | | | | | | | | | | | CGGTG | | |
| | | | GGTG | | | | | | | | | | | | CTCTC | | |
| | | | C | | | | | | | | | | | | GTCAG | | |
| | | | | | | | | | | | | | | | GAGTC | | |
| | | | | | | | | | | | | | | | AGATG | | |
| | | | | | | | | | | | | | | | CA | | |
| HBB | CAT | 19337 | GTTT | 19427 | GAGT | 19517 | TCTC | | CATGGTGCACCT | 19697 | mC*mA*mU*rGrGr | 19787 | CATGGTG | 19877 | CATGG | 19967 | ++ |
| 5_RT | GG | | TAGA | | CAGG | | TTCAG | | GACTCCTGGTTT | | UrGrCrArCrCrUrGr | | CATCTGA | | TGCAT | | |
| 9_PB | TGC | | GCTA | | TGC | | | | TAGAGCTAGAAA | | ArCrUrCrCrUrGrGr | | CTCCTGG | | CTGAC | | |
| S11 | AC | | GAA | | | | | | TAGCAAGTTAAA | | UrUrUrUrArGrArGr | | TTTTAGA | | TCCTG | | |
| | CTG | | ATAG | | | | | | ATAAGGCTAGTC | | CrUrArGrArArArUr | | GCTAGA | | GTTTT | | |
| | ACT | | CAA | | | | | | CGTTATCAACTT | | ArGrCrArArGrUrUr | | AATAGC | | AGAGC | | |
| | CCT | | GTTA | | | | | | GAAAAAGTGGC | | ArArArArUrArArGr | | AAGTTA | | TAGAA | | |
| | G | | AAAT | | | | | | ACCGAGTCGGTG | | GrCrUrArGrUrCrCr | | AAATAA | | ATAGC | | |
| | | | AAG | | | | | | CTCTCTTCAGGA | | GrUrUrArUrCrArAr | | GGCTAGT | | AAGTT | | |
| | | | GCTA | | | | | | GTCAGGTGC | | CrUrUrGrArArArAr | | CCGTTAT | | AAAAT | | |
| | | | GTCC | | | | | | | | ArGrUrGrGrCrArCr | | CAACTTG | | AAGGC | | |
| | | | GTTA | | | | | | | | CrGrArGrUrCrGrGr | | AAAAAG | | TAGTC | | |
| | | | TCAA | | | | | | | | UrGrCrUrCrUrCrUr | | TGGCACC | | CGTTA | | |
| | | | CTTG | | | | | | | | UrCrArGrGrArGrUr | | GAGTCG | | TCAAC | | |
| | | | AAA | | | | | | | | CrArGrG*mU*mG* | | GTGCTCT | | TTGAA | | |
| | | | AAGT | | | | | | | | mC | | CTTCAGG | | AAAGT | | |
| | | | GGC | | | | | | | | | | AGTCAG | | GGCAC | | |
| | | | ACCG | | | | | | | | | | ATGC | | CGAGT | | |
| | | | AGTC | | | | | | | | | | | | CGGTG | | |
| | | | GGTG | | | | | | | | | | | | CTCTC | | |
| | | | C | | | | | | | | | | | | | | |
| | | | | | | | | | | | | | | | GTCAG | | |
| | | | | | | | | | | | | | | | GAGTC | | |
| | | | | | | | | | | | | | | | AGATG | | |
| | | | | | | | | | | | | | | | C | | |
| HBB | CAT | 19338 | GTTT | 19428 | GAGT | 19518 | TCTC | | CATGGTGCACCT | 19698 | mC*mA*mU*rGrGr | 19788 | CATGGTG | 19878 | CATGG | 19968 | +++ |
| 5_RT | GG | | TAGA | | CAGG | | TTCAG | | GACTCCTGGTTT | | UrGrCrArCrCrUrGr | | CATCTGA | | TGCAT | | |
| 9_PB | TGC | | GCTA | | TG | | | | TAGAGCTAGAAA | | ArCrUrCrCrUrGrGr | | CTCCTGG | | CTGAC | | |
| S10 | AC | | GAA | | | | | | TAGCAAGTTAAA | | UrUrUrUrArGrArGr | | TTTTAGA | | TCCTG | | |
| | CTG | | ATAG | | | | | | ATAAGGCTAGTC | | CrUrArGrArArArUr | | GCTAGA | | GTTTT | | |
| | ACT | | CAA | | | | | | CGTTATCAACTT | | ArGrCrArArGrUrUr | | AATAGC | | AGAGC | | |
| | CCT | | GTTA | | | | | | GAAAAAGTGGC | | ArArArArUrArArGr | | AAGTTA | | TAGAA | | |
| | G | | AAAT | | | | | | ACCGAGTCGGTG | | GrCrUrArGrUrCrCr | | AAATAA | | ATAGC | | |
| | | | AAG | | | | | | CTCTCTTCAGGA | | GrUrUrArUrCrArAr | | GGCTAGT | | AAGTT | | |
| | | | GCTA | | | | | | GTCAGGTG | | CrUrUrGrArArArAr | | CCGTTAT | | AAAAT | | |
| | | | GTCC | | | | | | | | ArGrUrGrGrCrArCr | | CAACTTG | | AAGGC | | |
| | | | GTTA | | | | | | | | CrGrArGrUrCrGrGr | | AAAAAG | | TAGTC | | |
| | | | TCAA | | | | | | | | UrGrCrUrCrUrCrUr | | TGGCACC | | CGTTA | | |
| | | | CTTG | | | | | | | | UrCrArGrGrArGrUr | | GAGTCG | | TCAAC | | |
| | | | AAA | | | | | | | | CrArG*mG*mU*mG | | GTGCTCT | | TTGAA | | |
| | | | AAGT | | | | | | | | | | CTTCAGG | | AAAGT | | |
| | | | GGC | | | | | | | | | | AGTCAG | | GGCAC | | |
| | | | ACCG | | | | | | | | | | ATG | | CGAGT | | |
| | | | AGTC | | | | | | | | | | | | CGGTG | | |
| | | | GGTG | | | | | | | | | | | | CTCTC | | |
| | | | C | | | | | | | | | | | | GTCAG | | |
| | | | | | | | | | | | | | | | GAGTC | | |
| | | | | | | | | | | | | | | | AGATG | | |
| HBB | CAT | 19339 | GTTT | 19429 | GAGT | | TCTC | | CATGGTGCACCT | 19699 | mC*mA*mU*rGrGr | 19789 | CATGGTG | 19879 | CATGG | 19969 | +++ |
| 5_RT | GG | | TAGA | | CAGG | | TTCAG | | GACTCCTGGTTT | | UrGrCrArCrCrUrGr | | CATCTGA | | TGCAT | | |
| 9_PB | TGC | | GCTA | | T | | | | TAGAGCTAGAAA | | ArCrUrCrCrUrGrGr | | CTCCTGG | | CTGAC | | |
| S9 | AC | | GAA | | | | | | TAGCAAGTTAAA | | UrUrUrUrArGrArGr | | TTTTAGA | | TCCTG | | |
| | CTG | | ATAG | | | | | | ATAAGGCTAGTC | | CrUrArGrArArArUr | | GCTAGA | | GTTTT | | |
| | ACT | | CAA | | | | | | CGTTATCAACTT | | ArGrCrArArGrUrUr | | AATAGC | | AGAGC | | |
| | CCT | | GTTA | | | | | | GAAAAAGTGGC | | ArArArArUrArArGr | | AAGTTA | | TAGAA | | |
| | G | | AAAT | | | | | | ACCGAGTCGGTG | | GrCrUrArGrUrCrCr | | AAATAA | | ATAGC | | |
| | | | AAG | | | | | | CTCTCTTCAGGA | | GrUrUrArUrCrArAr | | GGCTAGT | | AAGTT | | |
| | | | GCTA | | | | | | GTCAGGT | | CrUrUrGrArArArAr | | CCGTTAT | | AAAAT | | |
| | | | GTCC | | | | | | | | ArGrUrGrGrCrArCr | | CAACTTG | | AAGGC | | |
| | | | GTTA | | | | | | | | CrGrArGrUrCrGrGr | | AAAAAG | | TAGTC | | |
| | | | TCAA | | | | | | | | UrGrCrUrCrUrCrUr | | TGGCACC | | CGTTA | | |
| | | | CTTG | | | | | | | | UrCrArGrGrArGrUr | | GAGTCG | | TCAAC | | |
| | | | AAA | | | | | | | | CrA*mG*mG*mU | | GTGCTCT | | TTGAA | | |
| | | | AAGT | | | | | | | | | | CTTCAGG | | AAAGT | | |
| | | | GGC | | | | | | | | | | AGTCAG | | GGCAC | | |
| | | | ACCG | | | | | | | | | | AT | | CGAGT | | |
| | | | AGTC | | | | | | | | | | | | CGGTG | | |
| | | | GGTG | | | | | | | | | | | | CTCTC | | |
| | | | C | | | | | | | | | | | | GTCAG | | |
| | | | | | | | | | | | | | | | GAGTC | | |
| | | | | | | | | | | | | | | | AGAT | | |
| HBB | CAT | 19340 | GTTT | 19430 | GAGT | | TCTC | | CATGGTGCACCT | 19700 | mC*mA*mU*rGrGr | 19790 | CATGGTG | 19880 | CATGG | 19970 | +++ |
| 5_RT | GG | | TAGA | | CAGG | | TTCAG | | GACTCCTGGTTT | | UrGrCrArCrCrUrGr | | CATCTGA | | TGCAT | | |
| 9_PB | TGC | | GCTA | | | | | | TAGAGCTAGAAA | | ArCrUrCrCrUrGrGr | | CTCCTGG | | CTGAC | | |
| S8 | AC | | GAA | | | | | | TAGCAAGTTAAA | | UrUrUrUrArGrArGr | | TTTTAGA | | TCCTG | | |
| | CTG | | ATAG | | | | | | ATAAGGCTAGTC | | CrUrArGrArArArUr | | GCTAGA | | GTTTT | | |
| | ACT | | CAA | | | | | | CGTTATCAACTT | | ArGrCrArArGrUrUr | | AATAGC | | AGAGC | | |
| | CCT | | GTTA | | | | | | GAAAAAGTGGC | | ArArArArUrArArGr | | AAGTTA | | TAGAA | | |
| | G | | AAAT | | | | | | ACCGAGTCGGTG | | GrCrUrArGrUrCrCr | | AAATAA | | ATAGC | | |
| | | | AAG | | | | | | CTCTCTTCAGGA | | GrUrUrArUrCrArAr | | GGCTAGT | | AAGTT | | |
| | | | GCTA | | | | | | GTCAGG | | CrUrUrGrArArArAr | | CCGTTAT | | AAAAT | | |
| | | | GTCC | | | | | | | | ArGrUrGrGrCrArCr | | CAACTTG | | AAGGC | | |
| | | | GTTA | | | | | | | | CrGrArGrUrCrGrGr | | AAAAAG | | TAGTC | | |
| | | | TCAA | | | | | | | | UrGrCrUrCrUrCrUr | | TGGCACC | | CGTTA | | |
| | | | CTTG | | | | | | | | UrCrArGrGrArGrUr | | GAGTCG | | TCAAC | | |
| | | | AAA | | | | | | | | C*mA*mG*mG | | GTGCTCT | | TTGAA | | |
| | | | AAGT | | | | | | | | | | CTTCAGG | | AAAGT | | |
| | | | GGC | | | | | | | | | | AGTCAG | | GGCAC | | |
| | | | ACCG | | | | | | | | | | A | | CGAGT | | |
| | | | AGTC | | | | | | | | | | | | CGGTG | | |
| | | | GGTG | | | | | | | | | | | | CTCTC | | |
| | | | C | | | | | | | | | | | | GTCAG | | |
| | | | | | | | | | | | | | | | GAGTC | | |
| | | | | | | | | | | | | | | | AGA | | |

TABLE AA
Table A Sequences Reproduced without Nucleotide Modifications.
The Template Sequence (+SNP +PAM-kill) (RNA) sequences
from Table A are reproduced below without nucleotide modifications.
In some embodiments, In some embodiments, the sequences used in this
table can be used without chemical modifications.

| | | SEQ |
|---|---|---|
| | | ID |
| Name | Teplate Sequence (+SNP +PA-kill) (NA) | NO |
| HBB5_RT20 | CAUGGUGCACCUGACUCCUGGUUUUAGAGCUAGAAAUAGCAAGUU | 21677 |
| _PBS17 | AAAAUAAGGCUAGUCCGUUAUCAACUUGAAAAAGUGGCACCGAGU | |
| | CGGUGCAACGGCAGACUUCUCUUCAGGAGUCAGGUGCACCAUG | |
| HBB5_RT20 | CAUGGUGCACCUGACUCCUGGUUUUAGAGCUAGAAAUAGCAAGUU | 21678 |
| _PBS16 | AAAAUAAGGCUAGUCCGUUAUCAACUUGAAAAAGUGGCACCGAGU | |
| | CGGUGCAACGGCAGACUUCUCUUCAGGAGUCAGGUGCACCAU | |
| HBB5_RT20 | CAUGGUGCACCUGACUCCUGGUUUUAGAGCUAGAAAUAGCAAGUU | 21679 |
| _PBS15 | AAAAUAAGGCUAGUCCGUUAUCAACUUGAAAAAGUGGCACCGAGU | |
| | CGGUGCAACGGCAGACUUCUCUUCAGGAGUCAGGUGCACCA | |
| HBB5_RT20 | CAUGGUGCACCUGACUCCUGGUUUUAGAGCUAGAAAUAGCAAGUU | 21680 |
| _PBS14 | AAAAUAAGGCUAGUCCGUUAUCAACUUGAAAAAGUGGCACCGAGU | |
| | CGGUGCAACGGCAGACUUCUCUUCAGGAGUCAGGUGCACC | |
| HBB5_RT20 | CAUGGUGCACCUGACUCCUGGUUUUAGAGCUAGAAAUAGCAAGUU | 21681 |
| _PBS13 | AAAAUAAGGCUAGUCCGUUAUCAACUUGAAAAAGUGGCACCGAGU | |
| | CGGUGCAACGGCAGACUUCUCUUCAGGAGUCAGGUGCAC | |
| HBB5_RT20 | CAUGGUGCACCUGACUCCUGGUUUUAGAGCUAGAAAUAGCAAGUU | 21682 |
| _PBS12 | AAAAUAAGGCUAGUCCGUUAUCAACUUGAAAAAGUGGCACCGAGU | |
| | CGGUGCAACGGCAGACUUCUCUUCAGGAGUCAGGUGCA | |
| HBB5_RT20 | CAUGGUGCACCUGACUCCUGGUUUUAGAGCUAGAAAUAGCAAGUU | 21683 |
| _PBS11 | AAAAUAAGGCUAGUCCGUUAUCAACUUGAAAAAGUGGCACCGAGU | |
| | CGGUGCAACGGCAGACUUCUCUUCAGGAGUCAGGUGC | |
| HBB5_RT20 | CAUGGUGCACCUGACUCCUGGUUUUAGAGCUAGAAAUAGCAAGUU | 21684 |
| _PBS10 | AAAAUAAGGCUAGUCCGUUAUCAACUUGAAAAAGUGGCACCGAGU | |
| | CGGUGCAACGGCAGACUUCUCUUCAGGAGUCAGGUG | |
| HBB5_RT20 | CAUGGUGCACCUGACUCCUGGUUUUAGAGCUAGAAAUAGCAAGUU | 21685 |
| _PBS9 | AAAAUAAGGCUAGUCCGUUAUCAACUUGAAAAAGUGGCACCGAGU | |
| | CGGUGCAACGGCAGACUUCUCUUCAGGAGUCAGGU | |
| HBB5_RT20 | CAUGGUGCACCUGACUCCUGGUUUUAGAGCUAGAAAUAGCAAGUU | 21686 |
| _PBS8 | AAAAUAAGGCUAGUCCGUUAUCAACUUGAAAAAGUGGCACCGAGU | |
| | CGGUGCAACGGCAGACUUCUCUUCAGGAGUCAGG | |
| HBB5_RT19 | CAUGGUGCACCUGACUCCUGGUUUUAGAGCUAGAAAUAGCAAGUU | 21687 |
| _PBS17 | AAAAUAAGGCUAGUCCGUUAUCAACUUGAAAAAGUGGCACCGAGU | |
| | CGGUGCACGGCAGACUUCUCUUCAGGAGUCAGGUGCACCAUG | |
| HBB5_RT19 | CAUGGUGCACCUGACUCCUGGUUUUAGAGCUAGAAAUAGCAAGUU | 21688 |
| _PBS16 | AAAAUAAGGCUAGUCCGUUAUCAACUUGAAAAAGUGGCACCGAGU | |
| | CGGUGCACGGCAGACUUCUCUUCAGGAGUCAGGUGCACCAU | |
| HBB5_RT19 | CAUGGUGCACCUGACUCCUGGUUUUAGAGCUAGAAAUAGCAAGUU | 21689 |
| _PBS15 | AAAAUAAGGCUAGUCCGUUAUCAACUUGAAAAAGUGGCACCGAGU | |
| | CGGUGCACGGCAGACUUCUCUUCAGGAGUCAGGUGCACCA | |
| HBB5_RT19 | CAUGGUGCACCUGACUCCUGGUUUUAGAGCUAGAAAUAGCAAGUU | 21690 |
| _PBS14 | AAAAUAAGGCUAGUCCGUUAUCAACUUGAAAAAGUGGCACCGAGU | |
| | CGGUGCACGGCAGACUUCUCUUCAGGAGUCAGGUGCACC | |
| HBB5_RT19 | CAUGGUGCACCUGACUCCUGGUUUUAGAGCUAGAAAUAGCAAGUU | 21691 |
| _PBS13 | AAAAUAAGGCUAGUCCGUUAUCAACUUGAAAAAGUGGCACCGAGU | |
| | CGGUGCACGGCAGACUUCUCUUCAGGAGUCAGGUGCAC | |
| HBB5_RT19 | CAUGGUGCACCUGACUCCUGGUUUUAGAGCUAGAAAUAGCAAGUU | 21692 |
| _PBS12 | AAAAUAAGGCUAGUCCGUUAUCAACUUGAAAAAGUGGCACCGAGU | |
| | CGGUGCACGGCAGACUUCUCUUCAGGAGUCAGGUGCA | |
| HBB5_RT19 | CAUGGUGCACCUGACUCCUGGUUUUAGAGCUAGAAAUAGCAAGUU | 21693 |
| _PBS11 | AAAAUAAGGCUAGUCCGUUAUCAACUUGAAAAAGUGGCACCGAGU | |
| | CGGUGCACGGCAGACUUCUCUUCAGGAGUCAGGUGC | |
| HBB5_RT19 | CAUGGUGCACCUGACUCCUGGUUUUAGAGCUAGAAAUAGCAAGUU | 21694 |
| _PBS10 | AAAAUAAGGCUAGUCCGUUAUCAACUUGAAAAAGUGGCACCGAGU | |
| | CGGUGCACGGCAGACUUCUCUUCAGGAGUCAGGUG | |
| HBB5_RT19 | CAUGGUGCACCUGACUCCUGGUUUUAGAGCUAGAAAUAGCAAGUU | 21695 |
| _PBS9 | AAAAUAAGGCUAGUCCGUUAUCAACUUGAAAAAGUGGCACCGAGU | |
| | CGGUGCACGGCAGACUUCUCUUCAGGAGUCAGGU | |
| HBB5_RT19 | CAUGGUGCACCUGACUCCUGGUUUUAGAGCUAGAAAUAGCAAGUU | 21696 |
| _PBS8 | AAAAUAAGGCUAGUCCGUUAUCAACUUGAAAAAGUGGCACCGAGU | |
| | CGGUGCACGGCAGACUUCUCUUCAGGAGUCAGG | |
| HBB5_RT17 | CAUGGUGCACCUGACUCCUGGUUUUAGAGCUAGAAAUAGCAAGUU | 21697 |
| _PBS17 | AAAAUAAGGCUAGUCCGUUAUCAACUUGAAAAAGUGGCACCGAGU | |
| | CGGUGCGGCAGACUUCUCUUCAGGAGUCAGGUGCACCAUG | |
| HBB5_RT17 | CAUGGUGCACCUGACUCCUGGUUUUAGAGCUAGAAAUAGCAAGUU | 21698 |
| _PBS16 | AAAAUAAGGCUAGUCCGUUAUCAACUUGAAAAAGUGGCACCGAGU | |
| | CGGUGCGGCAGACUUCUCUUCAGGAGUCAGGUGCACCAU | |
| HBB5_RT17 | CAUGGUGCACCUGACUCCUGGUUUUAGAGCUAGAAAUAGCAAGUU | 21699 |
| _PBS15 | AAAAUAAGGCUAGUCCGUUAUCAACUUGAAAAAGUGGCACCGAGU | |
| | CGGUGCGGCAGACUUCUCUUCAGGAGUCAGGUGCACCA | |
| HBB5_RT17 | CAUGGUGCACCUGACUCCUGGUUUUAGAGCUAGAAAUAGCAAGUU | 21700 |
| _PBS14 | AAAAUAAGGCUAGUCCGUUAUCAACUUGAAAAAGUGGCACCGAGU | |
| | CGGUGCGGCAGACUUCUCUUCAGGAGUCAGGUGCACC | |
| HBB5_RT17 | CAUGGUGCACCUGACUCCUGGUUUUAGAGCUAGAAAUAGCAAGUU | 21701 |
| _PBS13 | AAAAUAAGGCUAGUCCGUUAUCAACUUGAAAAAGUGGCACCGAGU | |
| | CGGUGCGGCAGACUUCUCUUCAGGAGUCAGGUGCAC | |
| HBB5_RT17 | CAUGGUGCACCUGACUCCUGGUUUUAGAGCUAGAAAUAGCAAGUU | 21702 |
| _PBS12 | AAAAUAAGGCUAGUCCGUUAUCAACUUGAAAAAGUGGCACCGAGU | |
| | CGGUGCGGCAGACUUCUCUUCAGGAGUCAGGUGCA | |
| HBB5_RT17 | CAUGGUGCACCUGACUCCUGGUUUUAGAGCUAGAAAUAGCAAGUU | 21703 |
| _PBS11 | AAAAUAAGGCUAGUCCGUUAUCAACUUGAAAAAGUGGCACCGAGU | |
| | CGGUGCGGCAGACUUCUCUUCAGGAGUCAGGUGC | |
| HBB5_RT17 | CAUGGUGCACCUGACUCCUGGUUUUAGAGCUAGAAAUAGCAAGUU | 21704 |
| _PBS10 | AAAAUAAGGCUAGUCCGUUAUCAACUUGAAAAAGUGGCACCGAGU | |
| | CGGUGCGGCAGACUUCUCUUCAGGAGUCAGGUG | |
| HBB5_RT17 | CAUGGUGCACCUGACUCCUGGUUUUAGAGCUAGAAAUAGCAAGUU | 21705 |
| _PBS9 | AAAAUAAGGCUAGUCCGUUAUCAACUUGAAAAAGUGGCACCGAGU | |
| | CGGUGCGGCAGACUUCUCUUCAGGAGUCAGGU | |
| HBB5_RT17 | CAUGGUGCACCUGACUCCUGGUUUUAGAGCUAGAAAUAGCAAGUU | 21706 |
| _PBS8 | AAAAUAAGGCUAGUCCGUUAUCAACUUGAAAAAGUGGCACCGAGU | |
| | CGGUGCGGCAGACUUCUCUUCAGGAGUCAGG | |
| HBB5_RT16 | CAUGGUGCACCUGACUCCUGGUUUUAGAGCUAGAAAUAGCAAGUU | 21707 |
| _PBS17 | AAAAUAAGGCUAGUCCGUUAUCAACUUGAAAAAGUGGCACCGAGU | |
| | CGGUGCGCAGACUUCUCUUCAGGAGUCAGGUGCACCAUG | |
| HBB5_RT16 | CAUGGUGCACCUGACUCCUGGUUUUAGAGCUAGAAAUAGCAAGUU | 21708 |
| _PBS16 | AAAAUAAGGCUAGUCCGUUAUCAACUUGAAAAAGUGGCACCGAGU | |
| | CGGUGCGCAGACUUCUCUUCAGGAGUCAGGUGCACCAU | |
| HBB5_RT16 | CAUGGUGCACCUGACUCCUGGUUUUAGAGCUAGAAAUAGCAAGUU | 21709 |
| _PBS15 | AAAAUAAGGCUAGUCCGUUAUCAACUUGAAAAAGUGGCACCGAGU | |
| | CGGUGCGCAGACUUCUCUUCAGGAGUCAGGUGCACCA | |
| HBB5_RT16 | CAUGGUGCACCUGACUCCUGGUUUUAGAGCUAGAAAUAGCAAGUU | 21710 |
| _PBS14 | AAAAUAAGGCUAGUCCGUUAUCAACUUGAAAAAGUGGCACCGAGU | |
| | CGGUGCGCAGACUUCUCUUCAGGAGUCAGGUGCACC | |
| HBB5_RT16 | CAUGGUGCACCUGACUCCUGGUUUUAGAGCUAGAAAUAGCAAGUU | 21711 |
| _PBS13 | AAAAUAAGGCUAGUCCGUUAUCAACUUGAAAAAGUGGCACCGAGU | |
| | CGGUGCGCAGACUUCUCUUCAGGAGUCAGGUGCAC | |
| HBB5_RT16 | CAUGGUGCACCUGACUCCUGGUUUUAGAGCUAGAAAUAGCAAGUU | 21712 |
| _PBS12 | AAAAUAAGGCUAGUCCGUUAUCAACUUGAAAAAGUGGCACCGAGU | |
| | CGGUGCGCAGACUUCUCUUCAGGAGUCAGGUGCA | |
| HBB5_RT16 | CAUGGUGCACCUGACUCCUGGUUUUAGAGCUAGAAAUAGCAAGUU | 21713 |
| _PBS11 | AAAAUAAGGCUAGUCCGUUAUCAACUUGAAAAAGUGGCACCGAGU | |
| | CGGUGCGCAGACUUCUCUUCAGGAGUCAGGUGC | |
| HBB5_RT16 | CAUGGUGCACCUGACUCCUGGUUUUAGAGCUAGAAAUAGCAAGUU | 21714 |
| _PBS10 | AAAAUAAGGCUAGUCCGUUAUCAACUUGAAAAAGUGGCACCGAGU | |
| | CGGUGCGCAGACUUCUCUUCAGGAGUCAGGUG | |
| HBB5_RT16 | CAUGGUGCACCUGACUCCUGGUUUUAGAGCUAGAAAUAGCAAGUU | 21715 |
| _PBS9 | AAAAUAAGGCUAGUCCGUUAUCAACUUGAAAAAGUGGCACCGAGU | |
| | CGGUGCGCAGACUUCUCUUCAGGAGUCAGGU | |
| HBB5_RT16 | CAUGGUGCACCUGACUCCUGGUUUUAGAGCUAGAAAUAGCAAGUU | 21716 |
| _PBS8 | AAAAUAAGGCUAGUCCGUUAUCAACUUGAAAAAGUGGCACCGAGU | |
| | CGGUGCGCAGACUUCUCUUCAGGAGUCAGG | |
| HBB5_RT14 | CAUGGUGCACCUGACUCCUGGUUUUAGAGCUAGAAAUAGCAAGUU | 21717 |
| _PBS17 | AAAAUAAGGCUAGUCCGUUAUCAACUUGAAAAAGUGGCACCGAGU | |
| | CGGUGCAGACUUCUCUUCAGGAGUCAGGUGCACCAUG | |
| HBB5_RT14 | CAUGGUGCACCUGACUCCUGGUUUUAGAGCUAGAAAUAGCAAGUU | 21718 |
| _PBS16 | AAAAUAAGGCUAGUCCGUUAUCAACUUGAAAAAGUGGCACCGAGU | |
| | CGGUGCAGACUUCUCUUCAGGAGUCAGGUGCACCAU | |
| HBB5_RT14 | CAUGGUGCACCUGACUCCUGGUUUUAGAGCUAGAAAUAGCAAGUU | 21719 |
| _PBS15 | AAAAUAAGGCUAGUCCGUUAUCAACUUGAAAAAGUGGCACCGAGU | |
| | CGGUGCAGACUUCUCUUCAGGAGUCAGGUGCACCA | |
| HBB5_RT14 | CAUGGUGCACCUGACUCCUGGUUUUAGAGCUAGAAAUAGCAAGUU | 21720 |
| _PBS14 | AAAAUAAGGCUAGUCCGUUAUCAACUUGAAAAAGUGGCACCGAGU | |
| | CGGUGCAGACUUCUCUUCAGGAGUCAGGUGCACC | |
| HBB5_RT14 | CAUGGUGCACCUGACUCCUGGUUUUAGAGCUAGAAAUAGCAAGUU | 21721 |
| _PBS13 | AAAAUAAGGCUAGUCCGUUAUCAACUUGAAAAAGUGGCACCGAGU | |
| | CGGUGCAGACUUCUCUUCAGGAGUCAGGUGCAC | |
| HBB5_RT14 | CAUGGUGCACCUGACUCCUGGUUUUAGAGCUAGAAAUAGCAAGUU | 21722 |
| _PBS12 | AAAAUAAGGCUAGUCCGUUAUCAACUUGAAAAAGUGGCACCGAGU | |
| | CGGUGCAGACUUCUCUUCAGGAGUCAGGUGCA | |
| HBB5_RT14 | CAUGGUGCACCUGACUCCUGGUUUUAGAGCUAGAAAUAGCAAGUU | 21723 |
| _PBS11 | AAAAUAAGGCUAGUCCGUUAUCAACUUGAAAAAGUGGCACCGAGU | |
| | CGGUGCAGACUUCUCUUCAGGAGUCAGGUGC | |
| HBB5_RT14 | CAUGGUGCACCUGACUCCUGGUUUUAGAGCUAGAAAUAGCAAGUU | 21724 |
| _PBS10 | AAAAUAAGGCUAGUCCGUUAUCAACUUGAAAAAGUGGCACCGAGU | |
| | CGGUGCAGACUUCUCUUCAGGAGUCAGGUG | |
| HBB5_RT14 | CAUGGUGCACCUGACUCCUGGUUUUAGAGCUAGAAAUAGCAAGUU | 21725 |
| _PBS9 | AAAAUAAGGCUAGUCCGUUAUCAACUUGAAAAAGUGGCACCGAGU | |
| | CGGUGCAGACUUCUCUUCAGGAGUCAGGU | |
| HBB5_RT14 | CAUGGUGCACCUGACUCCUGGUUUUAGAGCUAGAAAUAGCAAGUU | 21726 |
| _PBS8 | AAAAUAAGGCUAGUCCGUUAUCAACUUGAAAAAGUGGCACCGAGU | |
| | CGGUGCAGACUUCUCUUCAGGAGUCAGG | |
| HBB5_RT13 | CAUGGUGCACCUGACUCCUGGUUUUAGAGCUAGAAAUAGCAAGUU | 21727 |
| _PBS17 | AAAAUAAGGCUAGUCCGUUAUCAACUUGAAAAAGUGGCACCGAGU | |
| | CGGUGCGACUUCUCUUCAGGAGUCAGGUGCACCAUG | |
| HBB5_RT13 | CAUGGUGCACCUGACUCCUGGUUUUAGAGCUAGAAAUAGCAAGUU | 21728 |
| _PBS16 | AAAAUAAGGCUAGUCCGUUAUCAACUUGAAAAAGUGGCACCGAGU | |
| | CGGUGCGACUUCUCUUCAGGAGUCAGGUGCACCAU | |
| HBB5_RT13 | CAUGGUGCACCUGACUCCUGGUUUUAGAGCUAGAAAUAGCAAGUU | 21729 |
| _PBS15 | AAAAUAAGGCUAGUCCGUUAUCAACUUGAAAAAGUGGCACCGAGU | |
| | CGGUGCGACUUCUCUUCAGGAGUCAGGUGCACCA | |
| HBB5_RT13 | CAUGGUGCACCUGACUCCUGGUUUUAGAGCUAGAAAUAGCAAGUU | 21730 |
| _PBS14 | AAAAUAAGGCUAGUCCGUUAUCAACUUGAAAAAGUGGCACCGAGU | |
| | CGGUGCGACUUCUCUUCAGGAGUCAGGUGCACC | |
| HBB5_RT13 | CAUGGUGCACCUGACUCCUGGUUUUAGAGCUAGAAAUAGCAAGUU | 21731 |
| _PBS13 | AAAAUAAGGCUAGUCCGUUAUCAACUUGAAAAAGUGGCACCGAGU | |
| | CGGUGCGACUUCUCUUCAGGAGUCAGGUGCAC | |
| HBB5_RT13 | CAUGGUGCACCUGACUCCUGGUUUUAGAGCUAGAAAUAGCAAGUU | 21732 |
| _PBS12 | AAAAUAAGGCUAGUCCGUUAUCAACUUGAAAAAGUGGCACCGAGU | |
| | CGGUGCGACUUCUCUUCAGGAGUCAGGUGCA | |
| HBB5_RT13 | CAUGGUGCACCUGACUCCUGGUUUUAGAGCUAGAAAUAGCAAGUU | 21733 |
| _PBS11 | AAAAUAAGGCUAGUCCGUUAUCAACUUGAAAAAGUGGCACCGAGU | |
| | CGGUGCGACUUCUCUUCAGGAGUCAGGUGC | |
| HBB5_RT13 | CAUGGUGCACCUGACUCCUGGUUUUAGAGCUAGAAAUAGCAAGUU | 21734 |
| _PBS10 | AAAAUAAGGCUAGUCCGUUAUCAACUUGAAAAAGUGGCACCGAGU | |
| | CGGUGCGACUUCUCUUCAGGAGUCAGGUG | |
| HBB5_RT13 | CAUGGUGCACCUGACUCCUGGUUUUAGAGCUAGAAAUAGCAAGUU | 21735 |
| _PBS9 | AAAAUAAGGCUAGUCCGUUAUCAACUUGAAAAAGUGGCACCGAGU | |
| | CGGUGCGACUUCUCUUCAGGAGUCAGGU | |
| HBB5_RT13 | CAUGGUGCACCUGACUCCUGGUUUUAGAGCUAGAAAUAGCAAGUU | 21736 |
| _PBS8 | AAAAUAAGGCUAGUCCGUUAUCAACUUGAAAAAGUGGCACCGAGU | |
| | CGGUGCGACUUCUCUUCAGGAGUCAGG | |
| HBB5_RT12 | CAUGGUGCACCUGACUCCUGGUUUUAGAGCUAGAAAUAGCAAGUU | 21737 |
| _PBS17 | AAAAUAAGGCUAGUCCGUUAUCAACUUGAAAAAGUGGCACCGAGU | |
| | CGGUGCACUUCUCUUCAGGAGUCAGGUGCACCAUG | |
| HBB5_RT12 | CAUGGUGCACCUGACUCCUGGUUUUAGAGCUAGAAAUAGCAAGUU | 21738 |
| _PBS16 | AAAAUAAGGCUAGUCCGUUAUCAACUUGAAAAAGUGGCACCGAGU | |
| | CGGUGCACUUCUCUUCAGGAGUCAGGUGCACCAU | |
| HBB5_RT12 | CAUGGUGCACCUGACUCCUGGUUUUAGAGCUAGAAAUAGCAAGUU | 21739 |
| _PBS15 | AAAAUAAGGCUAGUCCGUUAUCAACUUGAAAAAGUGGCACCGAGU | |
| | CGGUGCACUUCUCUUCAGGAGUCAGGUGCACCA | |
| HBB5_RT12 | CAUGGUGCACCUGACUCCUGGUUUUAGAGCUAGAAAUAGCAAGUU | 21740 |
| _PBS14 | AAAAUAAGGCUAGUCCGUUAUCAACUUGAAAAAGUGGCACCGAGU | |
| | CGGUGCACUUCUCUUCAGGAGUCAGGUGCACC | |
| HBB5_RT12 | CAUGGUGCACCUGACUCCUGGUUUUAGAGCUAGAAAUAGCAAGUU | 21741 |
| _PBS13 | AAAAUAAGGCUAGUCCGUUAUCAACUUGAAAAAGUGGCACCGAGU | |
| | CGGUGCACUUCUCUUCAGGAGUCAGGUGCAC | |
| HBB5_RT12 | CAUGGUGCACCUGACUCCUGGUUUUAGAGCUAGAAAUAGCAAGUU | 21742 |
| _PBS12 | AAAAUAAGGCUAGUCCGUUAUCAACUUGAAAAAGUGGCACCGAGU | |
| | CGGUGCACUUCUCUUCAGGAGUCAGGUGCA | |
| HBB5_RT12 | CAUGGUGCACCUGACUCCUGGUUUUAGAGCUAGAAAUAGCAAGUU | 21743 |
| _PBS11 | AAAAUAAGGCUAGUCCGUUAUCAACUUGAAAAAGUGGCACCGAGU | |
| | CGGUGCACUUCUCUUCAGGAGUCAGGUGC | |
| HBB5_RT12 | CAUGGUGCACCUGACUCCUGGUUUUAGAGCUAGAAAUAGCAAGUU | 21744 |
| _PBS10 | AAAAUAAGGCUAGUCCGUUAUCAACUUGAAAAAGUGGCACCGAGU | |
| | CGGUGCACUUCUCUUCAGGAGUCAGGUG | |
| HBB5_RT12 | CAUGGUGCACCUGACUCCUGGUUUUAGAGCUAGAAAUAGCAAGUU | 21745 |
| _PBS9 | AAAAUAAGGCUAGUCCGUUAUCAACUUGAAAAAGUGGCACCGAGU | |
| | CGGUGCACUUCUCUUCAGGAGUCAGGU | |
| HBB5_RT12 | CAUGGUGCACCUGACUCCUGGUUUUAGAGCUAGAAAUAGCAAGUU | 21746 |
| _PBS8 | AAAAUAAGGCUAGUCCGUUAUCAACUUGAAAAAGUGGCACCGAGU | |
| | CGGUGCACUUCUCUUCAGGAGUCAGG | |
| HBB5_RT10 | CAUGGUGCACCUGACUCCUGGUUUUAGAGCUAGAAAUAGCAAGUU | 21747 |
| _PBS17 | AAAAUAAGGCUAGUCCGUUAUCAACUUGAAAAAGUGGCACCGAGU | |
| | CGGUGCUUCUCUUCAGGAGUCAGGUGCACCAUG | |
| HBB5_RT10 | CAUGGUGCACCUGACUCCUGGUUUUAGAGCUAGAAAUAGCAAGUU | 21748 |
| _PBS16 | AAAAUAAGGCUAGUCCGUUAUCAACUUGAAAAAGUGGCACCGAGU | |
| | CGGUGCUUCUCUUCAGGAGUCAGGUGCACCAU | |
| HBB5_RT10 | CAUGGUGCACCUGACUCCUGGUUUUAGAGCUAGAAAUAGCAAGUU | 21749 |
| _PBS15 | AAAAUAAGGCUAGUCCGUUAUCAACUUGAAAAAGUGGCACCGAGU | |
| | CGGUGCUUCUCUUCAGGAGUCAGGUGCACCA | |
| HBB5_RT10 | CAUGGUGCACCUGACUCCUGGUUUUAGAGCUAGAAAUAGCAAGUU | 21750 |
| _PBS14 | AAAAUAAGGCUAGUCCGUUAUCAACUUGAAAAAGUGGCACCGAGU | |
| | CGGUGCUUCUCUUCAGGAGUCAGGUGCACC | |
| HBB5_RT10 | CAUGGUGCACCUGACUCCUGGUUUUAGAGCUAGAAAUAGCAAGUU | 21751 |
| _PBS13 | AAAAUAAGGCUAGUCCGUUAUCAACUUGAAAAAGUGGCACCGAGU | |
| | CGGUGCUUCUCUUCAGGAGUCAGGUGCAC | |
| HBB5_RT10 | CAUGGUGCACCUGACUCCUGGUUUUAGAGCUAGAAAUAGCAAGUU | 21752 |
| _PBS12 | AAAAUAAGGCUAGUCCGUUAUCAACUUGAAAAAGUGGCACCGAGU | |
| | CGGUGCUUCUCUUCAGGAGUCAGGUGCA | |
| HBB5_RT10 | CAUGGUGCACCUGACUCCUGGUUUUAGAGCUAGAAAUAGCAAGUU | 21753 |
| _PBS11 | AAAAUAAGGCUAGUCCGUUAUCAACUUGAAAAAGUGGCACCGAGU | |
| | CGGUGCUUCUCUUCAGGAGUCAGGUGC | |
| HBB5_RT10 | CAUGGUGCACCUGACUCCUGGUUUUAGAGCUAGAAAUAGCAAGUU | 21754 |
| _PBS10 | AAAAUAAGGCUAGUCCGUUAUCAACUUGAAAAAGUGGCACCGAGU | |
| | CGGUGCUUCUCUUCAGGAGUCAGGUG | |
| HBB5_RT10 | CAUGGUGCACCUGACUCCUGGUUUUAGAGCUAGAAAUAGCAAGUU | 21755 |
| _PBS9 | AAAAUAAGGCUAGUCCGUUAUCAACUUGAAAAAGUGGCACCGAGU | |
| | CGGUGCUUCUCUUCAGGAGUCAGGU | |
| HBB5_RT10 | CAUGGUGCACCUGACUCCUGGUUUUAGAGCUAGAAAUAGCAAGUU | 21756 |
| _PBS8 | AAAAUAAGGCUAGUCCGUUAUCAACUUGAAAAAGUGGCACCGAGU | |
| | CGGUGCUUCUCUUCAGGAGUCAGG | |
| HBB5_RT9 | CAUGGUGCACCUGACUCCUGGUUUUAGAGCUAGAAAUAGCAAGUU | 21757 |
| _PBS17 | AAAAUAAGGCUAGUCCGUUAUCAACUUGAAAAAGUGGCACCGAGU | |
| | CGGUGCUCUCUUCAGGAGUCAGGUGCACCAUG | |
| HBB5_RT9 | CAUGGUGCACCUGACUCCUGGUUUUAGAGCUAGAAAUAGCAAGUU | 21758 |
| _PBS16 | AAAAUAAGGCUAGUCCGUUAUCAACUUGAAAAAGUGGCACCGAGU | |
| | CGGUGCUCUCUUCAGGAGUCAGGUGCACCAU | |
| HBB5_RT9 | CAUGGUGCACCUGACUCCUGGUUUUAGAGCUAGAAAUAGCAAGUU | 21759 |
| _PBS15 | AAAAUAAGGCUAGUCCGUUAUCAACUUGAAAAAGUGGCACCGAGU | |
| | CGGUGCUCUCUUCAGGAGUCAGGUGCACCA | |
| HBB5_RT9 | CAUGGUGCACCUGACUCCUGGUUUUAGAGCUAGAAAUAGCAAGUU | 21760 |
| _PBS14 | AAAAUAAGGCUAGUCCGUUAUCAACUUGAAAAAGUGGCACCGAGU | |
| | CGGUGCUCUCUUCAGGAGUCAGGUGCACC | |
| HBB5_RT9 | CAUGGUGCACCUGACUCCUGGUUUUAGAGCUAGAAAUAGCAAGUU | 21761 |
| _PBS13 | AAAAUAAGGCUAGUCCGUUAUCAACUUGAAAAAGUGGCACCGAGU | |
| | CGGUGCUCUCUUCAGGAGUCAGGUGCAC | |
| HBB5_RT9 | CAUGGUGCACCUGACUCCUGGUUUUAGAGCUAGAAAUAGCAAGUU | 21762 |
| _PBS12 | AAAAUAAGGCUAGUCCGUUAUCAACUUGAAAAAGUGGCACCGAGU | |
| | CGGUGCUCUCUUCAGGAGUCAGGUGCA | |
| HBB5_RT9 | CAUGGUGCACCUGACUCCUGGUUUUAGAGCUAGAAAUAGCAAGUU | 21763 |
| _PBS11 | AAAAUAAGGCUAGUCCGUUAUCAACUUGAAAAAGUGGCACCGAGU | |
| | CGGUGCUCUCUUCAGGAGUCAGGUGC | |
| HBB5_RT9 | CAUGGUGCACCUGACUCCUGGUUUUAGAGCUAGAAAUAGCAAGUU | 21764 |
| _PBS10 | AAAAUAAGGCUAGUCCGUUAUCAACUUGAAAAAGUGGCACCGAGU | |
| | CGGUGCUCUCUUCAGGAGUCAGGUG | |
| HBB5_RT9 | CAUGGUGCACCUGACUCCUGGUUUUAGAGCUAGAAAUAGCAAGUU | 21765 |
| _PBS9 | AAAAUAAGGCUAGUCCGUUAUCAACUUGAAAAAGUGGCACCGAGU | |
| | CGGUGCUCUCUUCAGGAGUCAGGU | |
| HBB5_RT9 | CAUGGUGCACCUGACUCCUGGUUUUAGAGCUAGAAAUAGCAAGUU | 21766 |
| _PBS8 | AAAAUAAGGCUAGUCCGUUAUCAACUUGAAAAAGUGGCACCGAGU | |
| | CGGUGCUCUCUUCAGGAGUCAGG | |

TABLE B
HBB8 Sequences. The columns indicate, from left to right:
1) Name of the template RNA, 2) gRNA spacer sequence of the template RNA, 3) SpCas9 gRNA scaffold sequence of the template RNA,
4)PBS sequence of the template RNA, 5) RT template sequence of the template RNA, wherein a SNP relative to hg38 that is present
in HEK293T cells is bolded, and wherein the mutation region is underlined, 6) full template RNA sequence comprising HEK293T SNP,
7) Full template RNA sequence depicted as RNA corresponding to column 6, further showing chemical modifications as used in Example 4,
8) alternative template RNA sequence designed relative to hg38 reference genome (lacking HEK293T SNP) and
9) observed activity of template RNA of column 7 as defined in Example 4.

| | | | | | | | RT | | | | | | | | |
|---|---|---|---|---|---|---|---|---|---|---|---|---|---|---|---|
| | | | gRNA | | | | Template | | | | Template | | | | |
| | | SEQ | Scaffold | SEQ | | SEQ | (293T | SEQ | Template | SEQ | Sequence | SEQ | Template | SEQ | Ac- |
| | | ID | (SpCas9 | ID | | ID | SNP; | ID | Sequence | ID | (+SNP) | ID | Sequence | ID | tiv- |
| Name | Spacer | NO | scaffold) | NO | PBS | NO | Correction) | NO | (+SNP) | NO | (RNA) | NO | (no SNP) | NO | ity |
| HBB8_ | GTAACG | 19971 | GTTTTAGAG | 20061 | GAG | 20151 | TGGTGC | 20241 | GTAACGGCAGA | 20331 | mG*mU*mA*rAr | 20421 | GTAACGG | 20511 | + |
| RT20_PB | GCAGA | | CTAGAAAT | | AAG | | ACCTGA | | CTTCTCCACGTT | | CrGrGrCrArGrAr | | CAGACTTC | | |
| S17 | CTTCTC | | AGCAAGTT | | TCT | | CTCCTG | | TTAGAGCTAGAA | | CrUrUrCrUrCrCr | | TCCACGTT | | |
| | CAC | | AAAATAAG | | GCC | | AG | | ATAGCAAGTTAA | | ArCrGrUrUrUrUr | | TTAGAGCT | | |
| | | | GCTAGTCCG | | GTT | | | | AATAAGGCTAGT | | ArGrArGrCrUrAr | | AGAAATA | | |
| | | | TTATCAACT | | AC | | | | CCGTTATCAACT | | GrArArArUrArGr | | GCAAGTT | | |
| | | | TGAAAAAG | | | | | | TGAAAAAGTGG | | CrArArGrUrUrAr | | AAAATAA | | |
| | | | TGGCACCG | | | | | | CACCGAGTCGGT | | ArArArUrArArGr | | GGCTAGT | | |
| | | | AGTCGGTG | | | | | | GCTGGTGCACCT | | GrCrUrArGrUrCr | | CCGTTATC | | |
| | | | C | | | | | | GACTCCTGAGGA | | CrGrUrUrArUrCr | | AACTTGA | | |
| | | | | | | | | | GAAGTCTGCCGT | | ArArCrUrUrGrAr | | AAAAGTG | | |
| | | | | | | | | | TAC | | ArArArArGrUrGr | | GCACCGA | | |
| HBB8_ | GTAACG | 19972 | GTTTTAGAG | 20062 | GAG | 20152 | TGGTGC | 20242 | GTAACGGCAGA | 20332 | mG*mU*mA*rAr | 20422 | GTAACGG | 20512 | + |
| RT20_ | GCAGA | | CTAGAAAT | | AAG | | ACCTGA | | CTTCTCCACGTT | | CrGrGrCrArGrAr | | CAGACTTC | | |
| PBS16 | CTTCTC | | AGCAAGTT | | TCT | | CTCCTG | | TTAGAGCTAGAA | | CrUrUrCrUrCrCr | | TCCACGTT | | |
| | CAC | | AAAATAAG | | GCC | | AG | | ATAGCAAGTTAA | | ArCrGrUrUrUrUr | | TTAGAGCT | | |
| | | | GCTAGTCCG | | GTT | | | | AATAAGGCTAGT | | ArGrArGrCrUrAr | | AGAAATA | | |
| | | | TTATCAACT | | A | | | | CCGTTATCAACT | | GrArArArUrArGr | | GCAAGTT | | |
| | | | TGAAAAAG | | | | | | TGAAAAAGTGG | | CrArArGrUrUrAr | | AAAATAA | | |
| | | | TGGCACCG | | | | | | CACCGAGTCGGT | | ArArArUrArArGr | | GGCTAGT | | |
| | | | AGTCGGTG | | | | | | GCTGGTGCACCT | | GrCrUrArGrUrCr | | CCGTTATC | | |
| | | | C | | | | | | GACTCCTGAGGA | | CrGrUrUrArUrCr | | AACTTGA | | |
| | | | | | | | | | GAAGTCTGCCGT | | ArArCrUrUrGrAr | | AAAAGTG | | |
| | | | | | | | | | TA | | ArArArArGrUrGr | | GCACCGA | | |
| | | | | | | | | | | | GrCrArCrCrGrAr | | GTCGGTG | | |
| | | | | | | | | | | | GrUrCrGrGrUrGr | | CTGGTGC | | |
| | | | | | | | | | | | CrUrGrGrUrGrCr | | ATCTGACT | | |
| | | | | | | | | | | | ArCrCrUrGrArCr | | CCTGAGG | | |
| | | | | | | | | | | | UrCrCrUrGrArGr | | AGAAGTC | | |
| | | | | | | | | | | | GrArGrArArGrUr | | TGCCGTTA | | |
| | | | | | | | | | | | CrUrGrCrCrG*m | | | | |
| | | | | | | | | | | | U*mU*mA | | | | |
| HBB8_ | GTAACG | 19973 | GTTTTAGAG | 20063 | GAG | 20153 | TGGTGC | 20243 | GTAACGGCAGA | 20333 | mG*mU*mA*rAr | 20423 | GTAACGG | 20513 | + |
| RT20_PB | GCAGA | | CTAGAAAT | | AAG | | ACCTGA | | CTTCTCCACGTT | | CrGrGrCrArGrAr | | CAGACTTC | | |
| S15 | CTTCTC | | AGCAAGTT | | TCT | | CTCCTG | | TTAGAGCTAGAA | | CrUrUrCrUrCrCr | | TCCACGTT | | |
| | CAC | | AAAATAAG | | GCC | | AG | | ATAGCAAGTTAA | | ArCrGrUrUrUrUr | | TTAGAGCT | | |
| | | | GCTAGTCCG | | GTT | | | | AATAAGGCTAGT | | ArGrArGrCrUrAr | | AGAAATA | | |
| | | | TTATCAACT | | | | | | CCGTTATCAACT | | GrArArArUrArGr | | GCAAGTT | | |
| | | | TGAAAAAG | | | | | | TGAAAAAGTGG | | CrArArGrUrUrAr | | AAAATAA | | |
| | | | TGGCACCG | | | | | | CACCGAGTCGGT | | ArArArUrArArGr | | GGCTAGT | | |
| | | | AGTCGGTG | | | | | | GCTGGTGCACCT | | GrCrUrArGrUrCr | | CCGTTATC | | |
| | | | C | | | | | | GACTCCTGAGGA | | CrGrUrUrArUrCr | | AACTTGA | | |
| | | | | | | | | | GAAGTCTGCCGT | | ArArCrUrUrGrAr | | AAAAGTG | | |
| | | | | | | | | | T | | ArArArArGrUrGr | | GCACCGA | | |
| | | | | | | | | | | | GrCrArCrCrGrAr | | GTCGGTG | | |
| | | | | | | | | | | | GrUrCrGrGrUrGr | | CTGGTGC | | |
| | | | | | | | | | | | CrUrGrGrUrGrCr | | ATCTGACT | | |
| | | | | | | | | | | | ArCrCrUrGrArCr | | CCTGAGG | | |
| | | | | | | | | | | | UrCrCrUrGrArGr | | AGAAGTC | | |
| | | | | | | | | | | | GrArGrArArGrUr | | TGCCGTT | | |
| | | | | | | | | | | | CrUrGrCrC*mG* | | | | |
| | | | | | | | | | | | mU*mU | | | | |
| HBB8_ | GTAACG | 19974 | GTTTTAGAG | 20064 | GAG | 20154 | TGGTGC | 20244 | GTAACGGCAGA | 20334 | mG*mU*mA*rAr | 20424 | GTAACGG | 20514 | + |
| RT20_PB | GCAGA | | CTAGAAAT | | AAG | | ACCTGA | | CTTCTCCACGTT | | CrGrGrCrArGrAr | | CAGACTTC | | |
| S14 | CTTCTC | | AGCAAGTT | | TCT | | CTCCTG | | TTAGAGCTAGAA | | CrUrUrCrUrCrCr | | TCCACGTT | | |
| | CAC | | AAAATAAG | | GCC | | AG | | ATAGCAAGTTAA | | ArCrGrUrUrUrUr | | TTAGAGCT | | |
| | | | GCTAGTCCG | | GT | | | | AATAAGGCTAGT | | ArGrArGrCrUrAr | | AGAAATA | | |
| | | | TTATCAACT | | | | | | CCGTTATCAACT | | GrArArArUrArGr | | GCAAGTT | | |
| | | | TGAAAAAG | | | | | | TGAAAAAGTGG | | CrArArGrUrUrAr | | AAAATAA | | |
| | | | TGGCACCG | | | | | | CACCGAGTCGGT | | ArArArUrArArGr | | GGCTAGT | | |
| | | | AGTCGGTG | | | | | | GCTGGTGCACCT | | GrCrUrArGrUrCr | | CCGTTATC | | |
| | | | C | | | | | | GACTCCTGAGGA | | CrGrUrUrArUrCr | | AACTTGA | | |
| | | | | | | | | | GAAGTCTGCCGT | | ArArCrUrUrGrAr | | AAAAGTG | | |
| | | | | | | | | | | | ArArArArGrUrGr | | GCACCGA | | |
| | | | | | | | | | | | GrCrArCrCrGrAr | | GTCGGTG | | |
| | | | | | | | | | | | GrUrCrGrGrUrGr | | CTGGTGC | | |
| | | | | | | | | | | | CrUrGrGrUrGrCr | | ATCTGACT | | |
| | | | | | | | | | | | ArCrCrUrGrArCr | | CCTGAGG | | |
| | | | | | | | | | | | UrCrCrUrGrArGr | | AGAAGTC | | |
| | | | | | | | | | | | GrArGrArArGrUr | | TGCCGT | | |
| | | | | | | | | | | | CrUrGrC*mC*m | | | | |
| | | | | | | | | | | | G*mU | | | | |
| HBB8_ | GTAACG | 19975 | GTTTTAGAG | 20065 | GAG | 20155 | TGGTGC | 20245 | GTAACGGCAGA | 20335 | mG*mU*mA*rAr | 20425 | GTAACGG | 20515 | + |
| RT20_ | GCAGA | | CTAGAAAT | | AAG | | ACCTGA | | CTTCTCCACGTT | | CrGrGrCrArGrAr | | CAGACTTC | | |
| PB | CTTCTC | | AGCAAGTT | | TCT | | CTCCTG | | TTAGAGCTAGAA | | CrUrUrCrUrCrCr | | TCCACGTT | | |
| S13 | CAC | | AAAATAAG | | GCC | | AG | | ATAGCAAGTTAA | | ArCrGrUrUrUrUr | | TTAGAGCT | | |
| | | | GCTAGTCCG | | G | | | | AATAAGGCTAGT | | ArGrArGrCrUrAr | | AGAAATA | | |
| | | | TTATCAACT | | | | | | CCGTTATCAACT | | GrArArArUrArGr | | GCAAGTT | | |
| | | | TGAAAAAG | | | | | | TGAAAAAGTGG | | CrArArGrUrUrAr | | AAAATAA | | |
| | | | TGGCACCG | | | | | | CACCGAGTCGGT | | ArArArUrArArGr | | GGCTAGT | | |
| | | | AGTCGGTG | | | | | | GCTGGTGCACCT | | GrCrUrArGrUrCr | | CCGTTATC | | |
| | | | C | | | | | | GACTCCTGAGGA | | CrGrUrUrArUrCr | | AACTTGA | | |
| | | | | | | | | | GAAGTCTGCCG | | ArArCrUrUrGrAr | | AAAAGTG | | |
| | | | | | | | | | | | ArArArArGrUrGr | | GCACCGA | | |
| | | | | | | | | | | | GrCrArCrCrGrAr | | GTCGGTG | | |
| | | | | | | | | | | | GrUrCrGrGrUrGr | | CTGGTGC | | |
| | | | | | | | | | | | CrUrGrGrUrGrCr | | ATCTGACT | | |
| | | | | | | | | | | | ArCrCrUrGrArCr | | CCTGAGG | | |
| | | | | | | | | | | | UrCrCrUrGrArGr | | AGAAGTC | | |
| | | | | | | | | | | | GrArGrArArGrUr | | TGCCG | | |
| | | | | | | | | | | | CrUrG*mC*mC* | | | | |
| | | | | | | | | | | | mG | | | | |
| HBB8_ | GTAACG | 19976 | GTTTTAGAG | 20066 | GAG | 20156 | TGGTGC | 20246 | GTAACGGCAGA | 20336 | mG*mU*mA*rAr | 20426 | GTAACGG | 20516 | ++ |
| RT20_ | GCAGA | | CTAGAAAT | | AAG | | ACCTGA | | CTTCTCCACGTT | | CrGrGrCrArGrAr | | CAGACTTC | | |
| PB | CTTCTC | | AGCAAGTT | | TCT | | CTCCTG | | TTAGAGCTAGAA | | CrUrUrCrUrCrCr | | TCCACGTT | | |
| S12 | CAC | | AAAATAAG | | GCC | | AG | | ATAGCAAGTTAA | | ArCrGrUrUrUrUr | | TTAGAGCT | | |
| | | | GCTAGTCCG | | | | | | AATAAGGCTAGT | | ArGrArGrCrUrAr | | AGAAATA | | |
| | | | TTATCAACT | | | | | | CCGTTATCAACT | | GrArArArUrArGr | | GCAAGTT | | |
| | | | TGAAAAAG | | | | | | TGAAAAAGTGG | | CrArArGrUrUrAr | | AAAATAA | | |
| | | | TGGCACCG | | | | | | CACCGAGTCGGT | | ArArArUrArArGr | | GGCTAGT | | |
| | | | AGTCGGTG | | | | | | GCTGGTGCACCT | | GrCrUrArGrUrCr | | CCGTTATC | | |
| | | | C | | | | | | GACTCCTGAGGA | | CrGrUrUrArUrCr | | AACTTGA | | |
| | | | | | | | | | GAAGTCTGCC | | ArArCrUrUrGrAr | | AAAAGTG | | |
| | | | | | | | | | | | ArArArArGrUrGr | | GCACCGA | | |
| | | | | | | | | | | | GrCrArCrCrGrAr | | GTCGGTG | | |
| | | | | | | | | | | | GrUrCrGrGrUrGr | | CTGGTGC | | |
| | | | | | | | | | | | CrUrGrGrUrGrCr | | ATCTGACT | | |
| | | | | | | | | | | | ArCrCrUrGrArCr | | CCTGAGG | | |
| | | | | | | | | | | | UrCrCrUrGrArGr | | AGAAGTC | | |
| | | | | | | | | | | | GrArGrArArGrUr | | TGCC | | |
| | | | | | | | | | | | CrU*mG*mC*m | | | | |
| | | | | | | | | | | | C | | | | |
| HBB8_ | GTAACG | 19977 | GTTTTAGAG | 20067 | GAG | 20157 | TGGTGC | 20247 | GTAACGGCAGA | 20337 | mG*mU*mA*rAr | 20427 | GTAACGG | 20517 | +++ |
| RT20_ | GCAGA | | CTAGAAAT | | AAG | | ACCTGA | | CTTCTCCACGTT | | CrGrGrCrArGrAr | | CAGACTTC | | |
| PB | CTTCTC | | AGCAAGTT | | TCT | | CTCCTG | | TTAGAGCTAGAA | | CrUrUrCrUrCrCr | | TCCACGTT | | |
| S11 | CAC | | AAAATAAG | | GC | | AG | | ATAGCAAGTTAA | | ArCrGrUrUrUrUr | | TTAGAGCT | | |
| | | | GCTAGTCCG | | | | | | AATAAGGCTAGT | | ArGrArGrCrUrAr | | AGAAATA | | |
| | | | TTATCAACT | | | | | | CCGTTATCAACT | | GrArArArUrArGr | | GCAAGTT | | |
| | | | TGAAAAAG | | | | | | TGAAAAAGTGG | | CrArArGrUrUrAr | | AAAATAA | | |
| | | | TGGCACCG | | | | | | CACCGAGTCGGT | | ArArArUrArArGr | | GGCTAGT | | |
| | | | AGTCGGTG | | | | | | GCTGGTGCACCT | | GrCrUrArGrUrCr | | CCGTTATC | | |
| | | | C | | | | | | GACTCCTGAGGA | | CrGrUrUrArUrCr | | AACTTGA | | |
| | | | | | | | | | GAAGTCTGC | | ArArCrUrUrGrAr | | AAAAGTG | | |
| | | | | | | | | | | | ArArArArGrUrGr | | GCACCGA | | |
| | | | | | | | | | | | GrCrArCrCrGrAr | | GTCGGTG | | |
| | | | | | | | | | | | GrUrCrGrGrUrGr | | CTGGTGC | | |
| | | | | | | | | | | | CrUrGrGrUrGrCr | | ATCTGACT | | |
| | | | | | | | | | | | ArCrCrUrGrArCr | | CCTGAGG | | |
| | | | | | | | | | | | UrCrCrUrGrArGr | | AGAAGTC | | |
| | | | | | | | | | | | GrArGrArArGrUr | | TGC | | |
| | | | | | | | | | | | C*mU*mG*mC | | | | |
| HBB8_ | GTAACG | 19978 | GTTTTAGAG | 20068 | GAG | 20158 | TGGTGC | 20248 | GTAACGGCAGA | 20338 | mG*mU*mA*rAr | 20428 | GTAACGG | 20518 | ++ |
| RT20_PB | GCAGA | | CTAGAAAT | | AAG | | ACCTGA | | CTTCTCCACGTT | | CrGrGrCrArGrAr | | CAGACTTC | | |
| S10 | CTTCTC | | AGCAAGTT | | TCT | | CTCCTG | | TTAGAGCTAGAA | | CrUrUrCrUrCrCr | | TCCACGTT | | |
| | CAC | | AAAATAAG | | G | | AG | | ATAGCAAGTTAA | | ArCrGrUrUrUrUr | | TTAGAGCT | | |
| | | | GCTAGTCCG | | | | | | AATAAGGCTAGT | | ArGrArGrCrUrAr | | AGAAATA | | |
| | | | TTATCAACT | | | | | | CCGTTATCAACT | | GrArArArUrArGr | | GCAAGTT | | |
| | | | TGAAAAAG | | | | | | TGAAAAAGTGG | | CrArArGrUrUrAr | | AAAATAA | | |
| | | | TGGCACCG | | | | | | CACCGAGTCGGT | | ArArArUrArArGr | | GGCTAGT | | |
| | | | AGTCGGTG | | | | | | GCTGGTGCACCT | | GrCrUrArGrUrCr | | CCGTTATC | | |
| | | | C | | | | | | GACTCCTGAGGA | | CrGrUrUrArUrCr | | AACTTGA | | |
| | | | | | | | | | GAAGTCTG | | ArArCrUrUrGrAr | | AAAAGTG | | |
| | | | | | | | | | | | ArArArArGrUrGr | | GCACCGA | | |
| | | | | | | | | | | | GrCrArCrCrGrAr | | GTCGGTG | | |
| | | | | | | | | | | | GrUrCrGrGrUrGr | | CTGGTGC | | |
| | | | | | | | | | | | CrUrGrGrUrGrCr | | ATCTGACT | | |
| | | | | | | | | | | | ArCrCrUrGrArCr | | CCTGAGG | | |
| | | | | | | | | | | | UrCrCrUrGrArGr | | AGAAGTC | | |
| | | | | | | | | | | | GrArGrArArGrU* | | TG | | |
| | | | | | | | | | | | mC*mU*mG | | | | |
| HBB8_ | GTAACG | 19979 | GTTTTAGAG | 20069 | GAG | | TGGTGC | 20249 | GTAACGGCAGA | 20339 | mG*mU*mA*rAr | 20429 | GTAACGG | 20519 | ++ |
| RT20_PB | GCAGA | | CTAGAAAT | | AAG | | ACCTGA | | CTTCTCCACGTT | | CrGrGrCrArGrAr | | CAGACTTC | | |
| S9 | CTTCTC | | AGCAAGTT | | TCT | | CTCCTG | | TTAGAGCTAGAA | | CrUrUrCrUrCrCr | | TCCACGTT | | |
| | CAC | | AAAATAAG | | | | AG | | ATAGCAAGTTAA | | ArCrGrUrUrUrUr | | TTAGAGCT | | |
| | | | GCTAGTCCG | | | | | | AATAAGGCTAGT | | ArGrArGrCrUrAr | | AGAAATA | | |
| | | | TTATCAACT | | | | | | CCGTTATCAACT | | GrArArArUrArGr | | GCAAGTT | | |
| | | | TGAAAAAG | | | | | | TGAAAAAGTGG | | CrArArGrUrUrAr | | AAAATAA | | |
| | | | TGGCACCG | | | | | | CACCGAGTCGGT | | ArArArUrArArGr | | GGCTAGT | | |
| | | | AGTCGGTG | | | | | | GCTGGTGCACCT | | GrCrUrArGrUrCr | | CCGTTATC | | |
| | | | C | | | | | | GACTCCTGAGGA | | CrGrUrUrArUrCr | | AACTTGA | | |
| | | | | | | | | | GAAGTCT | | ArArCrUrUrGrAr | | AAAAGTG | | |
| | | | | | | | | | | | ArArArArGrUrGr | | GCACCGA | | |
| | | | | | | | | | | | GrCrArCrCrGrAr | | GTCGGTG | | |
| | | | | | | | | | | | GrUrCrGrGrUrGr | | CTGGTGC | | |
| | | | | | | | | | | | CrUrGrGrUrGrCr | | ATCTGACT | | |
| | | | | | | | | | | | ArCrCrUrGrArCr | | CCTGAGG | | |
| | | | | | | | | | | | UrCrCrUrGrArGr | | AGAAGTC | | |
| | | | | | | | | | | | GrArGrArArG*m | | T | | |
| | | | | | | | | | | | U*mC*mU | | | | |
| HBB8_ | GTAACG | 19980 | GTTTTAGAG | 20070 | GAG | | TGGTGC | 20250 | GTAACGGCAGA | 20340 | mG*mU*mA*rAr | 20430 | GTAACGG | 20520 | ++ |
| RT20_PB | GCAGA | | CTAGAAAT | | AAG | | ACCTGA | | CTTCTCCACGTT | | CrGrGrCrArGrAr | | CAGACTTC | | |
| S8 | CTTCTC | | AGCAAGTT | | TC | | CTCCTG | | TTAGAGCTAGAA | | CrUrUrCrUrCrCr | | TCCACGTT | | |
| | CAC | | AAAATAAG | | | | AG | | ATAGCAAGTTAA | | ArCrGrUrUrUrUr | | TTAGAGCT | | |
| | | | GCTAGTCCG | | | | | | AATAAGGCTAGT | | ArGrArGrCrUrAr | | AGAAATA | | |
| | | | TTATCAACT | | | | | | CCGTTATCAACT | | GrArArArUrArGr | | GCAAGTT | | |
| | | | TGAAAAAG | | | | | | TGAAAAAGTGG | | CrArArGrUrUrAr | | AAAATAA | | |
| | | | TGGCACCG | | | | | | CACCGAGTCGGT | | ArArArUrArArGr | | GGCTAGT | | |
| | | | AGTCGGTG | | | | | | GCTGGTGCACCT | | GrCrUrArGrUrCr | | CCGTTATC | | |
| | | | C | | | | | | GACTCCTGAGGA | | CrGrUrUrArUrCr | | AACTTGA | | |
| | | | | | | | | | GAAGTC | | ArArCrUrUrGrAr | | AAAAGTG | | |
| | | | | | | | | | | | ArArArArGrUrGr | | GCACCGA | | |
| | | | | | | | | | | | GrCrArCrCrGrAr | | GTCGGTG | | |
| | | | | | | | | | | | GrUrCrGrGrUrGr | | CTGGTGC | | |
| | | | | | | | | | | | CrUrGrGrUrGrCr | | ATCTGACT | | |
| | | | | | | | | | | | ArCrCrUrGrArCr | | CCTGAGG | | |
| | | | | | | | | | | | UrCrCrUrGrArGr | | AGAAGTC | | |
| | | | | | | | | | | | GrArGrArA*mG* | | | | |
| | | | | | | | | | | | mU*mC | | | | |
| HBB8_ | GTAACG | 19981 | GTTTTAGAG | 20071 | GAG | 20161 | GGTGCA | 20251 | GTAACGGCAGA | 20341 | mG*mU*mA*rAr | 20431 | GTAACGG | 20521 | + |
| RT19_ | GCAGA | | CTAGAAAT | | AAG | | CCTGAC | | CTTCTCCACGTT | | CrGrGrCrArGrAr | | CAGACTTC | | |
| PB | CTTCTC | | AGCAAGTT | | TCT | | TCCTGA | | TTAGAGCTAGAA | | CrUrUrCrUrCrCr | | TCCACGTT | | |
| S17 | CAC | | AAAATAAG | | GCC | | G | | ATAGCAAGTTAA | | ArCrGrUrUrUrUr | | TTAGAGCT | | |
| | | | GCTAGTCCG | | GTT | | | | AATAAGGCTAGT | | ArGrArGrCrUrAr | | AGAAATA | | |
| | | | TTATCAACT | | AC | | | | CCGTTATCAACT | | GrArArArUrArGr | | GCAAGTT | | |
| | | | TGAAAAAG | | | | | | TGAAAAAGTGG | | CrArArGrUrUrAr | | AAAATAA | | |
| | | | TGGCACCG | | | | | | CACCGAGTCGGT | | ArArArUrArArGr | | GGCTAGT | | |
| | | | AGTCGGTG | | | | | | GCGGTGCACCTG | | GrCrUrArGrUrCr | | CCGTTATC | | |
| | | | C | | | | | | ACTCCTGAGGAG | | CrGrUrUrArUrCr | | AACTTGA | | |
| | | | | | | | | | AAGTCTGCCGTT | | ArArCrUrUrGrAr | | AAAAGTG | | |
| | | | | | | | | | AC | | ArArArArGrUrGr | | GCACCGA | | |
| | | | | | | | | | | | GrCrArCrCrGrAr | | GTCGGTG | | |
| | | | | | | | | | | | GrUrCrGrGrUrGr | | CGGTGCA | | |
| | | | | | | | | | | | CrGrGrUrGrCrAr | | TCTGACTC | | |
| | | | | | | | | | | | CrCrUrGrArCrUr | | CTGAGGA | | |
| | | | | | | | | | | | CrCrUrGrArGrGr | | GAAGTCT | | |
| | | | | | | | | | | | ArGrArArGrUrCr | | GCCGTTAC | | |
| | | | | | | | | | | | UrGrCrCrGrU*m | | | | |
| | | | | | | | | | | | U*mA*mC | | | | |
| HBB8_ | GTAACG | 19982 | GTTTTAGAG | 20072 | GAG | 20162 | GGTGCA | 20252 | GTAACGGCAGA | 20342 | mG*mU*mA*rAr | 20432 | GTAACGG | 20522 | + |
| RT19_ | GCAGA | | CTAGAAAT | | AAG | | CCTGAC | | CTTCTCCACGTT | | CrGrGrCrArGrAr | | CAGACTTC | | |
| PB | CTTCTC | | AGCAAGTT | | TCT | | TCCTGA | | TTAGAGCTAGAA | | CrUrUrCrUrCrCr | | TCCACGTT | | |
| S16 | CAC | | AAAATAAG | | GCC | | G | | ATAGCAAGTTAA | | ArCrGrUrUrUrUr | | TTAGAGCT | | |
| | | | GCTAGTCCG | | GTT | | | | AATAAGGCTAGT | | ArGrArGrCrUrAr | | AGAAATA | | |
| | | | TTATCAACT | | A | | | | CCGTTATCAACT | | GrArArArUrArGr | | GCAAGTT | | |
| | | | TGAAAAAG | | | | | | TGAAAAAGTGG | | CrArArGrUrUrAr | | AAAATAA | | |
| | | | TGGCACCG | | | | | | CACCGAGTCGGT | | ArArArUrArArGr | | GGCTAGT | | |
| | | | AGTCGGTG | | | | | | GCGGTGCACCTG | | GrCrUrArGrUrCr | | CCGTTATC | | |
| | | | C | | | | | | ACTCCTGAGGAG | | CrGrUrUrArUrCr | | AACTTGA | | |
| | | | | | | | | | AAGTCTGCCGTT | | ArArCrUrUrGrAr | | AAAAGTG | | |
| | | | | | | | | | A | | ArArArArGrUrGr | | GCACCGA | | |
| | | | | | | | | | | | GrCrArCrCrGrAr | | GTCGGTG | | |
| | | | | | | | | | | | GrUrCrGrGrUrGr | | CGGTGCA | | |
| | | | | | | | | | | | CrGrGrUrGrCrAr | | TCTGACTC | | |
| | | | | | | | | | | | CrCrUrGrArCrUr | | CTGAGGA | | |
| | | | | | | | | | | | CrCrUrGrArGrGr | | GAAGTCT | | |
| | | | | | | | | | | | ArGrArArGrUrCr | | GCCGTTA | | |
| | | | | | | | | | | | UrGrCrCrG*mU* | | | | |
| | | | | | | | | | | | mU*mA | | | | |
| HBB8_ | GTAACG | 19983 | GTTTTAGAG | 20073 | GAG | 20163 | GGTGCA | 20253 | GTAACGGCAGA | 20343 | mG*mU*mA*rAr | 20433 | GTAACGG | 20523 | + |
| RT19_ | GCAGA | | CTAGAAAT | | AAG | | CCTGAC | | CTTCTCCACGTT | | CrGrGrCrArGrAr | | CAGACTTC | | |
| PB | CTTCTC | | AGCAAGTT | | TCT | | TCCTGA | | TTAGAGCTAGAA | | CrUrUrCrUrCrCr | | TCCACGTT | | |
| S15 | CAC | | AAAATAAG | | GCC | | G | | ATAGCAAGTTAA | | ArCrGrUrUrUrUr | | TTAGAGCT | | |
| | | | GCTAGTCCG | | GTT | | | | AATAAGGCTAGT | | ArGrArGrCrUrAr | | AGAAATA | | |
| | | | TTATCAACT | | | | | | CCGTTATCAACT | | GrArArArUrArGr | | GCAAGTT | | |
| | | | TGAAAAAG | | | | | | TGAAAAAGTGG | | CrArArGrUrUrAr | | AAAATAA | | |
| | | | TGGCACCG | | | | | | CACCGAGTCGGT | | ArArArUrArArGr | | GGCTAGT | | |
| | | | AGTCGGTG | | | | | | GCGGTGCACCTG | | GrCrUrArGrUrCr | | CCGTTATC | | |
| | | | C | | | | | | ACTCCTGAGGAG | | CrGrUrUrArUrCr | | AACTTGA | | |
| | | | | | | | | | AAGTCTGCCGTT | | ArArCrUrUrGrAr | | AAAAGTG | | |
| | | | | | | | | | | | ArArArArGrUrGr | | GCACCGA | | |
| | | | | | | | | | | | GrCrArCrCrGrAr | | GTCGGTG | | |
| | | | | | | | | | | | GrUrCrGrGrUrGr | | CGGTGCA | | |
| | | | | | | | | | | | CrGrGrUrGrCrAr | | TCTGACTC | | |
| | | | | | | | | | | | CrCrUrGrArCrUr | | CTGAGGA | | |
| | | | | | | | | | | | CrCrUrGrArGrGr | | GAAGTCT | | |
| | | | | | | | | | | | ArGrArArGrUrCr | | GCCGTT | | |
| | | | | | | | | | | | UrGrCrC*mG*m | | | | |
| | | | | | | | | | | | U*mU | | | | |
| HBB8_ | GTAACG | 19984 | GTTTTAGAG | 20074 | GAG | 20164 | GGTGCA | 20254 | GTAACGGCAGA | 20344 | mG*mU*mA*rAr | 20434 | GTAACGG | 20524 | + |
| RT19_ | GCAGA | | CTAGAAAT | | AAG | | CCTGAC | | CTTCTCCACGTT | | CrGrGrCrArGrAr | | CAGACTTC | | |
| PB | CTTCTC | | AGCAAGTT | | TCT | | TCCTGA | | TTAGAGCTAGAA | | CrUrUrCrUrCrCr | | TCCACGTT | | |
| S14 | CAC | | AAAATAAG | | GCC | | G | | ATAGCAAGTTAA | | ArCrGrUrUrUrUr | | TTAGAGCT | | |
| | | | GCTAGTCCG | | GT | | | | AATAAGGCTAGT | | ArGrArGrCrUrAr | | AGAAATA | | |
| | | | TTATCAACT | | | | | | CCGTTATCAACT | | GrArArArUrArGr | | GCAAGTT | | |
| | | | TGAAAAAG | | | | | | TGAAAAAGTGG | | CrArArGrUrUrAr | | AAAATAA | | |
| | | | TGGCACCG | | | | | | CACCGAGTCGGT | | ArArArUrArArGr | | GGCTAGT | | |
| | | | AGTCGGTG | | | | | | GCGGTGCACCTG | | GrCrUrArGrUrCr | | CCGTTATC | | |
| | | | C | | | | | | ACTCCTGAGGAG | | CrGrUrUrArUrCr | | AACTTGA | | |
| | | | | | | | | | AAGTCTGCCGT | | ArArCrUrUrGrAr | | AAAAGTG | | |
| | | | | | | | | | | | ArArArArGrUrGr | | GCACCGA | | |
| | | | | | | | | | | | GrCrArCrCrGrAr | | GTCGGTG | | |
| | | | | | | | | | | | GrUrCrGrGrUrGr | | CGGTGCA | | |
| | | | | | | | | | | | CrGrGrUrGrCrAr | | TCTGACTC | | |
| | | | | | | | | | | | CrCrUrGrArCrUr | | CTGAGGA | | |
| | | | | | | | | | | | CrCrUrGrArGrGr | | GAAGTCT | | |
| | | | | | | | | | | | ArGrArArGrUrCr | | GCCGT | | |
| | | | | | | | | | | | UrGrC*mC*mG* | | | | |
| | | | | | | | | | | | mU | | | | |
| HBB8_ | GTAACG | 19985 | GTTTTAGAG | 20075 | GAG | 20165 | GGTGCA | 20255 | GTAACGGCAGA | 20345 | mG*mU*mA*rAr | 20435 | GTAACGG | 20525 | ++ |
| RT19_ | GCAGA | | CTAGAAAT | | AAG | | CCTGAC | | CTTCTCCACGTT | | CrGrGrCrArGrAr | | CAGACTTC | | |
| PB | CTTCTC | | AGCAAGTT | | TCT | | TCCTGA | | TTAGAGCTAGAA | | CrUrUrCrUrCrCr | | TCCACGTT | | |
| S13 | CAC | | AAAATAAG | | GCC | | G | | ATAGCAAGTTAA | | ArCrGrUrUrUrUr | | TTAGAGCT | | |
| | | | GCTAGTCCG | | G | | | | AATAAGGCTAGT | | ArGrArGrCrUrAr | | AGAAATA | | |
| | | | TTATCAACT | | | | | | CCGTTATCAACT | | GrArArArUrArGr | | GCAAGTT | | |
| | | | TGAAAAAG | | | | | | TGAAAAAGTGG | | CrArArGrUrUrAr | | AAAATAA | | |
| | | | TGGCACCG | | | | | | CACCGAGTCGGT | | ArArArUrArArGr | | GGCTAGT | | |
| | | | AGTCGGTG | | | | | | GCGGTGCACCTG | | GrCrUrArGrUrCr | | CCGTTATC | | |
| | | | C | | | | | | ACTCCTGAGGAG | | CrGrUrUrArUrCr | | AACTTGA | | |
| | | | | | | | | | AAGTCTGCCG | | ArArCrUrUrGrAr | | AAAAGTG | | |
| | | | | | | | | | | | ArArArArGrUrGr | | GCACCGA | | |
| | | | | | | | | | | | GrCrArCrCrGrAr | | GTCGGTG | | |
| | | | | | | | | | | | GrUrCrGrGrUrGr | | CGGTGCA | | |
| | | | | | | | | | | | CrGrGrUrGrCrAr | | TCTGACTC | | |
| | | | | | | | | | | | CrCrUrGrArCrUr | | CTGAGGA | | |
| | | | | | | | | | | | CrCrUrGrArGrGr | | GAAGTCT | | |
| | | | | | | | | | | | ArGrArArGrUrCr | | GCCG | | |
| | | | | | | | | | | | UrG*mC*mC*m | | | | |
| | | | | | | | | | | | G | | | | |
| HBB8_ | GTAACG | 19986 | GTTTTAGAG | 20076 | GAG | 20166 | GGTGCA | 20256 | GTAACGGCAGA | 20346 | mG*mU*mA*rAr | 20436 | GTAACGG | 20526 | ++ |
| RT19_ | GCAGA | | CTAGAAAT | | AAG | | CCTGAC | | CTTCTCCACGTT | | CrGrGrCrArGrAr | | CAGACTTC | | |
| PB | CTTCTC | | AGCAAGTT | | TCT | | TCCTGA | | TTAGAGCTAGAA | | CrUrUrCrUrCrCr | | TCCACGTT | | |
| S12 | CAC | | AAAATAAG | | GCC | | G | | ATAGCAAGTTAA | | ArCrGrUrUrUrUr | | TTAGAGCT | | |
| | | | GCTAGTCCG | | | | | | AATAAGGCTAGT | | ArGrArGrCrUrAr | | AGAAATA | | |
| | | | TTATCAACT | | | | | | CCGTTATCAACT | | GrArArArUrArGr | | GCAAGTT | | |
| | | | TGAAAAAG | | | | | | TGAAAAAGTGG | | CrArArGrUrUrAr | | AAAATAA | | |
| | | | TGGCACCG | | | | | | CACCGAGTCGGT | | ArArArUrArArGr | | GGCTAGT | | |
| | | | AGTCGGTG | | | | | | GCGGTGCACCTG | | GrCrUrArGrUrCr | | CCGTTATC | | |
| | | | C | | | | | | ACTCCTGAGGAG | | CrGrUrUrArUrCr | | AACTTGA | | |
| | | | | | | | | | AAGTCTGCC | | ArArCrUrUrGrAr | | AAAAGTG | | |
| | | | | | | | | | | | ArArArArGrUrGr | | GCACCGA | | |
| | | | | | | | | | | | GrCrArCrCrGrAr | | GTCGGTG | | |
| | | | | | | | | | | | GrUrCrGrGrUrGr | | CGGTGCA | | |
| | | | | | | | | | | | CrGrGrUrGrCrAr | | TCTGACTC | | |
| | | | | | | | | | | | CrCrUrGrArCrUr | | CTGAGGA | | |
| | | | | | | | | | | | CrCrUrGrArGrGr | | GAAGTCT | | |
| | | | | | | | | | | | ArGrArArGrUrCr | | GCC | | |
| | | | | | | | | | | | U*mG*mC*mC | | | | |
| HBB8_ | GTAACG | 19987 | GTTTTAGAG | 20077 | GAG | 20167 | GGTGCA | 20257 | GTAACGGCAGA | 20347 | mG*mU*mA*rAr | 20437 | GTAACGG | 20527 | +++ |
| RT19_ | GCAGA | | CTAGAAAT | | AAG | | CCTGAC | | CTTCTCCACGTT | | CrGrGrCrArGrAr | | CAGACTTC | | |
| PB | CTTCTC | | AGCAAGTT | | TCT | | TCCTGA | | TTAGAGCTAGAA | | CrUrUrCrUrCrCr | | TCCACGTT | | |
| S11 | CAC | | AAAATAAG | | GC | | G | | ATAGCAAGTTAA | | ArCrGrUrUrUrUr | | TTAGAGCT | | |
| | | | GCTAGTCCG | | | | | | AATAAGGCTAGT | | ArGrArGrCrUrAr | | AGAAATA | | |
| | | | TTATCAACT | | | | | | CCGTTATCAACT | | GrArArArUrArGr | | GCAAGTT | | |
| | | | TGAAAAAG | | | | | | TGAAAAAGTGG | | CrArArGrUrUrAr | | AAAATAA | | |
| | | | TGGCACCG | | | | | | CACCGAGTCGGT | | ArArArUrArArGr | | GGCTAGT | | |
| | | | AGTCGGTG | | | | | | GCGGTGCACCTG | | GrCrUrArGrUrCr | | CCGTTATC | | |
| | | | C | | | | | | ACTCCTGAGGAG | | CrGrUrUrArUrCr | | AACTTGA | | |
| | | | | | | | | | AAGTCTGC | | ArArCrUrUrGrAr | | AAAAGTG | | |
| | | | | | | | | | | | ArArArArGrUrGr | | GCACCGA | | |
| | | | | | | | | | | | GrCrArCrCrGrAr | | GTCGGTG | | |
| | | | | | | | | | | | GrUrCrGrGrUrGr | | CGGTGCA | | |
| | | | | | | | | | | | CrGrGrUrGrCrAr | | TCTGACTC | | |
| | | | | | | | | | | | CrCrUrGrArCrUr | | CTGAGGA | | |
| | | | | | | | | | | | CrCrUrGrArGrGr | | GAAGTCT | | |
| | | | | | | | | | | | ArGrArArGrUrC* | | GC | | |
| | | | | | | | | | | | mU*mG*mC | | | | |
| HBB8_ | GTAACG | 19988 | GTTTTAGAG | 20078 | GAG | 20168 | GGTGCA | 20258 | GTAACGGCAGA | 20348 | mG*mU*mA*rAr | 20438 | GTAACGG | 20528 | ++ |
| RT19_ | GCAGA | | CTAGAAAT | | AAG | | CCTGAC | | CTTCTCCACGTT | | CrGrGrCrArGrAr | | CAGACTTC | | |
| PB | CTTCTC | | AGCAAGTT | | TCT | | TCCTGA | | TTAGAGCTAGAA | | CrUrUrCrUrCrCr | | TCCACGTT | | |
| S10 | CAC | | AAAATAAG | | G | | G | | ATAGCAAGTTAA | | ArCrGrUrUrUrUr | | TTAGAGCT | | |
| | | | GCTAGTCCG | | | | | | AATAAGGCTAGT | | ArGrArGrCrUrAr | | AGAAATA | | |
| | | | TTATCAACT | | | | | | CCGTTATCAACT | | GrArArArUrArGr | | GCAAGTT | | |
| | | | TGAAAAAG | | | | | | TGAAAAAGTGG | | CrArArGrUrUrAr | | AAAATAA | | |
| | | | TGGCACCG | | | | | | CACCGAGTCGGT | | ArArArUrArArGr | | GGCTAGT | | |
| | | | AGTCGGTG | | | | | | GCGGTGCACCTG | | GrCrUrArGrUrCr | | CCGTTATC | | |
| | | | C | | | | | | ACTCCTGAGGAG | | CrGrUrUrArUrCr | | AACTTGA | | |
| | | | | | | | | | AAGTCTG | | ArArCrUrUrGrAr | | AAAAGTG | | |
| | | | | | | | | | | | ArArArArGrUrGr | | GCACCGA | | |
| | | | | | | | | | | | GrCrArCrCrGrAr | | GTCGGTG | | |
| | | | | | | | | | | | GrUrCrGrGrUrGr | | CGGTGCA | | |
| | | | | | | | | | | | CrGrGrUrGrCrAr | | TCTGACTC | | |
| | | | | | | | | | | | CrCrUrGrArCrUr | | CTGAGGA | | |
| | | | | | | | | | | | CrCrUrGrArGrGr | | GAAGTCT | | |
| | | | | | | | | | | | ArGrArArGrU*m | | G | | |
| | | | | | | | | | | | C*mU*mG | | | | |
| HBB8_ | GTAACG | 19989 | GTTTTAGAG | 20079 | GAG | | GGTGCA | 20259 | GTAACGGCAGA | 20349 | mG*mU*mA*rAr | 20439 | GTAACGG | 20529 | ++ |
| RT19_ | GCAGA | | CTAGAAAT | | AAG | | CCTGAC | | CTTCTCCACGTT | | CrGrGrCrArGrAr | | CAGACTTC | | |
| PB | CTTCTC | | AGCAAGTT | | TCT | | TCCTGA | | TTAGAGCTAGAA | | CrUrUrCrUrCrCr | | TCCACGTT | | |
| S9 | CAC | | AAAATAAG | | | | G | | ATAGCAAGTTAA | | ArCrGrUrUrUrUr | | TTAGAGCT | | |
| | | | GCTAGTCCG | | | | | | AATAAGGCTAGT | | ArGrArGrCrUrAr | | AGAAATA | | |
| | | | TTATCAACT | | | | | | CCGTTATCAACT | | GrArArArUrArGr | | GCAAGTT | | |
| | | | TGAAAAAG | | | | | | TGAAAAAGTGG | | CrArArGrUrUrAr | | AAAATAA | | |
| | | | TGGCACCG | | | | | | CACCGAGTCGGT | | ArArArUrArArGr | | GGCTAGT | | |
| | | | AGTCGGTG | | | | | | GCGGTGCACCTG | | GrCrUrArGrUrCr | | CCGTTATC | | |
| | | | C | | | | | | ACTCCTGAGGAG | | CrGrUrUrArUrCr | | AACTTGA | | |
| | | | | | | | | | AAGTCT | | ArArCrUrUrGrAr | | AAAAGTG | | |
| | | | | | | | | | | | ArArArArGrUrGr | | GCACCGA | | |
| | | | | | | | | | | | GrCrArCrCrGrAr | | GTCGGTG | | |
| | | | | | | | | | | | GrUrCrGrGrUrGr | | CGGTGCA | | |
| | | | | | | | | | | | CrGrGrUrGrCrAr | | TCTGACTC | | |
| | | | | | | | | | | | CrCrUrGrArCrUr | | CTGAGGA | | |
| | | | | | | | | | | | CrCrUrGrArGrGr | | GAAGTCT | | |
| | | | | | | | | | | | ArGrArArG*mU* | | | | |
| | | | | | | | | | | | mC*mU | | | | |
| HBB8_ | GTAACG | 19990 | GTTTTAGAG | 20080 | GAG | | GGTGCA | 20260 | GTAACGGCAGA | 20350 | mG*mU*mA*rAr | 20440 | GTAACGG | 20530 | ++ |
| RT19_ | GCAGA | | CTAGAAAT | | AAG | | CCTGAC | | CTTCTCCACGTT | | CrGrGrCrArGrAr | | CAGACTTC | | |
| PB | CTTCTC | | AGCAAGTT | | TC | | TCCTGA | | TTAGAGCTAGAA | | CrUrUrCrUrCrCr | | TCCACGTT | | |
| S8 | CAC | | AAAATAAG | | | | G | | ATAGCAAGTTAA | | ArCrGrUrUrUrUr | | TTAGAGCT | | |
| | | | GCTAGTCCG | | | | | | AATAAGGCTAGT | | ArGrArGrCrUrAr | | AGAAATA | | |
| | | | TTATCAACT | | | | | | CCGTTATCAACT | | GrArArArUrArGr | | GCAAGTT | | |
| | | | TGAAAAAG | | | | | | TGAAAAAGTGG | | CrArArGrUrUrAr | | AAAATAA | | |
| | | | TGGCACCG | | | | | | CACCGAGTCGGT | | ArArArUrArArGr | | GGCTAGT | | |
| | | | AGTCGGTG | | | | | | GCGGTGCACCTG | | GrCrUrArGrUrCr | | CCGTTATC | | |
| | | | C | | | | | | ACTCCTGAGGAG | | CrGrUrUrArUrCr | | AACTTGA | | |
| | | | | | | | | | AAGTC | | ArArCrUrUrGrAr | | AAAAGTG | | |
| | | | | | | | | | | | ArArArArGrUrGr | | GCACCGA | | |
| | | | | | | | | | | | GrCrArCrCrGrAr | | GTCGGTG | | |
| | | | | | | | | | | | GrUrCrGrGrUrGr | | CGGTGCA | | |
| | | | | | | | | | | | CrGrGrUrGrCrAr | | TCTGACTC | | |
| | | | | | | | | | | | CrCrUrGrArCrUr | | CTGAGGA | | |
| | | | | | | | | | | | CrCrUrGrArGrGr | | GAAGTC | | |
| | | | | | | | | | | | ArGrArA*mG*m | | | | |
| | | | | | | | | | | | U*mC | | | | |
| HBB8_ | GTAACG | 19991 | GTTTTAGAG | 20081 | GAG | 20171 | GTGCAC | 20261 | GTAACGGCAGA | 20351 | mG*mU*mA*rAr | 20441 | GTAACGG | 20531 | + |
| RT18_ | GCAGA | | CTAGAAAT | | AAG | | CTGACT | | CTTCTCCACGTT | | CrGrGrCrArGrAr | | CAGACTTC | | |
| PB | CTTCTC | | AGCAAGTT | | TCT | | CCTGAG | | TTAGAGCTAGAA | | CrUrUrCrUrCrCr | | TCCACGTT | | |
| S17 | CAC | | AAAATAAG | | GCC | | | | ATAGCAAGTTAA | | ArCrGrUrUrUrUr | | TTAGAGCT | | |
| | | | GCTAGTCCG | | GTT | | | | AATAAGGCTAGT | | ArGrArGrCrUrAr | | AGAAATA | | |
| | | | TTATCAACT | | AC | | | | CCGTTATCAACT | | GrArArArUrArGr | | GCAAGTT | | |
| | | | TGAAAAAG | | | | | | TGAAAAAGTGG | | CrArArGrUrUrAr | | AAAATAA | | |
| | | | TGGCACCG | | | | | | CACCGAGTCGGT | | ArArArUrArArGr | | GGCTAGT | | |
| | | | AGTCGGTG | | | | | | GCGTGCACCTGA | | GrCrUrArGrUrCr | | CCGTTATC | | |
| | | | C | | | | | | CTCCTGAGGAGA | | CrGrUrUrArUrCr | | AACTTGA | | |
| | | | | | | | | | AGTCTGCCGTTA | | ArArCrUrUrGrAr | | AAAAGTG | | |
| | | | | | | | | | C | | ArArArArGrUrGr | | GCACCGA | | |
| | | | | | | | | | | | GrCrArCrCrGrAr | | GTCGGTG | | |
| | | | | | | | | | | | GrUrCrGrGrUrGr | | CGTGCATC | | |
| | | | | | | | | | | | CrGrUrGrCrArCr | | TGACTCCT | | |
| | | | | | | | | | | | CrUrGrArCrUrCr | | GAGGAGA | | |
| | | | | | | | | | | | CrUrGrArGrGrAr | | AGTCTGCC | | |
| | | | | | | | | | | | GrArArGrUrCrUr | | GTTAC | | |
| | | | | | | | | | | | GrCrCrGrU*mU* | | | | |
| | | | | | | | | | | | mA*mC | | | | |
| HBB8_ | GTAACG | 19992 | GTTTTAGAG | 20082 | GAG | 20172 | GTGCAC | 20262 | GTAACGGCAGA | 20352 | mG*mU*mA*rAr | 20442 | GTAACGG | 20532 | ++ |
| RT18_ | GCAGA | | CTAGAAAT | | AAG | | CTGACT | | CTTCTCCACGTT | | CrGrGrCrArGrAr | | CAGACTTC | | |
| PB | CTTCTC | | AGCAAGTT | | TCT | | CCTGAG | | TTAGAGCTAGAA | | CrUrUrCrUrCrCr | | TCCACGTT | | |
| S16 | CAC | | AAAATAAG | | GCC | | | | ATAGCAAGTTAA | | ArCrGrUrUrUrUr | | TTAGAGCT | | |
| | | | GCTAGTCCG | | GTT | | | | AATAAGGCTAGT | | ArGrArGrCrUrAr | | AGAAATA | | |
| | | | TTATCAACT | | A | | | | CCGTTATCAACT | | GrArArArUrArGr | | GCAAGTT | | |
| | | | TGAAAAAG | | | | | | TGAAAAAGTGG | | CrArArGrUrUrAr | | AAAATAA | | |
| | | | TGGCACCG | | | | | | CACCGAGTCGGT | | ArArArUrArArGr | | GGCTAGT | | |
| | | | AGTCGGTG | | | | | | GCGTGCACCTGA | | GrCrUrArGrUrCr | | CCGTTATC | | |
| | | | C | | | | | | CTCCTGAGGAGA | | CrGrUrUrArUrCr | | AACTTGA | | |
| | | | | | | | | | AGTCTGCCGTTA | | ArArCrUrUrGrAr | | AAAAGTG | | |
| | | | | | | | | | | | ArArArArGrUrGr | | GCACCGA | | |
| | | | | | | | | | | | GrCrArCrCrGrAr | | GTCGGTG | | |
| | | | | | | | | | | | GrUrCrGrGrUrGr | | CGTGCATC | | |
| | | | | | | | | | | | CrGrUrGrCrArCr | | TGACTCCT | | |
| | | | | | | | | | | | CrUrGrArCrUrCr | | GAGGAGA | | |
| | | | | | | | | | | | CrUrGrArGrGrAr | | AGTCTGCC | | |
| | | | | | | | | | | | GrArArGrUrCrUr | | GTTA | | |
| | | | | | | | | | | | GrCrCrG*mU*m | | | | |
| | | | | | | | | | | | U*mA | | | | |
| HBB8_ | GTAACG | 19993 | GTTTTAGAG | 20083 | GAG | 20173 | GTGCAC | 20263 | GTAACGGCAGA | 20353 | mG*mU*mA*rAr | 20443 | GTAACGG | 20533 | ++ |
| RT18_ | GCAGA | | CTAGAAAT | | AAG | | CTGACT | | CTTCTCCACGTT | | CrGrGrCrArGrAr | | CAGACTTC | | |
| PB | CTTCTC | | AGCAAGTT | | TCT | | CCTGAG | | TTAGAGCTAGAA | | CrUrUrCrUrCrCr | | TCCACGTT | | |
| S15 | CAC | | AAAATAAG | | GCC | | | | ATAGCAAGTTAA | | ArCrGrUrUrUrUr | | TTAGAGCT | | |
| | | | GCTAGTCCG | | GTT | | | | AATAAGGCTAGT | | ArGrArGrCrUrAr | | AGAAATA | | |
| | | | TTATCAACT | | | | | | CCGTTATCAACT | | GrArArArUrArGr | | GCAAGTT | | |
| | | | TGAAAAAG | | | | | | TGAAAAAGTGG | | CrArArGrUrUrAr | | AAAATAA | | |
| | | | TGGCACCG | | | | | | CACCGAGTCGGT | | ArArArUrArArGr | | GGCTAGT | | |
| | | | AGTCGGTG | | | | | | GCGTGCACCTGA | | GrCrUrArGrUrCr | | CCGTTATC | | |
| | | | C | | | | | | CTCCTGAGGAGA | | CrGrUrUrArUrCr | | AACTTGA | | |
| | | | | | | | | | AGTCTGCCGTT | | ArArCrUrUrGrAr | | AAAAGTG | | |
| | | | | | | | | | | | ArArArArGrUrGr | | GCACCGA | | |
| | | | | | | | | | | | GrCrArCrCrGrAr | | GTCGGTG | | |
| | | | | | | | | | | | GrUrCrGrGrUrGr | | CGTGCATC | | |
| | | | | | | | | | | | CrGrUrGrCrArCr | | TGACTCCT | | |
| | | | | | | | | | | | CrUrGrArCrUrCr | | GAGGAGA | | |
| | | | | | | | | | | | CrUrGrArGrGrAr | | AGTCTGCC | | |
| | | | | | | | | | | | GrArArGrUrCrUr | | GTT | | |
| | | | | | | | | | | | GrCrC*mG*mU* | | | | |
| | | | | | | | | | | | mU | | | | |
| HBB8_ | GTAACG | 19994 | GTTTTAGAG | 20084 | GAG | 20174 | GTGCAC | 20264 | GTAACGGCAGA | 20354 | mG*mU*mA*rAr | 20444 | GTAACGG | 20534 | ++ |
| RT18_ | GCAGA | | CTAGAAAT | | AAG | | CTGACT | | CTTCTCCACGTT | | CrGrGrCrArGrAr | | CAGACTTC | | |
| PBS14 | CTTCTC | | AGCAAGTT | | TCT | | CCTGAG | | TTAGAGCTAGAA | | CrUrUrCrUrCrCr | | TCCACGTT | | |
| | CAC | | AAAATAAG | | GCC | | | | ATAGCAAGTTAA | | ArCrGrUrUrUrUr | | TTAGAGCT | | |
| | | | GCTAGTCCG | | GT | | | | AATAAGGCTAGT | | ArGrArGrCrUrAr | | AGAAATA | | |
| | | | TTATCAACT | | | | | | CCGTTATCAACT | | GrArArArUrArGr | | GCAAGTT | | |
| | | | TGAAAAAG | | | | | | TGAAAAAGTGG | | CrArArGrUrUrAr | | AAAATAA | | |
| | | | TGGCACCG | | | | | | CACCGAGTCGGT | | ArArArUrArArGr | | GGCTAGT | | |
| | | | AGTCGGTG | | | | | | GCGTGCACCTGA | | GrCrUrArGrUrCr | | CCGTTATC | | |
| | | | C | | | | | | CTCCTGAGGAGA | | CrGrUrUrArUrCr | | AACTTGA | | |
| | | | | | | | | | AGTCTGCCGT | | ArArCrUrUrGrAr | | AAAAGTG | | |
| | | | | | | | | | | | ArArArArGrUrGr | | GCACCGA | | |
| | | | | | | | | | | | GrCrArCrCrGrAr | | GTCGGTG | | |
| | | | | | | | | | | | GrUrCrGrGrUrGr | | CGTGCATC | | |
| | | | | | | | | | | | CrGrUrGrCrArCr | | TGACTCCT | | |
| | | | | | | | | | | | CrUrGrArCrUrCr | | GAGGAGA | | |
| | | | | | | | | | | | CrUrGrArGrGrAr | | AGTCTGCC | | |
| | | | | | | | | | | | GrArArGrUrCrUr | | GT | | |
| | | | | | | | | | | | GrC*mC*mG*m | | | | |
| | | | | | | | | | | | U | | | | |
| HBB8_ | GTAACG | 19995 | GTTTTAGAG | 20085 | GAG | 20175 | GTGCAC | 20265 | GTAACGGCAGA | 20355 | mG*mU*mA*rAr | 20445 | GTAACGG | 20535 | ++ |
| RT18_ | GCAGA | | CTAGAAAT | | AAG | | CTGACT | | CTTCTCCACGTT | | CrGrGrCrArGrAr | | CAGACTTC | | |
| PBS13 | CTTCTC | | AGCAAGTT | | TCT | | CCTGAG | | TTAGAGCTAGAA | | CrUrUrCrUrCrCr | | TCCACGTT | | |
| | CAC | | AAAATAAG | | GCC | | | | ATAGCAAGTTAA | | ArCrGrUrUrUrUr | | TTAGAGCT | | |
| | | | GCTAGTCCG | | G | | | | AATAAGGCTAGT | | ArGrArGrCrUrAr | | AGAAATA | | |
| | | | TTATCAACT | | | | | | CCGTTATCAACT | | GrArArArUrArGr | | GCAAGTT | | |
| | | | TGAAAAAG | | | | | | TGAAAAAGTGG | | CrArArGrUrUrAr | | AAAATAA | | |
| | | | TGGCACCG | | | | | | CACCGAGTCGGT | | ArArArUrArArGr | | GGCTAGT | | |
| | | | AGTCGGTG | | | | | | GCGTGCACCTGA | | GrCrUrArGrUrCr | | CCGTTATC | | |
| | | | C | | | | | | CTCCTGAGGAGA | | CrGrUrUrArUrCr | | AACTTGA | | |
| | | | | | | | | | AGTCTGCCG | | ArArCrUrUrGrAr | | AAAAGTG | | |
| | | | | | | | | | | | ArArArArGrUrGr | | GCACCGA | | |
| | | | | | | | | | | | GrCrArCrCrGrAr | | GTCGGTG | | |
| | | | | | | | | | | | CrGrUrGrCrArCr | | TGACTCCT | | |
| | | | | | | | | | | | CrUrGrArCrUrCr | | GAGGAGA | | |
| | | | | | | | | | | | CrUrGrArGrGrAr | | AGTCTGCC | | |
| | | | | | | | | | | | GrArArGrUrCrUr | | G | | |
| | | | | | | | | | | | G*mC*mC*mG | | | | |
| HBB8_ | GTAACG | 19996 | GTTTTAGAG | 20086 | GAG | 20176 | GTGCAC | 20266 | GTAACGGCAGA | 20356 | mG*mU*mA*rAr | 20446 | GTAACGG | 20536 | +++ |
| RT1 | GCAGA | | CTAGAAAT | | AAG | | CTGACT | | CTTCTCCACGTT | | CrGrGrCrArGrAr | | CAGACTTC | | |
| 8_PB | CTTCTC | | AGCAAGTT | | TCT | | CCTGAG | | TTAGAGCTAGAA | | CrUrUrCrUrCrCr | | TCCACGTT | | |
| S12 | CAC | | AAAATAAG | | GCC | | | | ATAGCAAGTTAA | | ArCrGrUrUrUrUr | | TTAGAGCT | | |
| | | | GCTAGTCCG | | | | | | AATAAGGCTAGT | | ArGrArGrCrUrAr | | AGAAATA | | |
| | | | TTATCAACT | | | | | | CCGTTATCAACT | | GrArArArUrArGr | | GCAAGTT | | |
| | | | TGAAAAAG | | | | | | TGAAAAAGTGG | | CrArArGrUrUrAr | | AAAATAA | | |
| | | | TGGCACCG | | | | | | CACCGAGTCGGT | | ArArArUrArArGr | | GGCTAGT | | |
| | | | AGTCGGTG | | | | | | GCGTGCACCTGA | | GrCrUrArGrUrCr | | CCGTTATC | | |
| | | | C | | | | | | CTCCTGAGGAGA | | CrGrUrUrArUrCr | | AACTTGA | | |
| | | | | | | | | | AGTCTGCC | | ArArCrUrUrGrAr | | AAAAGTG | | |
| | | | | | | | | | | | ArArArArGrUrGr | | GCACCGA | | |
| | | | | | | | | | | | GrCrArCrCrGrAr | | GTCGGTG | | |
| | | | | | | | | | | | GrUrCrGrGrUrGr | | CGTGCATC | | |
| | | | | | | | | | | | CrGrUrGrCrArCr | | TGACTCCT | | |
| | | | | | | | | | | | CrUrGrArCrUrCr | | GAGGAGA | | |
| | | | | | | | | | | | CrUrGrArGrGrAr | | AGTCTGCC | | |
| | | | | | | | | | | | GrArArGrUrCrU* | | | | |
| | | | | | | | | | | | mG*mC*mC | | | | |
| HBB8_ | GTAACG | 19997 | GTTTTAGAG | 20087 | GAG | 20177 | GTGCAC | 20267 | GTAACGGCAGA | 20357 | mG*mU*mA*rAr | 20447 | GTAACGG | 20537 | +++ |
| RT1 | GCAGA | | CTAGAAAT | | AAG | | CTGACT | | CTTCTCCACGTT | | CrGrGrCrArGrAr | | CAGACTTC | | |
| 8_ | CTTCTC | | AGCAAGTT | | TCT | | CCTGAG | | TTAGAGCTAGAA | | CrUrUrCrUrCrCr | | TCCACGTT | | |
| PB | CAC | | AAAATAAG | | GC | | | | ATAGCAAGTTAA | | ArCrGrUrUrUrUr | | TTAGAGCT | | |
| S11 | | | GCTAGTCCG | | | | | | AATAAGGCTAGT | | ArGrArGrCrUrAr | | AGAAATA | | |
| | | | TTATCAACT | | | | | | CCGTTATCAACT | | GrArArArUrArGr | | GCAAGTT | | |
| | | | TGAAAAAG | | | | | | TGAAAAAGTGG | | CrArArGrUrUrAr | | AAAATAA | | |
| | | | TGGCACCG | | | | | | CACCGAGTCGGT | | ArArArUrArArGr | | GGCTAGT | | |
| | | | AGTCGGTG | | | | | | GCGTGCACCTGA | | GrCrUrArGrUrCr | | CCGTTATC | | |
| | | | C | | | | | | CTCCTGAGGAGA | | CrGrUrUrArUrCr | | AACTTGA | | |
| | | | | | | | | | AGTCTGC | | ArArCrUrUrGrAr | | AAAAGTG | | |
| | | | | | | | | | | | ArArArArGrUrGr | | GCACCGA | | |
| | | | | | | | | | | | GrCrArCrCrGrAr | | GTCGGTG | | |
| | | | | | | | | | | | GrUrCrGrGrUrGr | | CGTGCATC | | |
| | | | | | | | | | | | CrGrUrGrCrArCr | | TGACTCCT | | |
| | | | | | | | | | | | CrUrGrArCrUrCr | | GAGGAGA | | |
| | | | | | | | | | | | CrUrGrArGrGrAr | | AGTCTGC | | |
| | | | | | | | | | | | GrArArGrUrC*m | | | | |
| | | | | | | | | | | | U*mG*mC | | | | |
| HBB8 | GTAACG | 19998 | GTTTTAGAG | 20088 | GAG | 20178 | GTGCAC | 20268 | GTAACGGCAGA | 20358 | mG*mU*mA*rAr | 20448 | GTAACGG | 20538 | +++ |
| _RT1 | GCAGA | | CTAGAAAT | | AAG | | CTGACT | | CTTCTCCACGTT | | CrGrGrCrArGrAr | | CAGACTTC | | |
| 8_PB | CTTCTC | | AGCAAGTT | | TCT | | CCTGAG | | TTAGAGCTAGAA | | CrUrUrCrUrCrCr | | TCCACGTT | | |
| S10 | CAC | | AAAATAAG | | G | | | | ATAGCAAGTTAA | | ArCrGrUrUrUrUr | | TTAGAGCT | | |
| | | | GCTAGTCCG | | | | | | AATAAGGCTAGT | | ArGrArGrCrUrAr | | AGAAATA | | |
| | | | TTATCAACT | | | | | | CCGTTATCAACT | | GrArArArUrArGr | | GCAAGTT | | |
| | | | TGAAAAAG | | | | | | TGAAAAAGTGG | | CrArArGrUrUrAr | | AAAATAA | | |
| | | | TGGCACCG | | | | | | CACCGAGTCGGT | | ArArArUrArArGr | | GGCTAGT | | |
| | | | AGTCGGTG | | | | | | GCGTGCACCTGA | | GrCrUrArGrUrCr | | CCGTTATC | | |
| | | | C | | | | | | CTCCTGAGGAGA | | CrGrUrUrArUrCr | | AACTTGA | | |
| | | | | | | | | | AGTCTG | | ArArCrUrUrGrAr | | AAAAGTG | | |
| | | | | | | | | | | | ArArArArGrUrGr | | GCACCGA | | |
| | | | | | | | | | | | GrCrArCrCrGrAr | | GTCGGTG | | |
| | | | | | | | | | | | GrUrCrGrGrUrGr | | CGTGCATC | | |
| | | | | | | | | | | | CrGrUrGrCrArCr | | TGACTCCT | | |
| | | | | | | | | | | | CrUrGrArCrUrCr | | GAGGAGA | | |
| | | | | | | | | | | | CrUrGrArGrGrAr | | AGTCTG | | |
| | | | | | | | | | | | GrArArGrU*mC* | | | | |
| | | | | | | | | | | | mU*mG | | | | |
| HBB8 | GTAACG | 19999 | GTTTTAGAG | 20089 | GAG | | GTGCAC | 20269 | GTAACGGCAGA | 20359 | mG*mU*mA*rAr | 20449 | GTAACGG | 20539 | ++ |
| _RT1 | GCAGA | | CTAGAAAT | | AAG | | CTGACT | | CTTCTCCACGTT | | CrGrGrCrArGrAr | | CAGACTTC | | |
| 8_PB | CTTCTC | | AGCAAGTT | | TCT | | CCTGAG | | TTAGAGCTAGAA | | CrUrUrCrUrCrCr | | TCCACGTT | | |
| S9 | CAC | | AAAATAAG | | | | | | ATAGCAAGTTAA | | ArCrGrUrUrUrUr | | TTAGAGCT | | |
| | | | GCTAGTCCG | | | | | | AATAAGGCTAGT | | ArGrArGrCrUrAr | | AGAAATA | | |
| | | | TTATCAACT | | | | | | CCGTTATCAACT | | GrArArArUrArGr | | GCAAGTT | | |
| | | | TGAAAAAG | | | | | | TGAAAAAGTGG | | CrArArGrUrUrAr | | AAAATAA | | |
| | | | TGGCACCG | | | | | | CACCGAGTCGGT | | ArArArUrArArGr | | GGCTAGT | | |
| | | | AGTCGGTG | | | | | | GCGTGCACCTGA | | GrCrUrArGrUrCr | | CCGTTATC | | |
| | | | C | | | | | | CTCCTGAGGAGA | | CrGrUrUrArUrCr | | AACTTGA | | |
| | | | | | | | | | AGTCT | | ArArCrUrUrGrAr | | AAAAGTG | | |
| | | | | | | | | | | | ArArArArGrUrGr | | GCACCGA | | |
| | | | | | | | | | | | GrCrArCrCrGrAr | | GTCGGTG | | |
| | | | | | | | | | | | GrUrCrGrGrUrGr | | CGTGCATC | | |
| | | | | | | | | | | | CrGrUrGrCrArCr | | TGACTCCT | | |
| | | | | | | | | | | | CrUrGrArCrUrCr | | GAGGAGA | | |
| | | | | | | | | | | | CrUrGrArGrGrAr | | AGTCT | | |
| | | | | | | | | | | | GrArArG*mU*m | | | | |
| | | | | | | | | | | | C*mU | | | | |
| HBB8 | GTAACG | 20000 | GTTTTAGAG | 20090 | GAG | | GTGCAC | 20270 | GTAACGGCAGA | 20360 | mG*mU*mA*rAr | 20450 | GTAACGG | 20540 | ++ |
| _RT1 | GCAGA | | CTAGAAAT | | AAG | | CTGACT | | CTTCTCCACGTT | | CrGrGrCrArGrAr | | CAGACTTC | | |
| 8_ | CTTCTC | | AGCAAGTT | | TC | | CCTGAG | | TTAGAGCTAGAA | | CrUrUrCrUrCrCr | | TCCACGTT | | |
| PB | CAC | | AAAATAAG | | | | | | ATAGCAAGTTAA | | ArCrGrUrUrUrUr | | TTAGAGCT | | |
| S8 | | | GCTAGTCCG | | | | | | AATAAGGCTAGT | | ArGrArGrCrUrAr | | AGAAATA | | |
| | | | TTATCAACT | | | | | | CCGTTATCAACT | | GrArArArUrArGr | | GCAAGTT | | |
| | | | TGAAAAAG | | | | | | TGAAAAAGTGG | | CrArArGrUrUrAr | | AAAATAA | | |
| | | | TGGCACCG | | | | | | CACCGAGTCGGT | | ArArArUrArArGr | | GGCTAGT | | |
| | | | AGTCGGTG | | | | | | GCGTGCACCTGA | | GrCrUrArGrUrCr | | CCGTTATC | | |
| | | | C | | | | | | CTCCTGAGGAGA | | CrGrUrUrArUrCr | | AACTTGA | | |
| | | | | | | | | | AGTC | | ArArCrUrUrGrAr | | AAAAGTG | | |
| | | | | | | | | | | | ArArArArGrUrGr | | GCACCGA | | |
| | | | | | | | | | | | GrCrArCrCrGrAr | | GTCGGTG | | |
| | | | | | | | | | | | GrUrCrGrGrUrGr | | CGTGCATC | | |
| | | | | | | | | | | | CrGrUrGrCrArCr | | TGACTCCT | | |
| | | | | | | | | | | | CrUrGrArCrUrCr | | GAGGAGA | | |
| | | | | | | | | | | | CrUrGrArGrGrAr | | AGTC | | |
| | | | | | | | | | | | GrArA*mG*mU* | | | | |
| | | | | | | | | | | | mC | | | | |
| HBB8_ | GTAACG | 20001 | GTTTTAGAG | 20091 | GAG | 20181 | TGCACC | 20271 | GTAACGGCAGA | 20361 | mG*mU*mA*rAr | 20451 | GTAACGG | 20541 | + |
| RT17_ | GCAGA | | CTAGAAAT | | AAG | | TGACTC | | CTTCTCCACGTT | | CrGrGrCrArGrAr | | CAGACTTC | | |
| PB | CTTCTC | | AGCAAGTT | | TCT | | CTGAG | | TTAGAGCTAGAA | | CrUrUrCrUrCrCr | | TCCACGTT | | |
| S17 | CAC | | AAAATAAG | | GCC | | | | ATAGCAAGTTAA | | ArCrGrUrUrUrUr | | TTAGAGCT | | |
| | | | GCTAGTCCG | | GTT | | | | AATAAGGCTAGT | | ArGrArGrCrUrAr | | AGAAATA | | |
| | | | TTATCAACT | | AC | | | | CCGTTATCAACT | | GrArArArUrArGr | | GCAAGTT | | |
| | | | TGAAAAAG | | | | | | TGAAAAAGTGG | | CrArArGrUrUrAr | | AAAATAA | | |
| | | | TGGCACCG | | | | | | CACCGAGTCGGT | | ArArArUrArArGr | | GGCTAGT | | |
| | | | AGTCGGTG | | | | | | GCTGCACCTGAC | | GrCrUrArGrUrCr | | CCGTTATC | | |
| | | | C | | | | | | TCCTGAGGAGA | | CrGrUrUrArUrCr | | AACTTGA | | |
| | | | | | | | | | AGTCTGCCGTTA | | ArArCrUrUrGrAr | | AAAAGTG | | |
| | | | | | | | | | C | | ArArArArGrUrGr | | GCACCGA | | |
| | | | | | | | | | | | GrCrArCrCrGrAr | | GTCGGTG | | |
| | | | | | | | | | | | GrUrCrGrGrUrGr | | CTGCATCT | | |
| | | | | | | | | | | | CrUrGrCrArCrCr | | GACTCCTG | | |
| | | | | | | | | | | | UrGrArCrUrCrCr | | AGGAGAA | | |
| | | | | | | | | | | | UrGrArGrGrArGr | | GTCTGCCG | | |
| | | | | | | | | | | | ArArGrUrCrUrGr | | TTAC | | |
| | | | | | | | | | | | CrCrGrU*mU*m | | | | |
| | | | | | | | | | | | A*mC | | | | |
| HBB8 | GTAACG | 20002 | GTTTTAGAG | 20092 | GAG | 20182 | TGCACC | 20272 | GTAACGGCAGA | 20362 | mG*mU*mA*rAr | 20452 | GTAACGG | 20542 | + |
| _RT1 | GCAGA | | CTAGAAAT | | AAG | | TGACTC | | CTTCTCCACGTT | | CrGrGrCrArGrAr | | CAGACTTC | | |
| 7_ | CTTCTC | | AGCAAGTT | | TCT | | CTGAG | | TTAGAGCTAGAA | | CrUrUrCrUrCrCr | | TCCACGTT | | |
| PB | CAC | | AAAATAAG | | GCC | | | | ATAGCAAGTTAA | | ArCrGrUrUrUrUr | | TTAGAGCT | | |
| S16 | | | GCTAGTCCG | | GTT | | | | AATAAGGCTAGT | | ArGrArGrCrUrAr | | AGAAATA | | |
| | | | TTATCAACT | | A | | | | CCGTTATCAACT | | GrArArArUrArGr | | GCAAGTT | | |
| | | | TGAAAAAG | | | | | | TGAAAAAGTGG | | CrArArGrUrUrAr | | AAAATAA | | |
| | | | TGGCACCG | | | | | | CACCGAGTCGGT | | ArArArUrArArGr | | GGCTAGT | | |
| | | | AGTCGGTG | | | | | | GCTGCACCTGAC | | GrCrUrArGrUrCr | | CCGTTATC | | |
| | | | C | | | | | | TCCTGAGGAGA | | CrGrUrUrArUrCr | | AACTTGA | | |
| | | | | | | | | | AGTCTGCCGTTA | | ArArCrUrUrGrAr | | AAAAGTG | | |
| | | | | | | | | | | | ArArArArGrUrGr | | GCACCGA | | |
| | | | | | | | | | | | GrCrArCrCrGrAr | | GTCGGTG | | |
| | | | | | | | | | | | GrUrCrGrGrUrGr | | CTGCATCT | | |
| | | | | | | | | | | | CrUrGrCrArCrCr | | GACTCCTG | | |
| | | | | | | | | | | | UrGrArCrUrCrCr | | AGGAGAA | | |
| | | | | | | | | | | | UrGrArGrGrArGr | | GTCTGCCG | | |
| | | | | | | | | | | | ArArGrUrCrUrGr | | TTA | | |
| | | | | | | | | | | | CrCrG*mU*mU* | | | | |
| | | | | | | | | | | | mA | | | | |
| HBB8 | GTAACG | 20003 | GTTTTAGAG | 20093 | GAG | 20183 | TGCACC | 20273 | GTAACGGCAGA | 20363 | mG*mU*mA*rAr | 20453 | GTAACGG | 20543 | + |
| _RT1 | GCAGA | | CTAGAAAT | | AAG | | TGACTC | | CTTCTCCACGTT | | CrGrGrCrArGrAr | | CAGACTTC | | |
| 7_PB | CTTCTC | | AGCAAGTT | | TCT | | CTGAG | | TTAGAGCTAGAA | | CrUrUrCrUrCrCr | | TCCACGTT | | |
| S15 | CAC | | AAAATAAG | | GCC | | | | ATAGCAAGTTAA | | ArCrGrUrUrUrUr | | TTAGAGCT | | |
| | | | GCTAGTCCG | | GTT | | | | AATAAGGCTAGT | | ArGrArGrCrUrAr | | AGAAATA | | |
| | | | TTATCAACT | | | | | | CCGTTATCAACT | | GrArArArUrArGr | | GCAAGTT | | |
| | | | TGAAAAAG | | | | | | TGAAAAAGTGG | | CrArArGrUrUrAr | | AAAATAA | | |
| | | | TGGCACCG | | | | | | CACCGAGTCGGT | | ArArArUrArArGr | | GGCTAGT | | |
| | | | AGTCGGTG | | | | | | GCTGCACCTGAC | | GrCrUrArGrUrCr | | CCGTTATC | | |
| | | | C | | | | | | TCCTGAGGAGA | | CrGrUrUrArUrCr | | AACTTGA | | |
| | | | | | | | | | AGTCTGCCGTT | | ArArCrUrUrGrAr | | AAAAGTG | | |
| | | | | | | | | | | | ArArArArGrUrGr | | GCACCGA | | |
| | | | | | | | | | | | GrCrArCrCrGrAr | | GTCGGTG | | |
| | | | | | | | | | | | GrUrCrGrGrUrGr | | CTGCATCT | | |
| | | | | | | | | | | | CrUrGrCrArCrCr | | GACTCCTG | | |
| | | | | | | | | | | | UrGrArCrUrCrCr | | AGGAGAA | | |
| | | | | | | | | | | | UrGrArGrGrArGr | | GTCTGCCG | | |
| | | | | | | | | | | | ArArGrUrCrUrGr | | TT | | |
| | | | | | | | | | | | CrC*mG*mU*m | | | | |
| | | | | | | | | | | | U | | | | |
| HBB8 | GTAACG | 20004 | GTTTTAGAG | 20094 | GAG | 20184 | TGCACC | 20274 | GTAACGGCAGA | 20364 | mG*mU*mA*rAr | 20454 | GTAACGG | 20544 | ++ |
| RT1 | GCAGA | | CTAGAAAT | | AAG | | TGACTC | | CTTCTCCACGTT | | CrGrGrCrArGrAr | | CAGACTTC | | |
| 7_ | CTTCTC | | AGCAAGTT | | TCT | | CTGAG | | TTAGAGCTAGAA | | CrUrUrCrUrCrCr | | TCCACGTT | | |
| PB | CAC | | AAAATAAG | | GCC | | | | ATAGCAAGTTAA | | ArCrGrUrUrUrUr | | TTAGAGCT | | |
| S14 | | | GCTAGTCCG | | GT | | | | AATAAGGCTAGT | | ArGrArGrCrUrAr | | AGAAATA | | |
| | | | TTATCAACT | | | | | | CCGTTATCAACT | | GrArArArUrArGr | | GCAAGTT | | |
| | | | TGAAAAAG | | | | | | TGAAAAAGTGG | | CrArArGrUrUrAr | | AAAATAA | | |
| | | | TGGCACCG | | | | | | CACCGAGTCGGT | | ArArArUrArArGr | | GGCTAGT | | |
| | | | AGTCGGTG | | | | | | GCTGCACCTGAC | | GrCrUrArGrUrCr | | CCGTTATC | | |
| | | | C | | | | | | TCCTGAGGAGA | | CrGrUrUrArUrCr | | AACTTGA | | |
| | | | | | | | | | AGTCTGCCGT | | ArArCrUrUrGrAr | | AAAAGTG | | |
| | | | | | | | | | | | ArArArArGrUrGr | | GCACCGA | | |
| | | | | | | | | | | | GrCrArCrCrGrAr | | GTCGGTG | | |
| | | | | | | | | | | | GrUrCrGrGrUrGr | | CTGCATCT | | |
| | | | | | | | | | | | CrUrGrCrArCrCr | | GACTCCTG | | |
| | | | | | | | | | | | UrGrArCrUrCrCr | | AGGAGAA | | |
| | | | | | | | | | | | UrGrArGrGrArGr | | GTCTGCCG | | |
| | | | | | | | | | | | ArArGrUrCrUrGr | | T | | |
| | | | | | | | | | | | C*mC*mG*mU | | | | |
| HBB8_ | GTAACG | 20005 | GTTTTAGAG | 20095 | GAG | 20185 | TGCACC | 20275 | GTAACGGCAGA | 20365 | mG*mU*mA*rAr | 20455 | GTAACGG | 20545 | + |
| RT17_ | GCAGA | | CTAGAAAT | | AAG | | TGACTC | | CTTCTCCACGTT | | CrGrGrCrArGrAr | | CAGACTTC | | |
| PB | CTTCTC | | AGCAAGTT | | TCT | | CTGAG | | TTAGAGCTAGAA | | CrUrUrCrUrCrCr | | TCCACGTT | | |
| S13 | CAC | | AAAATAAG | | GCC | | | | ATAGCAAGTTAA | | ArCrGrUrUrUrUr | | TTAGAGCT | | |
| | | | GCTAGTCCG | | G | | | | AATAAGGCTAGT | | ArGrArGrCrUrAr | | AGAAATA | | |
| | | | TTATCAACT | | | | | | CCGTTATCAACT | | GrArArArUrArGr | | GCAAGTT | | |
| | | | TGAAAAAG | | | | | | TGAAAAAGTGG | | CrArArGrUrUrAr | | AAAATAA | | |
| | | | TGGCACCG | | | | | | CACCGAGTCGGT | | ArArArUrArArGr | | GGCTAGT | | |
| | | | AGTCGGTG | | | | | | GCTGCACCTGAC | | GrCrUrArGrUrCr | | CCGTTATC | | |
| | | | C | | | | | | TCCTGAGGAGA | | CrGrUrUrArUrCr | | AACTTGA | | |
| | | | | | | | | | AGTCTGCCG | | ArArCrUrUrGrAr | | AAAAGTG | | |
| | | | | | | | | | | | ArArArArGrUrGr | | GCACCGA | | |
| | | | | | | | | | | | GrCrArCrCrGrAr | | GTCGGTG | | |
| | | | | | | | | | | | GrUrCrGrGrUrGr | | CTGCATCT | | |
| | | | | | | | | | | | CrUrGrCrArCrCr | | GACTCCTG | | |
| | | | | | | | | | | | UrGrArCrUrCrCr | | AGGAGAA | | |
| | | | | | | | | | | | UrGrArGrGrArGr | | GTCTGCCG | | |
| | | | | | | | | | | | ArArGrUrCrUrG* | | | | |
| | | | | | | | | | | | mC*mC*mG | | | | |
| HBB8_ | GTAACG | 20006 | GTTTTAGAG | 20096 | GAG | 20186 | TGCACC | 20276 | GTAACGGCAGA | 20366 | mG*mU*mA*rAr | 20456 | GTAACGG | 20546 | ++ |
| RT17_ | GCAGA | | CTAGAAAT | | AAG | | TGACTC | | CTTCTCCACGTT | | CrGrGrCrArGrAr | | CAGACTTC | | |
| PBS12 | CTTCTC | | AGCAAGTT | | TCT | | CTGAG | | TTAGAGCTAGAA | | CrUrUrCrUrCrCr | | TCCACGTT | | |
| | CAC | | AAAATAAG | | GCC | | | | ATAGCAAGTTAA | | ArCrGrUrUrUrUr | | TTAGAGCT | | |
| | | | GCTAGTCCG | | | | | | AATAAGGCTAGT | | ArGrArGrCrUrAr | | AGAAATA | | |
| | | | TTATCAACT | | | | | | CCGTTATCAACT | | GrArArArUrArGr | | GCAAGTT | | |
| | | | TGAAAAAG | | | | | | TGAAAAAGTGG | | CrArArGrUrUrAr | | AAAATAA | | |
| | | | TGGCACCG | | | | | | CACCGAGTCGGT | | ArArArUrArArGr | | GGCTAGT | | |
| | | | AGTCGGTG | | | | | | GCTGCACCTGAC | | GrCrUrArGrUrCr | | CCGTTATC | | |
| | | | C | | | | | | TCCTGAGGAGA | | CrGrUrUrArUrCr | | AACTTGA | | |
| | | | | | | | | | AGTCTGCC | | ArArCrUrUrGrAr | | AAAAGTG | | |
| | | | | | | | | | | | ArArArArGrUrGr | | GCACCGA | | |
| | | | | | | | | | | | GrCrArCrCrGrAr | | GTCGGTG | | |
| | | | | | | | | | | | GrUrCrGrGrUrGr | | CTGCATCT | | |
| | | | | | | | | | | | CrUrGrCrArCrCr | | GACTCCTG | | |
| | | | | | | | | | | | UrGrArCrUrCrCr | | AGGAGAA | | |
| | | | | | | | | | | | UrGrArGrGrArGr | | GTCTGCC | | |
| | | | | | | | | | | | ArArGrUrCrU*m | | | | |
| | | | | | | | | | | | G*mC*mC | | | | |
| HBB8_ | GTAACG | 20007 | GTTTTAGAG | 20097 | GAG | 20187 | TGCACC | 20277 | GTAACGGCAGA | 20367 | mG*mU*mA*rAr | 20457 | GTAACGG | 20547 | +++ |
| RT17_ | GCAGA | | CTAGAAAT | | AAG | | TGACTC | | CTTCTCCACGTT | | CrGrGrCrArGrAr | | CAGACTTC | | |
| PB | CTTCTC | | AGCAAGTT | | TCT | | CTGAG | | TTAGAGCTAGAA | | CrUrUrCrUrCrCr | | TCCACGTT | | |
| S11 | CAC | | AAAATAAG | | GC | | | | ATAGCAAGTTAA | | ArCrGrUrUrUrUr | | TTAGAGCT | | |
| | | | GCTAGTCCG | | | | | | AATAAGGCTAGT | | ArGrArGrCrUrAr | | AGAAATA | | |
| | | | TTATCAACT | | | | | | CCGTTATCAACT | | GrArArArUrArGr | | GCAAGTT | | |
| | | | TGAAAAAG | | | | | | TGAAAAAGTGG | | CrArArGrUrUrAr | | AAAATAA | | |
| | | | TGGCACCG | | | | | | CACCGAGTCGGT | | ArArArUrArArGr | | GGCTAGT | | |
| | | | AGTCGGTG | | | | | | GCTGCACCTGAC | | GrCrUrArGrUrCr | | CCGTTATC | | |
| | | | C | | | | | | TCCTGAGGAGA | | CrGrUrUrArUrCr | | AACTTGA | | |
| | | | | | | | | | AGTCTGC | | ArArCrUrUrGrAr | | AAAAGTG | | |
| | | | | | | | | | | | ArArArArGrUrGr | | GCACCGA | | |
| | | | | | | | | | | | GrCrArCrCrGrAr | | GTCGGTG | | |
| | | | | | | | | | | | GrUrCrGrGrUrGr | | CTGCATCT | | |
| | | | | | | | | | | | CrUrGrCrArCrCr | | GACTCCTG | | |
| | | | | | | | | | | | UrGrArCrUrCrCr | | AGGAGAA | | |
| | | | | | | | | | | | UrGrArGrGrArGr | | GTCTGC | | |
| | | | | | | | | | | | ArArGrUrC*mU* | | | | |
| | | | | | | | | | | | mG*mC | | | | |
| HBB8_ | GTAACG | 20008 | GTTTTAGAG | 20098 | GAG | 20188 | TGCACC | 20278 | GTAACGGCAGA | 20368 | mG*mU*mA*rAr | 20458 | GTAACGG | 20548 | ++ |
| RT17_ | GCAGA | | CTAGAAAT | | AAG | | TGACTC | | CTTCTCCACGTT | | CrGrGrCrArGrAr | | CAGACTTC | | |
| PB | CTTCTC | | AGCAAGTT | | TCT | | CTGAG | | TTAGAGCTAGAA | | CrUrUrCrUrCrCr | | TCCACGTT | | |
| S10 | CAC | | AAAATAAG | | G | | | | ATAGCAAGTTAA | | ArCrGrUrUrUrUr | | TTAGAGCT | | |
| | | | GCTAGTCCG | | | | | | AATAAGGCTAGT | | ArGrArGrCrUrAr | | AGAAATA | | |
| | | | TTATCAACT | | | | | | CCGTTATCAACT | | GrArArArUrArGr | | GCAAGTT | | |
| | | | TGAAAAAG | | | | | | TGAAAAAGTGG | | CrArArGrUrUrAr | | AAAATAA | | |
| | | | TGGCACCG | | | | | | CACCGAGTCGGT | | ArArArUrArArGr | | GGCTAGT | | |
| | | | AGTCGGTG | | | | | | GCTGCACCTGAC | | GrCrUrArGrUrCr | | CCGTTATC | | |
| | | | C | | | | | | TCCTGAGGAGA | | CrGrUrUrArUrCr | | AACTTGA | | |
| | | | | | | | | | AGTCTG | | ArArCrUrUrGrAr | | AAAAGTG | | |
| | | | | | | | | | | | ArArArArGrUrGr | | GCACCGA | | |
| | | | | | | | | | | | GrCrArCrCrGrAr | | GTCGGTG | | |
| | | | | | | | | | | | GrUrCrGrGrUrGr | | CTGCATCT | | |
| | | | | | | | | | | | CrUrGrCrArCrCr | | GACTCCTG | | |
| | | | | | | | | | | | UrGrArCrUrCrCr | | AGGAGAA | | |
| | | | | | | | | | | | UrGrArGrGrArGr | | GTCTG | | |
| | | | | | | | | | | | ArArGrU*mC*m | | | | |
| | | | | | | | | | | | U*mG | | | | |
| HBB8_ | GTAACG | 20009 | GTTTTAGAG | 20099 | GAG | | TGCACC | 20279 | GTAACGGCAGA | 20369 | mG*mU*mA*rAr | 20459 | GTAACGG | 20549 | ++ |
| RT17_ | GCAGA | | CTAGAAAT | | AAG | | TGACTC | | CTTCTCCACGTT | | CrGrGrCrArGrAr | | CAGACTTC | | |
| PB | CTTCTC | | AGCAAGTT | | TCT | | CTGAG | | TTAGAGCTAGAA | | CrUrUrCrUrCrCr | | TCCACGTT | | |
| S9 | CAC | | AAAATAAG | | | | | | ATAGCAAGTTAA | | ArCrGrUrUrUrUr | | TTAGAGCT | | |
| | | | GCTAGTCCG | | | | | | AATAAGGCTAGT | | ArGrArGrCrUrAr | | AGAAATA | | |
| | | | TTATCAACT | | | | | | CCGTTATCAACT | | GrArArArUrArGr | | GCAAGTT | | |
| | | | TGAAAAAG | | | | | | TGAAAAAGTGG | | CrArArGrUrUrAr | | AAAATAA | | |
| | | | TGGCACCG | | | | | | CACCGAGTCGGT | | ArArArUrArArGr | | GGCTAGT | | |
| | | | AGTCGGTG | | | | | | GCTGCACCTGAC | | GrCrUrArGrUrCr | | CCGTTATC | | |
| | | | C | | | | | | TCCTGAGGAGA | | CrGrUrUrArUrCr | | AACTTGA | | |
| | | | | | | | | | AGTCT | | ArArCrUrUrGrAr | | AAAAGTG | | |
| | | | | | | | | | | | ArArArArGrUrGr | | GCACCGA | | |
| | | | | | | | | | | | GrCrArCrCrGrAr | | GTCGGTG | | |
| | | | | | | | | | | | GrUrCrGrGrUrGr | | CTGCATCT | | |
| | | | | | | | | | | | CrUrGrCrArCrCr | | GACTCCTG | | |
| | | | | | | | | | | | UrGrArCrUrCrCr | | AGGAGAA | | |
| | | | | | | | | | | | UrGrArGrGrArGr | | GTCT | | |
| | | | | | | | | | | | ArArG*mU*mC* | | | | |
| | | | | | | | | | | | mU | | | | |
| HBB8_ | GTAACG | 20010 | GTTTTAGAG | 20100 | GAG | | TGCACC | 20280 | GTAACGGCAGA | 20370 | mG*mU*mA*rAr | 20460 | GTAACGG | 20550 | ++ |
| RT17_ | GCAGA | | CTAGAAAT | | AAG | | TGACTC | | CTTCTCCACGTT | | CrGrGrCrArGrAr | | CAGACTTC | | |
| PB | CTTCTC | | AGCAAGTT | | TC | | CTGAG | | TTAGAGCTAGAA | | CrUrUrCrUrCrCr | | TCCACGTT | | |
| S8 | CAC | | AAAATAAG | | | | | | ATAGCAAGTTAA | | ArCrGrUrUrUrUr | | TTAGAGCT | | |
| | | | GCTAGTCCG | | | | | | AATAAGGCTAGT | | ArGrArGrCrUrAr | | AGAAATA | | |
| | | | TTATCAACT | | | | | | CCGTTATCAACT | | GrArArArUrArGr | | GCAAGTT | | |
| | | | TGAAAAAG | | | | | | TGAAAAAGTGG | | CrArArGrUrUrAr | | AAAATAA | | |
| | | | TGGCACCG | | | | | | CACCGAGTCGGT | | ArArArUrArArGr | | GGCTAGT | | |
| | | | AGTCGGTG | | | | | | GCTGCACCTGAC | | GrCrUrArGrUrCr | | CCGTTATC | | |
| | | | C | | | | | | TCCTGAGGAGA | | CrGrUrUrArUrCr | | AACTTGA | | |
| | | | | | | | | | AGTC | | ArArCrUrUrGrAr | | AAAAGTG | | |
| | | | | | | | | | | | ArArArArGrUrGr | | GCACCGA | | |
| | | | | | | | | | | | GrCrArCrCrGrAr | | GTCGGTG | | |
| | | | | | | | | | | | GrUrCrGrGrUrGr | | CTGCATCT | | |
| | | | | | | | | | | | CrUrGrCrArCrCr | | GACTCCTG | | |
| | | | | | | | | | | | UrGrArCrUrCrCr | | AGGAGAA | | |
| | | | | | | | | | | | UrGrArGrGrArGr | | GTC | | |
| | | | | | | | | | | | ArA*mG*mU*m | | | | |
| | | | | | | | | | | | C | | | | |
| HBB8_ | GTAACG | 20011 | GTTTTAGAG | 20101 | GAG | 20191 | GCACCT | 20281 | GTAACGGCAGA | 20371 | mG*mU*mA*rAr | 20461 | GTAACGG | 20551 | + |
| RT16_ | GCAGA | | CTAGAAAT | | AAG | | GACTCC | | CTTCTCCACGTT | | CrGrGrCrArGrAr | | CAGACTTC | | |
| PB | CTTCTC | | AGCAAGTT | | TCT | | TGAG | | TTAGAGCTAGAA | | CrUrUrCrUrCrCr | | TCCACGTT | | |
| S17 | CAC | | AAAATAAG | | GCC | | | | ATAGCAAGTTAA | | ArCrGrUrUrUrUr | | TTAGAGCT | | |
| | | | GCTAGTCCG | | GTT | | | | AATAAGGCTAGT | | ArGrArGrCrUrAr | | AGAAATA | | |
| | | | TTATCAACT | | AC | | | | CCGTTATCAACT | | GrArArArUrArGr | | GCAAGTT | | |
| | | | TGAAAAAG | | | | | | TGAAAAAGTGG | | CrArArGrUrUrAr | | AAAATAA | | |
| | | | TGGCACCG | | | | | | CACCGAGTCGGT | | ArArArUrArArGr | | GGCTAGT | | |
| | | | AGTCGGTG | | | | | | GCGCACCTGACT | | GrCrUrArGrUrCr | | CCGTTATC | | |
| | | | C | | | | | | CCTGAGGAGAA | | CrGrUrUrArUrCr | | AACTTGA | | |
| | | | | | | | | | GTCTGCCGTTAC | | ArArCrUrUrGrAr | | AAAAGTG | | |
| | | | | | | | | | | | ArArArArGrUrGr | | GCACCGA | | |
| | | | | | | | | | | | GrCrArCrCrGrAr | | GTCGGTG | | |
| | | | | | | | | | | | GrUrCrGrGrUrGr | | CGCATCTG | | |
| | | | | | | | | | | | CrGrCrArCrCrUr | | ACTCCTGA | | |
| | | | | | | | | | | | GrArCrUrCrCrUr | | GGAGAAG | | |
| | | | | | | | | | | | GrArGrGrArGrAr | | TCTGCCGT | | |
| | | | | | | | | | | | ArGrUrCrUrGrCr | | TAC | | |
| | | | | | | | | | | | CrGrU*mU*mA* | | | | |
| | | | | | | | | | | | mC | | | | |
| HBB8_ | GTAACG | 20012 | GTTTTAGAG | 20102 | GAG | 20192 | GCACCT | 20282 | GTAACGGCAGA | 20372 | mG*mU*mA*rAr | 20462 | GTAACGG | 20552 | ++ |
| RT16_ | GCAGA | | CTAGAAAT | | AAG | | GACTCC | | CTTCTCCACGTT | | CrGrGrCrArGrAr | | CAGACTTC | | |
| PB | CTTCTC | | AGCAAGTT | | TCT | | TGAG | | TTAGAGCTAGAA | | CrUrUrCrUrCrCr | | TCCACGTT | | |
| S16 | CAC | | AAAATAAG | | GCC | | | | ATAGCAAGTTAA | | ArCrGrUrUrUrUr | | TTAGAGCT | | |
| | | | GCTAGTCCG | | GTT | | | | AATAAGGCTAGT | | ArGrArGrCrUrAr | | AGAAATA | | |
| | | | TTATCAACT | | A | | | | CCGTTATCAACT | | GrArArArUrArGr | | GCAAGTT | | |
| | | | TGAAAAAG | | | | | | TGAAAAAGTGG | | CrArArGrUrUrAr | | AAAATAA | | |
| | | | TGGCACCG | | | | | | CACCGAGTCGGT | | ArArArUrArArGr | | GGCTAGT | | |
| | | | AGTCGGTG | | | | | | GCGCACCTGACT | | GrCrUrArGrUrCr | | CCGTTATC | | |
| | | | C | | | | | | CCTGAGGAGAA | | CrGrUrUrArUrCr | | AACTTGA | | |
| | | | | | | | | | GTCTGCCGTTA | | ArArCrUrUrGrAr | | AAAAGTG | | |
| | | | | | | | | | | | ArArArArGrUrGr | | GCACCGA | | |
| | | | | | | | | | | | GrCrArCrCrGrAr | | GTCGGTG | | |
| | | | | | | | | | | | GrUrCrGrGrUrGr | | CGCATCTG | | |
| | | | | | | | | | | | CrGrCrArCrCrUr | | ACTCCTGA | | |
| | | | | | | | | | | | GrArCrUrCrCrUr | | GGAGAAG | | |
| | | | | | | | | | | | GrArGrGrArGrAr | | TCTGCCGT | | |
| | | | | | | | | | | | ArGrUrCrUrGrCr | | TA | | |
| | | | | | | | | | | | CrG*mU*mU*m | | | | |
| | | | | | | | | | | | A | | | | |
| HBB8_ | GTAACG | 20013 | GTTTTAGAG | 20103 | GAG | 20193 | GCACCT | 20283 | GTAACGGCAGA | 20373 | mG*mU*mA*rAr | 20463 | GTAACGG | 20553 | ++ |
| RT16_ | GCAGA | | CTAGAAAT | | AAG | | GACTCC | | CTTCTCCACGTT | | CrGrGrCrArGrAr | | CAGACTTC | | |
| PB | CTTCTC | | AGCAAGTT | | TCT | | TGAG | | TTAGAGCTAGAA | | CrUrUrCrUrCrCr | | TCCACGTT | | |
| S15 | CAC | | AAAATAAG | | GCC | | | | ATAGCAAGTTAA | | ArCrGrUrUrUrUr | | TTAGAGCT | | |
| | | | GCTAGTCCG | | GTT | | | | AATAAGGCTAGT | | ArGrArGrCrUrAr | | AGAAATA | | |
| | | | TTATCAACT | | | | | | CCGTTATCAACT | | GrArArArUrArGr | | GCAAGTT | | |
| | | | TGAAAAAG | | | | | | TGAAAAAGTGG | | CrArArGrUrUrAr | | AAAATAA | | |
| | | | TGGCACCG | | | | | | CACCGAGTCGGT | | ArArArUrArArGr | | GGCTAGT | | |
| | | | AGTCGGTG | | | | | | GCGCACCTGACT | | GrCrUrArGrUrCr | | CCGTTATC | | |
| | | | C | | | | | | CCTGAGGAGAA | | CrGrUrUrArUrCr | | AACTTGA | | |
| | | | | | | | | | GTCTGCCGTT | | ArArCrUrUrGrAr | | AAAAGTG | | |
| | | | | | | | | | | | ArArArArGrUrGr | | GCACCGA | | |
| | | | | | | | | | | | GrCrArCrCrGrAr | | GTCGGTG | | |
| | | | | | | | | | | | GrUrCrGrGrUrGr | | CGCATCTG | | |
| | | | | | | | | | | | CrGrCrArCrCrUr | | ACTCCTGA | | |
| | | | | | | | | | | | GrArCrUrCrCrUr | | GGAGAAG | | |
| | | | | | | | | | | | GrArGrGrArGrAr | | TCTGCCGT | | |
| | | | | | | | | | | | ArGrUrCrUrGrCr | | T | | |
| | | | | | | | | | | | C*mG*mU*mU | | | | |
| HBB8_ | GTAACG | 20014 | GTTTTAGAG | 20104 | GAG | 20194 | GCACCT | 20284 | GTAACGGCAGA | 20374 | mG*mU*mA*rAr | 20464 | GTAACGG | 20554 | ++ |
| RT16_ | GCAGA | | CTAGAAAT | | AAG | | GACTCC | | CTTCTCCACGTT | | CrGrGrCrArGrAr | | CAGACTTC | | |
| PB | CTTCTC | | AGCAAGTT | | TCT | | TGAG | | TTAGAGCTAGAA | | CrUrUrCrUrCrCr | | TCCACGTT | | |
| S14 | CAC | | AAAATAAG | | GCC | | | | ATAGCAAGTTAA | | ArCrGrUrUrUrUr | | TTAGAGCT | | |
| | | | GCTAGTCCG | | GT | | | | AATAAGGCTAGT | | ArGrArGrCrUrAr | | AGAAATA | | |
| | | | TTATCAACT | | | | | | CCGTTATCAACT | | GrArArArUrArGr | | GCAAGTT | | |
| | | | TGAAAAAG | | | | | | TGAAAAAGTGG | | CrArArGrUrUrAr | | AAAATAA | | |
| | | | TGGCACCG | | | | | | CACCGAGTCGGT | | ArArArUrArArGr | | GGCTAGT | | |
| | | | AGTCGGTG | | | | | | GCGCACCTGACT | | GrCrUrArGrUrCr | | CCGTTATC | | |
| | | | C | | | | | | CCTGAGGAGAA | | CrGrUrUrArUrCr | | AACTTGA | | |
| | | | | | | | | | GTCTGCCGT | | ArArCrUrUrGrAr | | AAAAGTG | | |
| | | | | | | | | | | | ArArArArGrUrGr | | GCACCGA | | |
| | | | | | | | | | | | GrCrArCrCrGrAr | | GTCGGTG | | |
| | | | | | | | | | | | GrUrCrGrGrUrGr | | CGCATCTG | | |
| | | | | | | | | | | | CrGrCrArCrCrUr | | ACTCCTGA | | |
| | | | | | | | | | | | GrArCrUrCrCrUr | | GGAGAAG | | |
| | | | | | | | | | | | GrArGrGrArGrAr | | TCTGCCGT | | |
| | | | | | | | | | | | ArGrUrCrUrGrC* | | | | |
| | | | | | | | | | | | mC*mG*mU | | | | |
| HBB8_ | GTAACG | 20015 | GTTTTAGAG | 20105 | GAG | 20195 | GCACCT | 20285 | GTAACGGCAGA | 20375 | mG*mU*mA*rAr | 20465 | GTAACGG | 20555 | ++ |
| RT16_ | GCAGA | | CTAGAAAT | | AAG | | GACTCC | | CTTCTCCACGTT | | CrGrGrCrArGrAr | | CAGACTTC | | |
| PB | CTTCTC | | AGCAAGTT | | TCT | | TGAG | | TTAGAGCTAGAA | | CrUrUrCrUrCrCr | | TCCACGTT | | |
| S13 | CAC | | AAAATAAG | | GCC | | | | ATAGCAAGTTAA | | ArCrGrUrUrUrUr | | TTAGAGCT | | |
| | | | GCTAGTCCG | | G | | | | AATAAGGCTAGT | | ArGrArGrCrUrAr | | AGAAATA | | |
| | | | TTATCAACT | | | | | | CCGTTATCAACT | | GrArArArUrArGr | | GCAAGTT | | |
| | | | TGAAAAAG | | | | | | TGAAAAAGTGG | | CrArArGrUrUrAr | | AAAATAA | | |
| | | | TGGCACCG | | | | | | CACCGAGTCGGT | | ArArArUrArArGr | | GGCTAGT | | |
| | | | AGTCGGTG | | | | | | GCGCACCTGACT | | GrCrUrArGrUrCr | | CCGTTATC | | |
| | | | C | | | | | | CCTGAGGAGAA | | CrGrUrUrArUrCr | | AACTTGA | | |
| | | | | | | | | | GTCTGCCG | | ArArCrUrUrGrAr | | AAAAGTG | | |
| | | | | | | | | | | | ArArArArGrUrGr | | GCACCGA | | |
| | | | | | | | | | | | GrCrArCrCrGrAr | | GTCGGTG | | |
| | | | | | | | | | | | GrUrCrGrGrUrGr | | CGCATCTG | | |
| | | | | | | | | | | | CrGrCrArCrCrUr | | ACTCCTGA | | |
| | | | | | | | | | | | GrArCrUrCrCrUr | | GGAGAAG | | |
| | | | | | | | | | | | GrArGrGrArGrAr | | TCTGCCG | | |
| | | | | | | | | | | | ArGrUrCrUrG*m | | | | |
| | | | | | | | | | | | C*mC*mG | | | | |
| HBB8_ | GTAACG | 20016 | GTTTTAGAG | 20106 | GAG | 20196 | GCACCT | 20286 | GTAACGGCAGA | 20376 | mG*mU*mA*rAr | 20466 | GTAACGG | 20556 | +++ |
| RT16_ | GCAGA | | CTAGAAAT | | AAG | | GACTCC | | CTTCTCCACGTT | | CrGrGrCrArGrAr | | CAGACTTC | | |
| PB | CTTCTC | | AGCAAGTT | | TCT | | TGAG | | TTAGAGCTAGAA | | CrUrUrCrUrCrCr | | TCCACGTT | | |
| S12 | CAC | | AAAATAAG | | GCC | | | | ATAGCAAGTTAA | | ArCrGrUrUrUrUr | | TTAGAGCT | | |
| | | | GCTAGTCCG | | | | | | AATAAGGCTAGT | | ArGrArGrCrUrAr | | AGAAATA | | |
| | | | TTATCAACT | | | | | | CCGTTATCAACT | | GrArArArUrArGr | | GCAAGTT | | |
| | | | TGAAAAAG | | | | | | TGAAAAAGTGG | | CrArArGrUrUrAr | | AAAATAA | | |
| | | | TGGCACCG | | | | | | CACCGAGTCGGT | | ArArArUrArArGr | | GGCTAGT | | |
| | | | AGTCGGTG | | | | | | GCGCACCTGACT | | GrCrUrArGrUrCr | | CCGTTATC | | |
| | | | C | | | | | | CCTGAGGAGAA | | CrGrUrUrArUrCr | | AACTTGA | | |
| | | | | | | | | | GTCTGCC | | ArArCrUrUrGrAr | | AAAAGTG | | |
| | | | | | | | | | | | ArArArArGrUrGr | | GCACCGA | | |
| | | | | | | | | | | | GrCrArCrCrGrAr | | GTCGGTG | | |
| | | | | | | | | | | | GrUrCrGrGrUrGr | | CGCATCTG | | |
| | | | | | | | | | | | CrGrCrArCrCrUr | | ACTCCTGA | | |
| | | | | | | | | | | | GrArCrUrCrCrUr | | GGAGAAG | | |
| | | | | | | | | | | | GrArGrGrArGrAr | | TCTGCC | | |
| | | | | | | | | | | | ArGrUrCrU*mG* | | | | |
| | | | | | | | | | | | mC*mC | | | | |
| HBB8_ | GTAACG | 20017 | GTTTTAGAG | 20107 | GAG | 20197 | GCACCT | 20287 | GTAACGGCAGA | 20377 | mG*mU*mA*rAr | 20467 | GTAACGG | 20557 | ++ |
| RT16_ | GCAGA | | CTAGAAAT | | AAG | | GACTCC | | CTTCTCCACGTT | | CrGrGrCrArGrAr | | CAGACTTC | | |
| PB | CTTCTC | | AGCAAGTT | | TCT | | TGAG | | TTAGAGCTAGAA | | CrUrUrCrUrCrCr | | TCCACGTT | | |
| S11 | CAC | | AAAATAAG | | GC | | | | ATAGCAAGTTAA | | ArCrGrUrUrUrUr | | TTAGAGCT | | |
| | | | GCTAGTCCG | | | | | | AATAAGGCTAGT | | ArGrArGrCrUrAr | | AGAAATA | | |
| | | | TTATCAACT | | | | | | CCGTTATCAACT | | GrArArArUrArGr | | GCAAGTT | | |
| | | | TGAAAAAG | | | | | | TGAAAAAGTGG | | CrArArGrUrUrAr | | AAAATAA | | |
| | | | TGGCACCG | | | | | | CACCGAGTCGGT | | ArArArUrArArGr | | GGCTAGT | | |
| | | | AGTCGGTG | | | | | | GCGCACCTGACT | | GrCrUrArGrUrCr | | CCGTTATC | | |
| | | | C | | | | | | CCTGAGGAGAA | | CrGrUrUrArUrCr | | AACTTGA | | |
| | | | | | | | | | GTCTGC | | ArArCrUrUrGrAr | | AAAAGTG | | |
| | | | | | | | | | | | ArArArArGrUrGr | | GCACCGA | | |
| | | | | | | | | | | | GrCrArCrCrGrAr | | GTCGGTG | | |
| | | | | | | | | | | | GrUrCrGrGrUrGr | | CGCATCTG | | |
| | | | | | | | | | | | CrGrCrArCrCrUr | | ACTCCTGA | | |
| | | | | | | | | | | | GrArCrUrCrCrUr | | GGAGAAG | | |
| | | | | | | | | | | | GrArGrGrArGrAr | | TCTGC | | |
| | | | | | | | | | | | ArGrUrC*mU*m | | | | |
| | | | | | | | | | | | G*mC | | | | |
| HBB8_ | GTAACG | 20018 | GTTTTAGAG | 20108 | GAG | 20198 | GCACCT | 20288 | GTAACGGCAGA | 20378 | mG*mU*mA*rAr | 20468 | GTAACGG | 20558 | ++ |
| RT16_ | GCAGA | | CTAGAAAT | | AAG | | GACTCC | | CTTCTCCACGTT | | CrGrGrCrArGrAr | | CAGACTTC | | |
| PB | CTTCTC | | AGCAAGTT | | TCT | | TGAG | | TTAGAGCTAGAA | | CrUrUrCrUrCrCr | | TCCACGTT | | |
| S10 | CAC | | AAAATAAG | | G | | | | ATAGCAAGTTAA | | ArCrGrUrUrUrUr | | TTAGAGCT | | |
| | | | GCTAGTCCG | | | | | | AATAAGGCTAGT | | ArGrArGrCrUrAr | | AGAAATA | | |
| | | | TTATCAACT | | | | | | CCGTTATCAACT | | GrArArArUrArGr | | GCAAGTT | | |
| | | | TGAAAAAG | | | | | | TGAAAAAGTGG | | CrArArGrUrUrAr | | AAAATAA | | |
| | | | TGGCACCG | | | | | | CACCGAGTCGGT | | ArArArUrArArGr | | GGCTAGT | | |
| | | | AGTCGGTG | | | | | | GCGCACCTGACT | | GrCrUrArGrUrCr | | CCGTTATC | | |
| | | | C | | | | | | CCTGAGGAGAA | | CrGrUrUrArUrCr | | AACTTGA | | |
| | | | | | | | | | GTCTG | | ArArCrUrUrGrAr | | AAAAGTG | | |
| | | | | | | | | | | | ArArArArGrUrGr | | GCACCGA | | |
| | | | | | | | | | | | GrCrArCrCrGrAr | | GTCGGTG | | |
| | | | | | | | | | | | GrUrCrGrGrUrGr | | CGCATCTG | | |
| | | | | | | | | | | | CrGrCrArCrCrUr | | ACTCCTGA | | |
| | | | | | | | | | | | GrArCrUrCrCrUr | | GGAGAAG | | |
| | | | | | | | | | | | GrArGrGrArGrAr | | TCTG | | |
| | | | | | | | | | | | ArGrU*mC*mU* | | | | |
| | | | | | | | | | | | mG | | | | |
| HBB8_ | GTAACG | 20019 | GTTTTAGAG | 20109 | GAG | | GCACCT | 20289 | GTAACGGCAGA | 20379 | mG*mU*mA*rAr | 20469 | GTAACGG | 20559 | ++ |
| RT16_ | GCAGA | | CTAGAAAT | | AAG | | GACTCC | | CTTCTCCACGTT | | CrGrGrCrArGrAr | | CAGACTTC | | |
| PB | CTTCTC | | AGCAAGTT | | TCT | | TGAG | | TTAGAGCTAGAA | | CrUrUrCrUrCrCr | | TCCACGTT | | |
| S9 | CAC | | AAAATAAG | | | | | | ATAGCAAGTTAA | | ArCrGrUrUrUrUr | | TTAGAGCT | | |
| | | | GCTAGTCCG | | | | | | AATAAGGCTAGT | | ArGrArGrCrUrAr | | AGAAATA | | |
| | | | TTATCAACT | | | | | | CCGTTATCAACT | | GrArArArUrArGr | | GCAAGTT | | |
| | | | TGAAAAAG | | | | | | TGAAAAAGTGG | | CrArArGrUrUrAr | | AAAATAA | | |
| | | | TGGCACCG | | | | | | CACCGAGTCGGT | | ArArArUrArArGr | | GGCTAGT | | |
| | | | AGTCGGTG | | | | | | GCGCACCTGACT | | GrCrUrArGrUrCr | | CCGTTATC | | |
| | | | C | | | | | | CCTGAGGAGAA | | CrGrUrUrArUrCr | | AACTTGA | | |
| | | | | | | | | | GTCT | | ArArCrUrUrGrAr | | AAAAGTG | | |
| | | | | | | | | | | | ArArArArGrUrGr | | GCACCGA | | |
| | | | | | | | | | | | GrCrArCrCrGrAr | | GTCGGTG | | |
| | | | | | | | | | | | GrUrCrGrGrUrGr | | CGCATCTG | | |
| | | | | | | | | | | | CrGrCrArCrCrUr | | ACTCCTGA | | |
| | | | | | | | | | | | GrArCrUrCrCrUr | | GGAGAAG | | |
| | | | | | | | | | | | GrArGrGrArGrAr | | TCT | | |
| | | | | | | | | | | | ArG*mU*mC*m | | | | |
| | | | | | | | | | | | U | | | | |
| HBB8_ | GTAACG | 20020 | GTTTTAGAG | 20110 | GAG | | GCACCT | 20290 | GTAACGGCAGA | 20380 | mG*mU*mA*rAr | 20470 | GTAACGG | 20560 | ++ |
| RT16_ | GCAGA | | CTAGAAAT | | AAG | | GACTCC | | CTTCTCCACGTT | | CrGrGrCrArGrAr | | CAGACTTC | | |
| PB | CTTCTC | | AGCAAGTT | | TC | | TGAG | | TTAGAGCTAGAA | | CrUrUrCrUrCrCr | | TCCACGTT | | |
| S8 | CAC | | AAAATAAG | | | | | | ATAGCAAGTTAA | | ArCrGrUrUrUrUr | | TTAGAGCT | | |
| | | | GCTAGTCCG | | | | | | AATAAGGCTAGT | | ArGrArGrCrUrAr | | AGAAATA | | |
| | | | TTATCAACT | | | | | | CCGTTATCAACT | | GrArArArUrArGr | | GCAAGTT | | |
| | | | TGAAAAAG | | | | | | TGAAAAAGTGG | | CrArArGrUrUrAr | | AAAATAA | | |
| | | | TGGCACCG | | | | | | CACCGAGTCGGT | | ArArArUrArArGr | | GGCTAGT | | |
| | | | AGTCGGTG | | | | | | GCGCACCTGACT | | GrCrUrArGrUrCr | | CCGTTATC | | |
| | | | C | | | | | | CCTGAGGAGAA | | CrGrUrUrArUrCr | | AACTTGA | | |
| | | | | | | | | | GTC | | ArArCrUrUrGrAr | | AAAAGTG | | |
| | | | | | | | | | | | ArArArArGrUrGr | | GCACCGA | | |
| | | | | | | | | | | | GrCrArCrCrGrAr | | GTCGGTG | | |
| | | | | | | | | | | | GrUrCrGrGrUrGr | | CGCATCTG | | |
| | | | | | | | | | | | CrGrCrArCrCrUr | | ACTCCTGA | | |
| | | | | | | | | | | | GrArCrUrCrCrUr | | GGAGAAG | | |
| | | | | | | | | | | | GrArGrGrArGrAr | | TC | | |
| | | | | | | | | | | | A*mG*mU*mC | | | | |
| HBB8_ | GTAACG | 20021 | GTTTTAGAG | 20111 | GAG | 20201 | ACCTGA | 20291 | GTAACGGCAGA | 20381 | mG*mU*mA*rAr | 20471 | GTAACGG | 20561 | |
| RT14_ | GCAGA | | CTAGAAAT | | AAG | | CTCCTG | | CTTCTCCACGTT | | CrGrGrCrArGrAr | | CAGACTTC | | |
| PB | CTTCTC | | AGCAAGTT | | TCT | | AG | | TTAGAGCTAGAA | | CrUrUrCrUrCrCr | | TCCACGTT | | |
| S17 | CAC | | AAAATAAG | | GCC | | | | ATAGCAAGTTAA | | ArCrGrUrUrUrUr | | TTAGAGCT | | |
| | | | GCTAGTCCG | | GTT | | | | AATAAGGCTAGT | | ArGrArGrCrUrAr | | AGAAATA | | |
| | | | TTATCAACT | | AC | | | | CCGTTATCAACT | | GrArArArUrArGr | | GCAAGTT | | |
| | | | TGAAAAAG | | | | | | TGAAAAAGTGG | | CrArArGrUrUrAr | | AAAATAA | | |
| | | | TGGCACCG | | | | | | CACCGAGTCGGT | | ArArArUrArArGr | | GGCTAGT | | |
| | | | AGTCGGTG | | | | | | GCACCTGACTCC | | GrCrUrArGrUrCr | | CCGTTATC | | |
| | | | C | | | | | | TGAGGAGAAGT | | CrGrUrUrArUrCr | | AACTTGA | | |
| | | | | | | | | | CTGCCGTTAC | | ArArCrUrUrGrAr | | AAAAGTG | | |
| | | | | | | | | | | | ArArArArGrUrGr | | GCACCGA | | |
| | | | | | | | | | | | GrCrArCrCrGrAr | | GTCGGTG | | |
| | | | | | | | | | | | GrUrCrGrGrUrGr | | CATCTGAC | | |
| | | | | | | | | | | | CrArCrCrUrGrAr | | TCCTGAG | | |
| | | | | | | | | | | | CrUrCrCrUrGrAr | | GAGAAGT | | |
| | | | | | | | | | | | GrGrArGrArArGr | | CTGCCGTT | | |
| | | | | | | | | | | | UrCrUrGrCrCrGr | | AC | | |
| | | | | | | | | | | | U*mU*mA*mC | | | | |
| HBB8_ | GTAACG | 20022 | GTTTTAGAG | 20112 | GAG | 20202 | ACCTGA | 20292 | GTAACGGCAGA | 20382 | mG*mU*mA*rAr | 20472 | GTAACGG | 20562 | ++ |
| RT1 | GCAGA | | CTAGAAAT | | AAG | | CTCCTG | | CTTCTCCACGTT | | CrGrGrCrArGrAr | | CAGACTTC | | |
| 4_ | CTTCTC | | AGCAAGTT | | TCT | | AG | | TTAGAGCTAGAA | | CrUrUrCrUrCrCr | | TCCACGTT | | |
| PB | CAC | | AAAATAAG | | GCC | | | | ATAGCAAGTTAA | | ArCrGrUrUrUrUr | | TTAGAGCT | | |
| S16 | | | GCTAGTCCG | | GTT | | | | AATAAGGCTAGT | | ArGrArGrCrUrAr | | AGAAATA | | |
| | | | TTATCAACT | | A | | | | CCGTTATCAACT | | GrArArArUrArGr | | GCAAGTT | | |
| | | | TGAAAAAG | | | | | | TGAAAAAGTGG | | CrArArGrUrUrAr | | AAAATAA | | |
| | | | TGGCACCG | | | | | | CACCGAGTCGGT | | ArArArUrArArGr | | GGCTAGT | | |
| | | | AGTCGGTG | | | | | | GCACCTGACTCC | | GrCrUrArGrUrCr | | CCGTTATC | | |
| | | | C | | | | | | TGAGGAGAAGT | | CrGrUrUrArUrCr | | AACTTGA | | |
| | | | | | | | | | CTGCCGTTA | | ArArCrUrUrGrAr | | AAAAGTG | | |
| | | | | | | | | | | | ArArArArGrUrGr | | GCACCGA | | |
| | | | | | | | | | | | GrCrArCrCrGrAr | | GTCGGTG | | |
| | | | | | | | | | | | GrUrCrGrGrUrGr | | CATCTGAC | | |
| | | | | | | | | | | | CrArCrCrUrGrAr | | TCCTGAG | | |
| | | | | | | | | | | | CrUrCrCrUrGrAr | | GAGAAGT | | |
| | | | | | | | | | | | GrGrArGrArArGr | | CTGCCGTT | | |
| | | | | | | | | | | | UrCrUrGrCrCrG* | | A | | |
| | | | | | | | | | | | mU*mU*mA | | | | |
| HBB8_ | GTAACG | 20023 | GTTTTAGAG | 20113 | GAG | 20203 | ACCTGA | 20293 | GTAACGGCAGA | 20383 | mG*mU*mA*rAr | 20473 | GTAACGG | 20563 | ++ |
| RT14_ | GCAGA | | CTAGAAAT | | AAG | | CTCCTG | | CTTCTCCACGTT | | CrGrGrCrArGrAr | | CAGACTTC | | |
| PB | CTTCTC | | AGCAAGTT | | TCT | | AG | | TTAGAGCTAGAA | | CrUrUrCrUrCrCr | | TCCACGTT | | |
| S15 | CAC | | AAAATAAG | | GCC | | | | ATAGCAAGTTAA | | ArCrGrUrUrUrUr | | TTAGAGCT | | |
| | | | GCTAGTCCG | | GTT | | | | AATAAGGCTAGT | | ArGrArGrCrUrAr | | AGAAATA | | |
| | | | TTATCAACT | | | | | | CCGTTATCAACT | | GrArArArUrArGr | | GCAAGTT | | |
| | | | TGAAAAAG | | | | | | TGAAAAAGTGG | | CrArArGrUrUrAr | | AAAATAA | | |
| | | | TGGCACCG | | | | | | CACCGAGTCGGT | | ArArArUrArArGr | | GGCTAGT | | |
| | | | AGTCGGTG | | | | | | GCACCTGACTCC | | GrCrUrArGrUrCr | | CCGTTATC | | |
| | | | C | | | | | | TGAGGAGAAGT | | CrGrUrUrArUrCr | | AACTTGA | | |
| | | | | | | | | | CTGCCGTT | | ArArCrUrUrGrAr | | AAAAGTG | | |
| | | | | | | | | | | | ArArArArGrUrGr | | GCACCGA | | |
| | | | | | | | | | | | GrCrArCrCrGrAr | | GTCGGTG | | |
| | | | | | | | | | | | GrUrCrGrGrUrGr | | CATCTGAC | | |
| | | | | | | | | | | | CrArCrCrUrGrAr | | TCCTGAG | | |
| | | | | | | | | | | | CrUrCrCrUrGrAr | | GAGAAGT | | |
| | | | | | | | | | | | GrGrArGrArArGr | | CTGCCGTT | | |
| | | | | | | | | | | | UrCrUrGrCrC*m | | | | |
| | | | | | | | | | | | G*mU*mU | | | | |
| HBB8_ | GTAACG | 20024 | GTTTTAGAG | 20114 | GAG | 20204 | ACCTGA | 20294 | GTAACGGCAGA | 20384 | mG*mU*mA*rAr | 20474 | GTAACGG | 20564 | +++ |
| RT14_ | GCAGA | | CTAGAAAT | | AAG | | CTCCTG | | CTTCTCCACGTT | | CrGrGrCrArGrAr | | CAGACTTC | | |
| PB | CTTCTC | | AGCAAGTT | | TCT | | AG | | TTAGAGCTAGAA | | CrUrUrCrUrCrCr | | TCCACGTT | | |
| S14 | CAC | | AAAATAAG | | GCC | | | | ATAGCAAGTTAA | | ArCrGrUrUrUrUr | | TTAGAGCT | | |
| | | | GCTAGTCCG | | GT | | | | AATAAGGCTAGT | | ArGrArGrCrUrAr | | AGAAATA | | |
| | | | TTATCAACT | | | | | | CCGTTATCAACT | | GrArArArUrArGr | | GCAAGTT | | |
| | | | TGAAAAAG | | | | | | TGAAAAAGTGG | | CrArArGrUrUrAr | | AAAATAA | | |
| | | | TGGCACCG | | | | | | CACCGAGTCGGT | | ArArArUrArArGr | | GGCTAGT | | |
| | | | AGTCGGTG | | | | | | GCACCTGACTCC | | GrCrUrArGrUrCr | | CCGTTATC | | |
| | | | C | | | | | | TGAGGAGAAGT | | CrGrUrUrArUrCr | | AACTTGA | | |
| | | | | | | | | | CTGCCGT | | ArArCrUrUrGrAr | | AAAAGTG | | |
| | | | | | | | | | | | ArArArArGrUrGr | | GCACCGA | | |
| | | | | | | | | | | | GrCrArCrCrGrAr | | GTCGGTG | | |
| | | | | | | | | | | | GrUrCrGrGrUrGr | | CATCTGAC | | |
| | | | | | | | | | | | CrArCrCrUrGrAr | | TCCTGAG | | |
| | | | | | | | | | | | CrUrCrCrUrGrAr | | GAGAAGT | | |
| | | | | | | | | | | | GrGrArGrArArGr | | CTGCCGT | | |
| | | | | | | | | | | | UrCrUrGrC*mC* | | | | |
| | | | | | | | | | | | mG*mU | | | | |
| HBB8_ | GTAACG | 20025 | GTTTTAGAG | 20115 | GAG | 20205 | ACCTGA | 20295 | GTAACGGCAGA | 20385 | mG*mU*mA*rAr | 20475 | GTAACGG | 20565 | +++ |
| RT14_ | GCAGA | | CTAGAAAT | | AAG | | CTCCTG | | CTTCTCCACGTT | | CrGrGrCrArGrAr | | CAGACTTC | | |
| PB | CTTCTC | | AGCAAGTT | | TCT | | AG | | TTAGAGCTAGAA | | CrUrUrCrUrCrCr | | TCCACGTT | | |
| S13 | CAC | | AAAATAAG | | GCC | | | | ATAGCAAGTTAA | | ArCrGrUrUrUrUr | | TTAGAGCT | | |
| | | | GCTAGTCCG | | G | | | | AATAAGGCTAGT | | ArGrArGrCrUrAr | | AGAAATA | | |
| | | | TTATCAACT | | | | | | CCGTTATCAACT | | GrArArArUrArGr | | GCAAGTT | | |
| | | | TGAAAAAG | | | | | | TGAAAAAGTGG | | CrArArGrUrUrAr | | AAAATAA | | |
| | | | TGGCACCG | | | | | | CACCGAGTCGGT | | ArArArUrArArGr | | GGCTAGT | | |
| | | | AGTCGGTG | | | | | | GCACCTGACTCC | | GrCrUrArGrUrCr | | CCGTTATC | | |
| | | | C | | | | | | TGAGGAGAAGT | | CrGrUrUrArUrCr | | AACTTGA | | |
| | | | | | | | | | CTGCCG | | ArArCrUrUrGrAr | | AAAAGTG | | |
| | | | | | | | | | | | ArArArArGrUrGr | | GCACCGA | | |
| | | | | | | | | | | | GrCrArCrCrGrAr | | GTCGGTG | | |
| | | | | | | | | | | | GrUrCrGrGrUrGr | | CATCTGAC | | |
| | | | | | | | | | | | CrArCrCrUrGrAr | | TCCTGAG | | |
| | | | | | | | | | | | CrUrCrCrUrGrAr | | GAGAAGT | | |
| | | | | | | | | | | | GrGrArGrArArGr | | CTGCCG | | |
| | | | | | | | | | | | UrCrUrG*mC*m | | | | |
| | | | | | | | | | | | C*mG | | | | |
| HBB8_ | GTAACG | 20026 | GTTTTAGAG | 20116 | GAG | 20206 | ACCTGA | 20296 | GTAACGGCAGA | 20386 | mG*mU*mA*rAr | 20476 | GTAACGG | 20566 | +++ |
| RT14_ | GCAGA | | CTAGAAAT | | AAG | | CTCCTG | | CTTCTCCACGTT | | CrGrGrCrArGrAr | | CAGACTTC | | |
| PB | CTTCTC | | AGCAAGTT | | TCT | | AG | | TTAGAGCTAGAA | | CrUrUrCrUrCrCr | | TCCACGTT | | |
| S12 | CAC | | AAAATAAG | | GCC | | | | ATAGCAAGTTAA | | ArCrGrUrUrUrUr | | TTAGAGCT | | |
| | | | GCTAGTCCG | | | | | | AATAAGGCTAGT | | ArGrArGrCrUrAr | | AGAAATA | | |
| | | | TTATCAACT | | | | | | CCGTTATCAACT | | GrArArArUrArGr | | GCAAGTT | | |
| | | | TGAAAAAG | | | | | | TGAAAAAGTGG | | CrArArGrUrUrAr | | AAAATAA | | |
| | | | TGGCACCG | | | | | | CACCGAGTCGGT | | ArArArUrArArGr | | GGCTAGT | | |
| | | | AGTCGGTG | | | | | | GCACCTGACTCC | | GrCrUrArGrUrCr | | CCGTTATC | | |
| | | | C | | | | | | TGAGGAGAAGT | | CrGrUrUrArUrCr | | AACTTGA | | |
| | | | | | | | | | CTGCC | | ArArCrUrUrGrAr | | AAAAGTG | | |
| | | | | | | | | | | | ArArArArGrUrGr | | GCACCGA | | |
| | | | | | | | | | | | GrCrArCrCrGrAr | | GTCGGTG | | |
| | | | | | | | | | | | GrUrCrGrGrUrGr | | CATCTGAC | | |
| | | | | | | | | | | | CrArCrCrUrGrAr | | TCCTGAG | | |
| | | | | | | | | | | | CrUrCrCrUrGrAr | | GAGAAGT | | |
| | | | | | | | | | | | GrGrArGrArArGr | | CTGCC | | |
| | | | | | | | | | | | UrCrU*mG*mC* | | | | |
| | | | | | | | | | | | mC | | | | |
| HBB8_ | GTAACG | 20027 | GTTTTAGAG | 20117 | GAG | 20207 | ACCTGA | 20297 | GTAACGGCAGA | 20387 | mG*mU*mA*rAr | 20477 | GTAACGG | 20567 | ++ |
| RT14_ | GCAGA | | CTAGAAAT | | AAG | | CTCCTG | | CTTCTCCACGTT | | CrGrGrCrArGrAr | | CAGACTTC | | |
| PB | CTTCTC | | AGCAAGTT | | TCT | | AG | | TTAGAGCTAGAA | | CrUrUrCrUrCrCr | | TCCACGTT | | |
| S11 | CAC | | AAAATAAG | | GC | | | | ATAGCAAGTTAA | | ArCrGrUrUrUrUr | | TTAGAGCT | | |
| | | | GCTAGTCCG | | | | | | AATAAGGCTAGT | | ArGrArGrCrUrAr | | AGAAATA | | |
| | | | TTATCAACT | | | | | | CCGTTATCAACT | | GrArArArUrArGr | | GCAAGTT | | |
| | | | TGAAAAAG | | | | | | TGAAAAAGTGG | | CrArArGrUrUrAr | | AAAATAA | | |
| | | | TGGCACCG | | | | | | CACCGAGTCGGT | | ArArArUrArArGr | | GGCTAGT | | |
| | | | AGTCGGTG | | | | | | GCACCTGACTCC | | GrCrUrArGrUrCr | | CCGTTATC | | |
| | | | C | | | | | | TGAGGAGAAGT | | CrGrUrUrArUrCr | | AACTTGA | | |
| | | | | | | | | | CTGC | | ArArCrUrUrGrAr | | AAAAGTG | | |
| | | | | | | | | | | | ArArArArGrUrGr | | GCACCGA | | |
| | | | | | | | | | | | GrCrArCrCrGrAr | | GTCGGTG | | |
| | | | | | | | | | | | GrUrCrGrGrUrGr | | CATCTGAC | | |
| | | | | | | | | | | | CrArCrCrUrGrAr | | TCCTGAG | | |
| | | | | | | | | | | | CrUrCrCrUrGrAr | | GAGAAGT | | |
| | | | | | | | | | | | GrGrArGrArArGr | | CTGC | | |
| | | | | | | | | | | | UrC*mU*mG*m | | | | |
| | | | | | | | | | | | C | | | | |
| HBB8_ | GTAACG | 20028 | GTTTTAGAG | 20118 | GAG | 20208 | ACCTGA | 20298 | GTAACGGCAGA | 20388 | mG*mU*mA*rAr | 20478 | GTAACGG | 20568 | ++ |
| RT14_ | GCAGA | | CTAGAAAT | | AAG | | CTCCTG | | CTTCTCCACGTT | | CrGrGrCrArGrAr | | CAGACTTC | | |
| PB | CTTCTC | | AGCAAGTT | | TCT | | AG | | TTAGAGCTAGAA | | CrUrUrCrUrCrCr | | TCCACGTT | | |
| S10 | CAC | | AAAATAAG | | G | | | | ATAGCAAGTTAA | | ArCrGrUrUrUrUr | | TTAGAGCT | | |
| | | | GCTAGTCCG | | | | | | AATAAGGCTAGT | | ArGrArGrCrUrAr | | AGAAATA | | |
| | | | TTATCAACT | | | | | | CCGTTATCAACT | | GrArArArUrArGr | | GCAAGTT | | |
| | | | TGAAAAAG | | | | | | TGAAAAAGTGG | | CrArArGrUrUrAr | | AAAATAA | | |
| | | | TGGCACCG | | | | | | CACCGAGTCGGT | | ArArArUrArArGr | | GGCTAGT | | |
| | | | AGTCGGTG | | | | | | GCACCTGACTCC | | GrCrUrArGrUrCr | | CCGTTATC | | |
| | | | C | | | | | | TGAGGAGAAGT | | CrGrUrUrArUrCr | | AACTTGA | | |
| | | | | | | | | | CTG | | ArArCrUrUrGrAr | | AAAAGTG | | |
| | | | | | | | | | | | ArArArArGrUrGr | | GCACCGA | | |
| | | | | | | | | | | | GrCrArCrCrGrAr | | GTCGGTG | | |
| | | | | | | | | | | | GrUrCrGrGrUrGr | | CATCTGAC | | |
| | | | | | | | | | | | CrArCrCrUrGrAr | | TCCTGAG | | |
| | | | | | | | | | | | CrUrCrCrUrGrAr | | GAGAAGT | | |
| | | | | | | | | | | | GrGrArGrArArGr | | CTG | | |
| | | | | | | | | | | | U*mC*mU*mG | | | | |
| HBB8_ | GTAACG | 20029 | GTTTTAGAG | 20119 | GAG | | ACCTGA | 20299 | GTAACGGCAGA | 20389 | mG*mU*mA*rAr | 20479 | GTAACGG | 20569 | ++ |
| RT14_ | GCAGA | | CTAGAAAT | | AAG | | CTCCTG | | CTTCTCCACGTT | | CrGrGrCrArGrAr | | CAGACTTC | | |
| PB | CTTCTC | | AGCAAGTT | | TCT | | AG | | TTAGAGCTAGAA | | CrUrUrCrUrCrCr | | TCCACGTT | | |
| S9 | CAC | | AAAATAAG | | | | | | ATAGCAAGTTAA | | ArCrGrUrUrUrUr | | TTAGAGCT | | |
| | | | GCTAGTCCG | | | | | | AATAAGGCTAGT | | ArGrArGrCrUrAr | | AGAAATA | | |
| | | | TTATCAACT | | | | | | CCGTTATCAACT | | GrArArArUrArGr | | GCAAGTT | | |
| | | | TGAAAAAG | | | | | | TGAAAAAGTGG | | CrArArGrUrUrAr | | AAAATAA | | |
| | | | TGGCACCG | | | | | | CACCGAGTCGGT | | ArArArUrArArGr | | GGCTAGT | | |
| | | | AGTCGGTG | | | | | | GCACCTGACTCC | | GrCrUrArGrUrCr | | CCGTTATC | | |
| | | | C | | | | | | TGAGGAGAAGT | | CrGrUrUrArUrCr | | AACTTGA | | |
| | | | | | | | | | CT | | ArArCrUrUrGrAr | | AAAAGTG | | |
| | | | | | | | | | | | ArArArArGrUrGr | | GCACCGA | | |
| | | | | | | | | | | | GrCrArCrCrGrAr | | GTCGGTG | | |
| | | | | | | | | | | | GrUrCrGrGrUrGr | | CATCTGAC | | |
| | | | | | | | | | | | CrArCrCrUrGrAr | | TCCTGAG | | |
| | | | | | | | | | | | CrUrCrCrUrGrAr | | GAGAAGT | | |
| | | | | | | | | | | | GrGrArGrArArG* | | CT | | |
| | | | | | | | | | | | mU*mC*mU | | | | |
| HBB8_ | GTAACG | 20030 | GTTTTAGAG | 20120 | GAG | | ACCTGA | 20300 | GTAACGGCAGA | 20390 | mG*mU*mA*rAr | 20480 | GTAACGG | 20570 | ++ |
| RT14_ | GCAGA | | CTAGAAAT | | AAG | | CTCCTG | | CTTCTCCACGTT | | CrGrGrCrArGrAr | | CAGACTTC | | |
| PB | CTTCTC | | AGCAAGTT | | TC | | AG | | TTAGAGCTAGAA | | CrUrUrCrUrCrCr | | TCCACGTT | | |
| S8 | CAC | | AAAATAAG | | | | | | ATAGCAAGTTAA | | ArCrGrUrUrUrUr | | TTAGAGCT | | |
| | | | GCTAGTCCG | | | | | | AATAAGGCTAGT | | ArGrArGrCrUrAr | | AGAAATA | | |
| | | | TTATCAACT | | | | | | CCGTTATCAACT | | GrArArArUrArGr | | GCAAGTT | | |
| | | | TGAAAAAG | | | | | | TGAAAAAGTGG | | CrArArGrUrUrAr | | AAAATAA | | |
| | | | TGGCACCG | | | | | | CACCGAGTCGGT | | ArArArUrArArGr | | GGCTAGT | | |
| | | | AGTCGGTG | | | | | | GCACCTGACTCC | | GrCrUrArGrUrCr | | CCGTTATC | | |
| | | | C | | | | | | TGAGGAGAAGT | | CrGrUrUrArUrCr | | AACTTGA | | |
| | | | | | | | | | C | | ArArCrUrUrGrAr | | AAAAGTG | | |
| | | | | | | | | | | | ArArArArGrUrGr | | GCACCGA | | |
| | | | | | | | | | | | GrCrArCrCrGrAr | | GTCGGTG | | |
| | | | | | | | | | | | GrUrCrGrGrUrGr | | CATCTGAC | | |
| | | | | | | | | | | | CrArCrCrUrGrAr | | TCCTGAG | | |
| | | | | | | | | | | | CrUrCrCrUrGrAr | | GAGAAGT | | |
| | | | | | | | | | | | GrGrArGrArA*m | | C | | |
| | | | | | | | | | | | G*mU*mC | | | | |
| HBB8 | GTAACG | 20031 | GTTTTAGAG | 20121 | GAG | 20211 | TGACTC | 20301 | GTAACGGCAGA | 20391 | mG*mU*mA*rAr | 20481 | GTAACGG | 20571 | + |
| _RT1 | GCAGA | | CTAGAAAT | | AAG | | CTGAG | | CTTCTCCACGTT | | CrGrGrCrArGrAr | | CAGACTTC | | |
| 1_ | CTTCTC | | AGCAAGTT | | TCT | | | | TTAGAGCTAGAA | | CrUrUrCrUrCrCr | | TCCACGTT | | |
| PB | CAC | | AAAATAAG | | GCC | | | | ATAGCAAGTTAA | | ArCrGrUrUrUrUr | | TTAGAGCT | | |
| S17 | | | GCTAGTCCG | | GTT | | | | AATAAGGCTAGT | | ArGrArGrCrUrAr | | AGAAATA | | |
| | | | TTATCAACT | | AC | | | | CCGTTATCAACT | | GrArArArUrArGr | | GCAAGTT | | |
| | | | TGAAAAAG | | | | | | TGAAAAAGTGG | | CrArArGrUrUrAr | | AAAATAA | | |
| | | | TGGCACCG | | | | | | CACCGAGTCGGT | | ArArArUrArArGr | | GGCTAGT | | |
| | | | AGTCGGTG | | | | | | GCTGACTCCTGA | | GrCrUrArGrUrCr | | CCGTTATC | | |
| | | | C | | | | | | GGAGAAGTCTG | | CrGrUrUrArUrCr | | AACTTGA | | |
| | | | | | | | | | CCGTTAC | | ArArCrUrUrGrAr | | AAAAGTG | | |
| | | | | | | | | | | | ArArArArGrUrGr | | GCACCGA | | |
| | | | | | | | | | | | GrCrArCrCrGrAr | | GTCGGTG | | |
| | | | | | | | | | | | GrUrCrGrGrUrGr | | CTGACTCC | | |
| | | | | | | | | | | | CrUrGrArCrUrCr | | TGAGGAG | | |
| | | | | | | | | | | | CrUrGrArGrGrAr | | AAGTCTG | | |
| | | | | | | | | | | | GrArArGrUrCrUr | | CCGTTAC | | |
| | | | | | | | | | | | GrCrCrGrU*mU* | | | | |
| | | | | | | | | | | | mA*mC | | | | |
| HBB8 | GTAACG | 20032 | GTTTTAGAG | 20122 | GAG | 20212 | TGACTC | 20302 | GTAACGGCAGA | 20392 | mG*mU*mA*rAr | 20482 | GTAACGG | 20572 | ++ |
| _RT1 | GCAGA | | CTAGAAAT | | AAG | | CTGAG | | CTTCTCCACGTT | | CrGrGrCrArGrAr | | CAGACTTC | | |
| 1_PB | CTTCTC | | AGCAAGTT | | TCT | | | | TTAGAGCTAGAA | | CrUrUrCrUrCrCr | | TCCACGTT | | |
| S16 | CAC | | AAAATAAG | | GCC | | | | ATAGCAAGTTAA | | ArCrGrUrUrUrUr | | TTAGAGCT | | |
| | | | GCTAGTCCG | | GTT | | | | AATAAGGCTAGT | | ArGrArGrCrUrAr | | AGAAATA | | |
| | | | TTATCAACT | | A | | | | CCGTTATCAACT | | GrArArArUrArGr | | GCAAGTT | | |
| | | | TGAAAAAG | | | | | | TGAAAAAGTGG | | CrArArGrUrUrAr | | AAAATAA | | |
| | | | TGGCACCG | | | | | | CACCGAGTCGGT | | ArArArUrArArGr | | GGCTAGT | | |
| | | | AGTCGGTG | | | | | | GCTGACTCCTGA | | GrCrUrArGrUrCr | | CCGTTATC | | |
| | | | C | | | | | | GGAGAAGTCTG | | CrGrUrUrArUrCr | | AACTTGA | | |
| | | | | | | | | | CCGTTA | | ArArCrUrUrGrAr | | AAAAGTG | | |
| | | | | | | | | | | | ArArArArGrUrGr | | GCACCGA | | |
| | | | | | | | | | | | GrCrArCrCrGrAr | | GTCGGTG | | |
| | | | | | | | | | | | GrUrCrGrGrUrGr | | CTGACTCC | | |
| | | | | | | | | | | | CrUrGrArCrUrCr | | TGAGGAG | | |
| | | | | | | | | | | | CrUrGrArGrGrAr | | | | |
| | | | | | | | | | | | GrArArGrUrCrUr | | AAGTCTG | | |
| | | | | | | | | | | | GrCrCrG*mU*m | | CCGTTA | | |
| | | | | | | | | | | | U*mA | | | | |
| HBB8 | GTAACG | 20033 | GTTTTAGAG | 20123 | GAG | 20213 | TGACTC | 20303 | GTAACGGCAGA | 20393 | mG*mU*mA*rAr | 20483 | GTAACGG | 20573 | ++ |
| _RT1 | GCAGA | | CTAGAAAT | | AAG | | CTGAG | | CTTCTCCACGTT | | CrGrGrCrArGrAr | | CAGACTTC | | |
| 1_ | CTTCTC | | AGCAAGTT | | TCT | | | | TTAGAGCTAGAA | | CrUrUrCrUrCrCr | | TCCACGTT | | |
| PB | CAC | | AAAATAAG | | GCC | | | | ATAGCAAGTTAA | | ArCrGrUrUrUrUr | | TTAGAGCT | | |
| S15 | | | GCTAGTCCG | | GTT | | | | AATAAGGCTAGT | | ArGrArGrCrUrAr | | AGAAATA | | |
| | | | TTATCAACT | | | | | | CCGTTATCAACT | | GrArArArUrArGr | | GCAAGTT | | |
| | | | TGAAAAAG | | | | | | TGAAAAAGTGG | | CrArArGrUrUrAr | | AAAATAA | | |
| | | | TGGCACCG | | | | | | CACCGAGTCGGT | | ArArArUrArArGr | | GGCTAGT | | |
| | | | AGTCGGTG | | | | | | GCTGACTCCTGA | | GrCrUrArGrUrCr | | CCGTTATC | | |
| | | | C | | | | | | GGAGAAGTCTG | | CrGrUrUrArUrCr | | AACTTGA | | |
| | | | | | | | | | CCGTT | | ArArCrUrUrGrAr | | AAAAGTG | | |
| | | | | | | | | | | | ArArArArGrUrGr | | GCACCGA | | |
| | | | | | | | | | | | GrCrArCrCrGrAr | | GTCGGTG | | |
| | | | | | | | | | | | GrUrCrGrGrUrGr | | CTGACTCC | | |
| | | | | | | | | | | | CrUrGrArCrUrCr | | TGAGGAG | | |
| | | | | | | | | | | | CrUrGrArGrGrAr | | AAGTCTG | | |
| | | | | | | | | | | | GrArArGrUrCrUr | | CCGTT | | |
| | | | | | | | | | | | GrCrC*mG*mU* | | | | |
| | | | | | | | | | | | mU | | | | |
| HBB8_ | GTAACG | 20034 | GTTTTAGAG | 20124 | GAG | 20214 | TGACTC | 20304 | GTAACGGCAGA | 20394 | mG*mU*mA*rAr | 20484 | GTAACGG | 20574 | ++ |
| RT11_ | GCAGA | | CTAGAAAT | | AAG | | CTGAG | | CTTCTCCACGTT | | CrGrGrCrArGrAr | | CAGACTTC | | |
| PB | CTTCTC | | AGCAAGTT | | TCT | | | | TTAGAGCTAGAA | | CrUrUrCrUrCrCr | | TCCACGTT | | |
| S14 | CAC | | AAAATAAG | | GCC | | | | ATAGCAAGTTAA | | ArCrGrUrUrUrUr | | TTAGAGCT | | |
| | | | GCTAGTCCG | | GT | | | | AATAAGGCTAGT | | ArGrArGrCrUrAr | | AGAAATA | | |
| | | | TTATCAACT | | | | | | CCGTTATCAACT | | GrArArArUrArGr | | GCAAGTT | | |
| | | | TGAAAAAG | | | | | | TGAAAAAGTGG | | CrArArGrUrUrAr | | AAAATAA | | |
| | | | TGGCACCG | | | | | | CACCGAGTCGGT | | ArArArUrArArGr | | GGCTAGT | | |
| | | | AGTCGGTG | | | | | | GCTGACTCCTGA | | GrCrUrArGrUrCr | | CCGTTATC | | |
| | | | C | | | | | | GGAGAAGTCTG | | CrGrUrUrArUrCr | | AACTTGA | | |
| | | | | | | | | | CCGT | | ArArCrUrUrGrAr | | AAAAGTG | | |
| | | | | | | | | | | | ArArArArGrUrGr | | GCACCGA | | |
| | | | | | | | | | | | GrCrArCrCrGrAr | | GTCGGTG | | |
| | | | | | | | | | | | GrUrCrGrGrUrGr | | CTGACTCC | | |
| | | | | | | | | | | | CrUrGrArCrUrCr | | TGAGGAG | | |
| | | | | | | | | | | | CrUrGrArGrGrAr | | AAGTCTG | | |
| | | | | | | | | | | | GrArArGrUrCrUr | | CCGT | | |
| | | | | | | | | | | | GrC*mC*mG*m | | | | |
| | | | | | | | | | | | U | | | | |
| HBB8_ | GTAACG | 20035 | GTTTTAGAG | 20125 | GAG | 20215 | TGACTC | 20305 | GTAACGGCAGA | 20395 | mG*mU*mA*rAr | 20485 | GTAACGG | 20575 | +++ |
| RT11_ | GCAGA | | CTAGAAAT | | AAG | | CTGAG | | CTTCTCCACGTT | | CrGrGrCrArGrAr | | CAGACTTC | | |
| PB | CTTCTC | | AGCAAGTT | | TCT | | | | TTAGAGCTAGAA | | CrUrUrCrUrCrCr | | TCCACGTT | | |
| S13 | CAC | | AAAATAAG | | GCC | | | | ATAGCAAGTTAA | | ArCrGrUrUrUrUr | | TTAGAGCT | | |
| | | | GCTAGTCCG | | G | | | | AATAAGGCTAGT | | ArGrArGrCrUrAr | | AGAAATA | | |
| | | | TTATCAACT | | | | | | CCGTTATCAACT | | GrArArArUrArGr | | GCAAGTT | | |
| | | | TGAAAAAG | | | | | | TGAAAAAGTGG | | CrArArGrUrUrAr | | AAAATAA | | |
| | | | TGGCACCG | | | | | | CACCGAGTCGGT | | ArArArUrArArGr | | GGCTAGT | | |
| | | | AGTCGGTG | | | | | | GCTGACTCCTGA | | GrCrUrArGrUrCr | | CCGTTATC | | |
| | | | C | | | | | | GGAGAAGTCTG | | CrGrUrUrArUrCr | | AACTTGA | | |
| | | | | | | | | | CCG | | ArArCrUrUrGrAr | | AAAAGTG | | |
| | | | | | | | | | | | ArArArArGrUrGr | | GCACCGA | | |
| | | | | | | | | | | | GrCrArCrCrGrAr | | GTCGGTG | | |
| | | | | | | | | | | | GrUrCrGrGrUrGr | | CTGACTCC | | |
| | | | | | | | | | | | CrUrGrArCrUrCr | | TGAGGAG | | |
| | | | | | | | | | | | CrUrGrArGrGrAr | | AAGTCTG | | |
| | | | | | | | | | | | GrArArGrUrCrUr | | CCG | | |
| | | | | | | | | | | | G*mC*mC*mG | | | | |
| HBB8_ | GTAACG | 20036 | GTTTTAGAG | 20126 | GAG | 20216 | TGACTC | 20306 | GTAACGGCAGA | 20396 | mG*mU*mA*rAr | 20486 | GTAACGG | 20576 | +++ |
| RT11_ | GCAGA | | CTAGAAAT | | AAG | | CTGAG | | CTTCTCCACGTT | | CrGrGrCrArGrAr | | CAGACTTC | | |
| PB | CTTCTC | | AGCAAGTT | | TCT | | | | TTAGAGCTAGAA | | CrUrUrCrUrCrCr | | TCCACGTT | | |
| S12 | CAC | | AAAATAAG | | GCC | | | | ATAGCAAGTTAA | | ArCrGrUrUrUrUr | | TTAGAGCT | | |
| | | | GCTAGTCCG | | | | | | AATAAGGCTAGT | | ArGrArGrCrUrAr | | AGAAATA | | |
| | | | TTATCAACT | | | | | | CCGTTATCAACT | | GrArArArUrArGr | | GCAAGTT | | |
| | | | TGAAAAAG | | | | | | TGAAAAAGTGG | | CrArArGrUrUrAr | | AAAATAA | | |
| | | | TGGCACCG | | | | | | CACCGAGTCGGT | | ArArArUrArArGr | | GGCTAGT | | |
| | | | AGTCGGTG | | | | | | GCTGACTCCTGA | | GrCrUrArGrUrCr | | CCGTTATC | | |
| | | | C | | | | | | GGAGAAGTCTG | | CrGrUrUrArUrCr | | AACTTGA | | |
| | | | | | | | | | CC | | ArArCrUrUrGrAr | | AAAAGTG | | |
| | | | | | | | | | | | ArArArArGrUrGr | | GCACCGA | | |
| | | | | | | | | | | | GrCrArCrCrGrAr | | GTCGGTG | | |
| | | | | | | | | | | | GrUrCrGrGrUrGr | | CTGACTCC | | |
| | | | | | | | | | | | CrUrGrArCrUrCr | | TGAGGAG | | |
| | | | | | | | | | | | CrUrGrArGrGrAr | | AAGTCTG | | |
| | | | | | | | | | | | GrArArGrUrCrU* | | CC | | |
| | | | | | | | | | | | mG*mC*mC | | | | |
| HBB8_ | GTAACG | 20037 | GTTTTAGAG | 20127 | GAG | 20217 | TGACTC | 20307 | GTAACGGCAGA | 20397 | mG*mU*mA*rAr | 20487 | GTAACGG | 20577 | +++ |
| RT11_ | GCAGA | | CTAGAAAT | | AAG | | CTGAG | | CTTCTCCACGTT | | CrGrGrCrArGrAr | | CAGACTTC | | |
| PB | CTTCTC | | AGCAAGTT | | TCT | | | | TTAGAGCTAGAA | | CrUrUrCrUrCrCr | | TCCACGTT | | |
| S11 | CAC | | AAAATAAG | | GC | | | | ATAGCAAGTTAA | | ArCrGrUrUrUrUr | | TTAGAGCT | | |
| | | | GCTAGTCCG | | | | | | AATAAGGCTAGT | | ArGrArGrCrUrAr | | AGAAATA | | |
| | | | TTATCAACT | | | | | | CCGTTATCAACT | | GrArArArUrArGr | | GCAAGTT | | |
| | | | TGAAAAAG | | | | | | TGAAAAAGTGG | | CrArArGrUrUrAr | | AAAATAA | | |
| | | | TGGCACCG | | | | | | CACCGAGTCGGT | | ArArArUrArArGr | | GGCTAGT | | |
| | | | AGTCGGTG | | | | | | GCTGACTCCTGA | | GrCrUrArGrUrCr | | CCGTTATC | | |
| | | | C | | | | | | GGAGAAGTCTG | | CrGrUrUrArUrCr | | AACTTGA | | |
| | | | | | | | | | C | | ArArCrUrUrGrAr | | AAAAGTG | | |
| | | | | | | | | | | | ArArArArGrUrGr | | GCACCGA | | |
| | | | | | | | | | | | GrCrArCrCrGrAr | | GTCGGTG | | |
| | | | | | | | | | | | GrUrCrGrGrUrGr | | CTGACTCC | | |
| | | | | | | | | | | | CrUrGrArCrUrCr | | TGAGGAG | | |
| | | | | | | | | | | | CrUrGrArGrGrAr | | AAGTCTG | | |
| | | | | | | | | | | | GrArArGrUrC*m | | C | | |
| | | | | | | | | | | | U*mG*mC | | | | |
| HBB8_ | GTAACG | 20038 | GTTTTAGAG | 20128 | GAG | 20218 | TGACTC | 20308 | GTAACGGCAGA | 20398 | mG*mU*mA*rAr | 20488 | GTAACGG | 20578 | ++ |
| RT11_ | GCAGA | | CTAGAAAT | | AAG | | CTGAG | | CTTCTCCACGTT | | CrGrGrCrArGrAr | | CAGACTTC | | |
| PB | CTTCTC | | AGCAAGTT | | TCT | | | | TTAGAGCTAGAA | | CrUrUrCrUrCrCr | | TCCACGTT | | |
| S10 | CAC | | AAAATAAG | | G | | | | ATAGCAAGTTAA | | ArCrGrUrUrUrUr | | TTAGAGCT | | |
| | | | GCTAGTCCG | | | | | | AATAAGGCTAGT | | ArGrArGrCrUrAr | | AGAAATA | | |
| | | | TTATCAACT | | | | | | CCGTTATCAACT | | GrArArArUrArGr | | GCAAGTT | | |
| | | | TGAAAAAG | | | | | | TGAAAAAGTGG | | CrArArGrUrUrAr | | AAAATAA | | |
| | | | TGGCACCG | | | | | | CACCGAGTCGGT | | ArArArUrArArGr | | GGCTAGT | | |
| | | | AGTCGGTG | | | | | | GCTGACTCCTGA | | GrCrUrArGrUrCr | | CCGTTATC | | |
| | | | C | | | | | | GGAGAAGTCTG | | CrGrUrUrArUrCr | | AACTTGA | | |
| | | | | | | | | | | | ArArCrUrUrGrAr | | AAAAGTG | | |
| | | | | | | | | | | | ArArArArGrUrGr | | GCACCGA | | |
| | | | | | | | | | | | GrCrArCrCrGrAr | | GTCGGTG | | |
| | | | | | | | | | | | GrUrCrGrGrUrGr | | CTGACTCC | | |
| | | | | | | | | | | | CrUrGrArCrUrCr | | TGAGGAG | | |
| | | | | | | | | | | | CrUrGrArGrGrAr | | AAGTCTG | | |
| | | | | | | | | | | | GrArArGrU*mC* | | | | |
| | | | | | | | | | | | mU*mG | | | | |
| HBB8_ | GTAACG | 20039 | GTTTTAGAG | 20129 | GAG | | TGACTC | 20309 | GTAACGGCAGA | 20390 | mG*mU*mA*rAr | 20489 | GTAACGG | 20579 | ++ |
| RT11_ | GCAGA | | CTAGAAAT | | AAG | | CTGAG | | CTTCTCCACGTT | | CrGrGrCrArGrAr | | CAGACTTC | | |
| PB | CTTCTC | | AGCAAGTT | | TCT | | | | TTAGAGCTAGAA | | CrUrUrCrUrCrCr | | TCCACGTT | | |
| S9 | CAC | | AAAATAAG | | | | | | ATAGCAAGTTAA | | ArCrGrUrUrUrUr | | TTAGAGCT | | |
| | | | GCTAGTCCG | | | | | | AATAAGGCTAGT | | ArGrArGrCrUrAr | | AGAAATA | | |
| | | | TTATCAACT | | | | | | CCGTTATCAACT | | GrArArArUrArGr | | GCAAGTT | | |
| | | | TGAAAAAG | | | | | | TGAAAAAGTGG | | CrArArGrUrUrAr | | AAAATAA | | |
| | | | TGGCACCG | | | | | | CACCGAGTCGGT | | ArArArUrArArGr | | GGCTAGT | | |
| | | | AGTCGGTG | | | | | | GCTGACTCCTGA | | GrCrUrArGrUrCr | | CCGTTATC | | |
| | | | C | | | | | | GGAGAAGTCT | | CrGrUrUrArUrCr | | AACTTGA | | |
| | | | | | | | | | | | ArArCrUrUrGrAr | | AAAAGTG | | |
| | | | | | | | | | | | ArArArArGrUrGr | | GCACCGA | | |
| | | | | | | | | | | | GrCrArCrCrGrAr | | GTCGGTG | | |
| | | | | | | | | | | | GrUrCrGrGrUrGr | | CTGACTCC | | |
| | | | | | | | | | | | CrUrGrArCrUrCr | | TGAGGAG | | |
| | | | | | | | | | | | CrUrGrArGrGrAr | | AAGTCT | | |
| | | | | | | | | | | | GrArArG*mU*m | | | | |
| | | | | | | | | | | | C*mU | | | | |
| HBB8_ | GTAACG | 20040 | GTTTTAGAG | 20130 | GAG | | TGACTC | 20310 | GTAACGGCAGA | 20400 | mG*mU*mA*rAr | 20490 | GTAACGG | 20580 | ++ |
| RT11_ | GCAGA | | CTAGAAAT | | AAG | | CTGAG | | CTTCTCCACGTT | | CrGrGrCrArGrAr | | CAGACTTC | | |
| PB | CTTCTC | | AGCAAGTT | | TC | | | | TTAGAGCTAGAA | | CrUrUrCrUrCrCr | | TCCACGTT | | |
| S8 | CAC | | AAAATAAG | | | | | | ATAGCAAGTTAA | | ArCrGrUrUrUrUr | | TTAGAGCT | | |
| | | | GCTAGTCCG | | | | | | AATAAGGCTAGT | | ArGrArGrCrUrAr | | AGAAATA | | |
| | | | TTATCAACT | | | | | | CCGTTATCAACT | | GrArArArUrArGr | | GCAAGTT | | |
| | | | TGAAAAAG | | | | | | TGAAAAAGTGG | | CrArArGrUrUrAr | | AAAATAA | | |
| | | | TGGCACCG | | | | | | CACCGAGTCGGT | | ArArArUrArArGr | | GGCTAGT | | |
| | | | AGTCGGTG | | | | | | GCTGACTCCTGA | | GrCrUrArGrUrCr | | CCGTTATC | | |
| | | | C | | | | | | GGAGAAGTC | | CrGrUrUrArUrCr | | AACTTGA | | |
| | | | | | | | | | | | ArArCrUrUrGrAr | | AAAAGTG | | |
| | | | | | | | | | | | ArArArArGrUrGr | | GCACCGA | | |
| | | | | | | | | | | | GrCrArCrCrGrAr | | GTCGGTG | | |
| | | | | | | | | | | | GrUrCrGrGrUrGr | | CTGACTCC | | |
| | | | | | | | | | | | CrUrGrArCrUrCr | | TGAGGAG | | |
| | | | | | | | | | | | CrUrGrArGrGrAr | | AAGTC | | |
| | | | | | | | | | | | GrArA*mG*mU* | | | | |
| | | | | | | | | | | | mC | | | | |
| HBB8_ | GTAACG | 20041 | GTTTTAGAG | 20131 | GAG | 20221 | GACTCC | 20311 | GTAACGGCAGA | 20401 | mG*mU*mA*rAr | 20491 | GTAACGG | 20581 | + |
| RT10_ | GCAGA | | CTAGAAAT | | AAG | | TGAG | | CTTCTCCACGTT | | CrGrGrCrArGrAr | | CAGACTTC | | |
| PB | CTTCTC | | AGCAAGTT | | TCT | | | | TTAGAGCTAGAA | | CrUrUrCrUrCrCr | | TCCACGTT | | |
| S17 | CAC | | AAAATAAG | | GCC | | | | ATAGCAAGTTAA | | ArCrGrUrUrUrUr | | TTAGAGCT | | |
| | | | GCTAGTCCG | | GTT | | | | AATAAGGCTAGT | | ArGrArGrCrUrAr | | AGAAATA | | |
| | | | TTATCAACT | | AC | | | | CCGTTATCAACT | | GrArArArUrArGr | | GCAAGTT | | |
| | | | TGAAAAAG | | | | | | TGAAAAAGTGG | | CrArArGrUrUrAr | | AAAATAA | | |
| | | | TGGCACCG | | | | | | CACCGAGTCGGT | | ArArArUrArArGr | | GGCTAGT | | |
| | | | AGTCGGTG | | | | | | GCGACTCCTGAG | | GrCrUrArGrUrCr | | CCGTTATC | | |
| | | | C | | | | | | GAGAAGTCTGCC | | CrGrUrUrArUrCr | | AACTTGA | | |
| | | | | | | | | | GTTAC | | ArArCrUrUrGrAr | | AAAAGTG | | |
| | | | | | | | | | | | ArArArArGrUrGr | | GCACCGA | | |
| | | | | | | | | | | | GrCrArCrCrGrAr | | GTCGGTG | | |
| | | | | | | | | | | | GrUrCrGrGrUrGr | | CGACTCCT | | |
| | | | | | | | | | | | CrGrArCrUrCrCr | | GAGGAGA | | |
| | | | | | | | | | | | UrGrArGrGrArGr | | AGTCTGCC | | |
| | | | | | | | | | | | ArArGrUrCrUrGr | | GTTAC | | |
| | | | | | | | | | | | CrCrGrU*mU*m | | | | |
| | | | | | | | | | | | A*mC | | | | |
| HBB8_ | GTAACG | 20042 | GTTTTAGAG | 20132 | GAG | 20222 | GACTCC | 20312 | GTAACGGCAGA | 20402 | mG*mU*mA*rAr | 20492 | GTAACGG | 20582 | ++ |
| RT10_ | GCAGA | | CTAGAAAT | | AAG | | TGAG | | CTTCTCCACGTT | | CrGrGrCrArGrAr | | CAGACTTC | | |
| PBS16 | CTTCTC | | AGCAAGTT | | TCT | | | | TTAGAGCTAGAA | | CrUrUrCrUrCrCr | | TCCACGTT | | |
| | CAC | | AAAATAAG | | GCC | | | | ATAGCAAGTTAA | | ArCrGrUrUrUrUr | | TTAGAGCT | | |
| | | | GCTAGTCCG | | GTT | | | | AATAAGGCTAGT | | ArGrArGrCrUrAr | | AGAAATA | | |
| | | | TTATCAACT | | A | | | | CCGTTATCAACT | | GrArArArUrArGr | | GCAAGTT | | |
| | | | TGAAAAAG | | | | | | TGAAAAAGTGG | | CrArArGrUrUrAr | | AAAATAA | | |
| | | | TGGCACCG | | | | | | CACCGAGTCGGT | | ArArArUrArArGr | | GGCTAGT | | |
| | | | AGTCGGTG | | | | | | GCGACTCCTGAG | | GrCrUrArGrUrCr | | CCGTTATC | | |
| | | | C | | | | | | GAGAAGTCTGCC | | CrGrUrUrArUrCr | | AACTTGA | | |
| | | | | | | | | | GTTA | | ArArCrUrUrGrAr | | AAAAGTG | | |
| | | | | | | | | | | | ArArArArGrUrGr | | GCACCGA | | |
| | | | | | | | | | | | GrCrArCrCrGrAr | | GTCGGTG | | |
| | | | | | | | | | | | GrUrCrGrGrUrGr | | CGACTCCT | | |
| | | | | | | | | | | | CrGrArCrUrCrCr | | GAGGAGA | | |
| | | | | | | | | | | | UrGrArGrGrArGr | | AGTCTGCC | | |
| | | | | | | | | | | | ArArGrUrCrUrGr | | GTTA | | |
| | | | | | | | | | | | CrCrG*mU*mU* | | | | |
| | | | | | | | | | | | mA | | | | |
| HBB8_ | GTAACG | 20043 | GTTTTAGAG | 20133 | GAG | 20223 | GACTCC | 20313 | GTAACGGCAGA | 20403 | mG*mU*mA*rAr | 20493 | GTAACGG | 20583 | ++ |
| RT10_ | GCAGA | | CTAGAAAT | | AAG | | TGAG | | CTTCTCCACGTT | | CrGrGrCrArGrAr | | CAGACTTC | | |
| PBS15 | CTTCTC | | AGCAAGTT | | TCT | | | | TTAGAGCTAGAA | | CrUrUrCrUrCrCr | | TCCACGTT | | |
| | CAC | | AAAATAAG | | GCC | | | | ATAGCAAGTTAA | | ArCrGrUrUrUrUr | | TTAGAGCT | | |
| | | | GCTAGTCCG | | GTT | | | | AATAAGGCTAGT | | ArGrArGrCrUrAr | | AGAAATA | | |
| | | | TTATCAACT | | | | | | CCGTTATCAACT | | GrArArArUrArGr | | GCAAGTT | | |
| | | | TGAAAAAG | | | | | | TGAAAAAGTGG | | CrArArGrUrUrAr | | AAAATAA | | |
| | | | TGGCACCG | | | | | | CACCGAGTCGGT | | ArArArUrArArGr | | GGCTAGT | | |
| | | | AGTCGGTG | | | | | | GCGACTCCTGAG | | GrCrUrArGrUrCr | | CCGTTATC | | |
| | | | C | | | | | | | | CrGrUrUrArUrCr | | AACTTGA | | |
| | | | | | | | | | GAGAAGTCTGCC | | ArArCrUrUrGrAr | | AAAAGTG | | |
| | | | | | | | | | GTT | | ArArArArGrUrGr | | GCACCGA | | |
| | | | | | | | | | | | GrCrArCrCrGrAr | | GTCGGTG | | |
| | | | | | | | | | | | GrUrCrGrGrUrGr | | CGACTCCT | | |
| | | | | | | | | | | | CrGrArCrUrCrCr | | GAGGAGA | | |
| | | | | | | | | | | | UrGrArGrGrArGr | | AGTCTGCC | | |
| | | | | | | | | | | | ArArGrUrCrUrGr | | GTT | | |
| | | | | | | | | | | | CrC*mG*mU*m | | | | |
| | | | | | | | | | | | U | | | | |
| HBB8_ | GTAACG | 20044 | GTTTTAGAG | 20134 | GAG | 20224 | GACTCC | 20314 | GTAACGGCAGA | 20404 | mG*mU*mA*rAr | 20494 | GTAACGG | 20584 | ++ |
| RT10_ | GCAGA | | CTAGAAAT | | AAG | | TGAG | | CTTCTCCACGTT | | CrGrGrCrArGrAr | | CAGACTTC | | |
| PBS14 | CTTCTC | | AGCAAGTT | | TCT | | | | TTAGAGCTAGAA | | CrUrUrCrUrCrCr | | TCCACGTT | | |
| | CAC | | AAAATAAG | | GCC | | | | ATAGCAAGTTAA | | ArCrGrUrUrUrUr | | TTAGAGCT | | |
| | | | GCTAGTCCG | | GT | | | | AATAAGGCTAGT | | ArGrArGrCrUrAr | | AGAAATA | | |
| | | | TTATCAACT | | | | | | CCGTTATCAACT | | GrArArArUrArGr | | GCAAGTT | | |
| | | | TGAAAAAG | | | | | | TGAAAAAGTGG | | CrArArGrUrUrAr | | AAAATAA | | |
| | | | TGGCACCG | | | | | | CACCGAGTCGGT | | ArArArUrArArGr | | GGCTAGT | | |
| | | | AGTCGGTG | | | | | | GCGACTCCTGAG | | GrCrUrArGrUrCr | | CCGTTATC | | |
| | | | C | | | | | | GAGAAGTCTGCC | | CrGrUrUrArUrCr | | AACTTGA | | |
| | | | | | | | | | GT | | ArArCrUrUrGrAr | | AAAAGTG | | |
| | | | | | | | | | | | ArArArArGrUrGr | | GCACCGA | | |
| | | | | | | | | | | | GrCrArCrCrGrAr | | GTCGGTG | | |
| | | | | | | | | | | | GrUrCrGrGrUrGr | | CGACTCCT | | |
| | | | | | | | | | | | CrGrArCrUrCrCr | | GAGGAGA | | |
| | | | | | | | | | | | UrGrArGrGrArGr | | AGTCTGCC | | |
| | | | | | | | | | | | ArArGrUrCrUrGr | | GT | | |
| | | | | | | | | | | | C*mC*mG*mU | | | | |
| HBB8_ | GTAACG | 20045 | GTTTTAGAG | 20135 | GAG | 20225 | GACTCC | 20315 | GTAACGGCAGA | 20405 | mG*mU*mA*rAr | 20495 | GTAACGG | 20585 | ++ |
| RT10_ | GCAGA | | CTAGAAAT | | AAG | | TGAG | | CTTCTCCACGTT | | CrGrGrCrArGrAr | | CAGACTTC | | |
| PBS13 | CTTCTC | | AGCAAGTT | | TCT | | | | TTAGAGCTAGAA | | CrUrUrCrUrCrCr | | TCCACGTT | | |
| | CAC | | AAAATAAG | | GCC | | | | ATAGCAAGTTAA | | ArCrGrUrUrUrUr | | TTAGAGCT | | |
| | | | GCTAGTCCG | | G | | | | AATAAGGCTAGT | | ArGrArGrCrUrAr | | AGAAATA | | |
| | | | TTATCAACT | | | | | | CCGTTATCAACT | | GrArArArUrArGr | | GCAAGTT | | |
| | | | TGAAAAAG | | | | | | TGAAAAAGTGG | | CrArArGrUrUrAr | | AAAATAA | | |
| | | | TGGCACCG | | | | | | CACCGAGTCGGT | | ArArArUrArArGr | | GGCTAGT | | |
| | | | AGTCGGTG | | | | | | GCGACTCCTGAG | | GrCrUrArGrUrCr | | CCGTTATC | | |
| | | | C | | | | | | GAGAAGTCTGCC | | CrGrUrUrArUrCr | | AACTTGA | | |
| | | | | | | | | | G | | ArArCrUrUrGrAr | | AAAAGTG | | |
| | | | | | | | | | | | ArArArArGrUrGr | | GCACCGA | | |
| | | | | | | | | | | | GrCrArCrCrGrAr | | GTCGGTG | | |
| | | | | | | | | | | | GrUrCrGrGrUrGr | | CGACTCCT | | |
| | | | | | | | | | | | CrGrArCrUrCrCr | | GAGGAGA | | |
| | | | | | | | | | | | UrGrArGrGrArGr | | AGTCTGCC | | |
| | | | | | | | | | | | ArArGrUrCrUrG* | | G | | |
| | | | | | | | | | | | mC*mC*mG | | | | |
| HBB8_ | GTAACG | 20046 | | 20136 | GAG | 20226 | GACTCC | 20316 | | 20406 | mG*mU*mA*rAr | | | 20586 | ++ |
| RT10_ | GCAGA | | GTTTTAGAG | | AAG | | TGAG | | GTAACGGCAGA | | CrGrGrCrArGrAr | 20496 | GTAACGG | | |
| PBS12 | CTTCTC | | CTAGAAAT | | TCT | | | | CTTCTCCACGTT | | CrUrUrCrUrCrCr | | CAGACTTC | | |
| | CAC | | AGCAAGTT | | GCC | | | | TTAGAGCTAGAA | | ArCrGrUrUrUrUr | | TCCACGTT | | |
| | | | AAAATAAG | | | | | | ATAGCAAGTTAA | | ArGrArGrCrUrAr | | TTAGAGCT | | |
| | | | GCTAGTCCG | | | | | | AATAAGGCTAGT | | GrArArArUrArGr | | AGAAATA | | |
| | | | TTATCAACT | | | | | | CCGTTATCAACT | | CrArArGrUrUrAr | | GCAAGTT | | |
| | | | TGAAAAAG | | | | | | TGAAAAAGTGG | | ArArArUrArArGr | | AAAATAA | | |
| | | | | | | | | | | | GrCrUrArGrUrCr | | GGCTAGT | | |
| | | | | | | | | | | | CrGrUrUrArUrCr | | CCGTTATC | | |
| | | | | | | | | | | | ArArCrUrUrGrAr | | AACTTGA | | |
| | | | TGGCACCG | | | | | | CACCGAGTCGGT | | ArArArArGrUrGr | | AAAAGTG | | |
| | | | AGTCGGTG | | | | | | GCGACTCCTGAG | | GrCrArCrCrGrAr | | GCACCGA | | |
| | | | C | | | | | | GAGAAGTCTGCC | | GrUrCrGrGrUrGr | | GTCGGTG | | |
| | | | | | | | | | | | CrGrArCrUrCrCr | | CGACTCCT | | |
| | | | | | | | | | | | UrGrArGrGrArGr | | GAGGAGA | | |
| | | | | | | | | | | | ArArGrUrCrU*m | | AGTCTGCC | | |
| | | | | | | | | | | | G*mC*mC | | | | |
| HBB8_ | GTAACG | 20047 | | 20137 | GAG | 20227 | GACTCC | 20317 | GTAACGGCAGA | 20407 | mG*mU*mA*rAr | 20497 | GTAACGG | 20587 | ++ |
| RT10_ | GCAGA | | GTTTTAGAG | | AAG | | TGAG | | CTTCTCCACGTT | | CrGrGrCrArGrAr | | CAGACTTC | | |
| PB | CTTCTC | | CTAGAAAT | | TCT | | | | TTAGAGCTAGAA | | CrUrUrCrUrCrCr | | TCCACGTT | | |
| S11 | CAC | | AGCAAGTT | | GC | | | | ATAGCAAGTTAA | | ArCrGrUrUrUrUr | | TTAGAGCT | | |
| | | | AAAATAAG | | | | | | AATAAGGCTAGT | | ArGrArGrCrUrAr | | AGAAATA | | |
| | | | GCTAGTCCG | | | | | | CCGTTATCAACT | | GrArArArUrArGr | | GCAAGTT | | |
| | | | TTATCAACT | | | | | | TGAAAAAGTGG | | CrArArGrUrUrAr | | AAAATAA | | |
| | | | TGAAAAAG | | | | | | CACCGAGTCGGT | | ArArArUrArArGr | | GGCTAGT | | |
| | | | | | | | | | GCGACTCCTGAG | | GrCrUrArGrUrCr | | CCGTTATC | | |
| | | | | | | | | | GAGAAGTCTGC | | CrGrUrUrArUrCr | | AACTTGA | | |
| | | | TGGCACCG | | | | | | | | ArArCrUrUrGrAr | | AAAAGTG | | |
| | | | AGTCGGTG | | | | | | | | ArArArArGrUrGr | | GCACCGA | | |
| | | | C | | | | | | | | GrCrArCrCrGrAr | | GTCGGTG | | |
| | | | | | | | | | | | GrUrCrGrGrUrGr | | CGACTCCT | | |
| | | | | | | | | | | | CrGrArCrUrCrCr | | GAGGAGA | | |
| | | | | | | | | | | | UrGrArGrGrArGr | | AGTCTGC | | |
| | | | | | | | | | | | ArArGrUrC*mU* | | | | |
| | | | | | | | | | | | mG*mC | | | | |
| HBB8_ | GTAACG | 20048 | GTTTTAGAG | 20138 | GAG | 20228 | GACTCC | 20318 | GTAACGGCAGA | 20408 | mG*mU*mA*rAr | 20498 | GTAACGG | 20588 | ++ |
| RT10_ | GCAGA | | CTAGAAAT | | AAG | | TGAG | | CTTCTCCACGTT | | CrGrGrCrArGrAr | | CAGACTTC | | |
| PB | CTTCTC | | AGCAAGTT | | TCT | | | | TTAGAGCTAGAA | | CrUrUrCrUrCrCr | | TCCACGTT | | |
| S10 | CAC | | AAAATAAG | | G | | | | ATAGCAAGTTAA | | ArCrGrUrUrUrUr | | TTAGAGCT | | |
| | | | GCTAGTCCG | | | | | | AATAAGGCTAGT | | ArGrArGrCrUrAr | | AGAAATA | | |
| | | | TTATCAACT | | | | | | CCGTTATCAACT | | GrArArArUrArGr | | GCAAGTT | | |
| | | | TGAAAAAG | | | | | | TGAAAAAGTGG | | CrArArGrUrUrAr | | AAAATAA | | |
| | | | TGGCACCG | | | | | | CACCGAGTCGGT | | ArArArUrArArGr | | GGCTAGT | | |
| | | | AGTCGGTG | | | | | | GCGACTCCTGAG | | GrCrUrArGrUrCr | | CCGTTATC | | |
| | | | C | | | | | | GAGAAGTCTG | | CrGrUrUrArUrCr | | AACTTGA | | |
| | | | | | | | | | | | ArArCrUrUrGrAr | | AAAAGTG | | |
| | | | | | | | | | | | ArArArArGrUrGr | | GCACCGA | | |
| | | | | | | | | | | | GrCrArCrCrGrAr | | GTCGGTG | | |
| | | | | | | | | | | | GrUrCrGrGrUrGr | | CGACTCCT | | |
| | | | | | | | | | | | CrGrArCrUrCrCr | | GAGGAGA | | |
| | | | | | | | | | | | UrGrArGrGrArGr | | AGTCTG | | |
| | | | | | | | | | | | ArArGrU*mC*m | | | | |
| | | | | | | | | | | | U*mG | | | | |
| HBB8_ | GTAACG | 20049 | GTTTTAGAG | 20139 | GAG | | GACTCC | 20319 | GTAACGGCAGA | 20409 | mG*mU*mA*rAr | 20499 | GTAACGG | 20589 | + |
| RT10_ | GCAGA | | CTAGAAAT | | AAG | | TGAG | | CTTCTCCACGTT | | CrGrGrCrArGrAr | | CAGACTTC | | |
| PBS9 | CTTCTC | | AGCAAGTT | | TCT | | | | TTAGAGCTAGAA | | CrUrUrCrUrCrCr | | TCCACGTT | | |
| | CAC | | AAAATAAG | | | | | | ATAGCAAGTTAA | | ArCrGrUrUrUrUr | | TTAGAGCT | | |
| | | | GCTAGTCCG | | | | | | AATAAGGCTAGT | | ArGrArGrCrUrAr | | AGAAATA | | |
| | | | TTATCAACT | | | | | | CCGTTATCAACT | | GrArArArUrArGr | | GCAAGTT | | |
| | | | TGAAAAAG | | | | | | TGAAAAAGTGG | | CrArArGrUrUrAr | | AAAATAA | | |
| | | | TGGCACCG | | | | | | CACCGAGTCGGT | | ArArArUrArArGr | | GGCTAGT | | |
| | | | AGTCGGTG | | | | | | GCGACTCCTGAG | | GrCrUrArGrUrCr | | CCGTTATC | | |
| | | | C | | | | | | GAGAAGTCT | | CrGrUrUrArUrCr | | AACTTGA | | |
| | | | | | | | | | | | ArArCrUrUrGrAr | | AAAAGTG | | |
| | | | | | | | | | | | ArArArArGrUrGr | | GCACCGA | | |
| | | | | | | | | | | | GrCrArCrCrGrAr | | GTCGGTG | | |
| | | | | | | | | | | | GrUrCrGrGrUrGr | | CGACTCCT | | |
| | | | | | | | | | | | CrGrArCrUrCrCr | | GAGGAGA | | |
| | | | | | | | | | | | UrGrArGrGrArGr | | AGTCT | | |
| | | | | | | | | | | | ArArG*mU*mC* | | | | |
| | | | | | | | | | | | mU | | | | |
| HBB8_ | GTAACG | 20050 | GTTTTAGAG | 20140 | GAG | | GACTCC | 20320 | GTAACGGCAGA | 20410 | mG*mU*mA*rAr | 20500 | GTAACGG | 20590 | ++ |
| RT10_ | GCAGA | | CTAGAAAT | | AAG | | TGAG | | CTTCTCCACGTT | | CrGrGrCrArGrAr | | CAGACTTC | | |
| PBS8 | CTTCTC | | AGCAAGTT | | TC | | | | TTAGAGCTAGAA | | CrUrUrCrUrCrCr | | TCCACGTT | | |
| | CAC | | AAAATAAG | | | | | | ATAGCAAGTTAA | | ArCrGrUrUrUrUr | | TTAGAGCT | | |
| | | | GCTAGTCCG | | | | | | AATAAGGCTAGT | | ArGrArGrCrUrAr | | AGAAATA | | |
| | | | TTATCAACT | | | | | | CCGTTATCAACT | | GrArArArUrArGr | | GCAAGTT | | |
| | | | TGAAAAAG | | | | | | TGAAAAAGTGG | | CrArArGrUrUrAr | | AAAATAA | | |
| | | | TGGCACCG | | | | | | CACCGAGTCGGT | | ArArArUrArArGr | | GGCTAGT | | |
| | | | AGTCGGTG | | | | | | GCGACTCCTGAG | | GrCrUrArGrUrCr | | CCGTTATC | | |
| | | | C | | | | | | GAGAAGTC | | CrGrUrUrArUrCr | | AACTTGA | | |
| | | | | | | | | | | | ArArCrUrUrGrAr | | AAAAGTG | | |
| | | | | | | | | | | | ArArArArGrUrGr | | GCACCGA | | |
| | | | | | | | | | | | GrCrArCrCrGrAr | | GTCGGTG | | |
| | | | | | | | | | | | GrUrCrGrGrUrGr | | CGACTCCT | | |
| | | | | | | | | | | | CrGrArCrUrCrCr | | GAGGAGA | | |
| | | | | | | | | | | | UrGrArGrGrArGr | | AGTC | | |
| | | | | | | | | | | | ArA*mG*mU*m | | | | |
| | | | | | | | | | | | C | | | | |
| HBB8_ | GTAACG | 20051 | GTTTTAGAG | 20141 | GAG | 20231 | ACTCCT | | GTAACGGCAGA | 20411 | mG*mU*mA*rAr | 20501 | GTAACGG | 20591 | + |
| RT9_ | GCAGA | | CTAGAAAT | | AAG | | GAG | | CTTCTCCACGTT | | CrGrGrCrArGrAr | | CAGACTTC | | |
| PBS | CTTCTC | | AGCAAGTT | | TCT | | | | TTAGAGCTAGAA | | CrUrUrCrUrCrCr | | TCCACGTT | | |
| 17 | CAC | | AAAATAAG | | GCC | | | | ATAGCAAGTTAA | | ArCrGrUrUrUrUr | | TTAGAGCT | | |
| | | | GCTAGTCCG | | GTT | | | | AATAAGGCTAGT | | ArGrArGrCrUrAr | | AGAAATA | | |
| | | | TTATCAACT | | AC | | | | CCGTTATCAACT | | GrArArArUrArGr | | GCAAGTT | | |
| | | | TGAAAAAG | | | | | | TGAAAAAGTGG | | CrArArGrUrUrAr | | AAAATAA | | |
| | | | TGGCACCG | | | | | | CACCGAGTCGGT | | ArArArUrArArGr | | GGCTAGT | | |
| | | | AGTCGGTG | | | | | | GCACTCCTGAGG | | GrCrUrArGrUrCr | | CCGTTATC | | |
| | | | C | | | | | | AGAAGTCTGCCG | | CrGrUrUrArUrCr | | AACTTGA | | |
| | | | | | | | | | TTAC | | ArArCrUrUrGrAr | | AAAAGTG | | |
| | | | | | | | | | | | ArArArArGrUrGr | | GCACCGA | | |
| | | | | | | | | | | | GrCrArCrCrGrAr | | GTCGGTG | | |
| | | | | | | | | | | | GrUrCrGrGrUrGr | | CACTCCTG | | |
| | | | | | | | | | | | CrArCrUrCrCrUr | | AGGAGAA | | |
| | | | | | | | | | | | GrArGrGrArGrAr | | GTCTGCCG | | |
| | | | | | | | | | | | ArGrUrCrUrGrCr | | TTAC | | |
| | | | | | | | | | | | CrGrU*mU*mA* | | | | |
| | | | | | | | | | | | mC | | | | |
| HBB8_ | GTAACG | 20052 | GTTTTAGAG | 20142 | GAG | 20232 | ACTCCT | | GTAACGGCAGA | 20412 | mG*mU*mA*rAr | 20502 | GTAACGG | 20592 | ++ |
| RT9_ | GCAGA | | CTAGAAAT | | AAG | | GAG | | CTTCTCCACGTT | | CrGrGrCrArGrAr | | CAGACTTC | | |
| PBS | | | AGCAAGTT | | TCT | | | | TTAGAGCTAGAA | | CrUrUrCrUrCrCr | | TCCACGTT | | |
| 16 | CTTCTC | | AAAATAAG | | GCC | | | | ATAGCAAGTTAA | | ArCrGrUrUrUrUr | | TTAGAGCT | | |
| | CAC | | GCTAGTCCG | | GTT | | | | AATAAGGCTAGT | | ArGrArGrCrUrAr | | AGAAATA | | |
| | | | TTATCAACT | | A | | | | CCGTTATCAACT | | GrArArArUrArGr | | GCAAGTT | | |
| | | | TGAAAAAG | | | | | | TGAAAAAGTGG | | CrArArGrUrUrAr | | AAAATAA | | |
| | | | TGGCACCG | | | | | | CACCGAGTCGGT | | ArArArUrArArGr | | GGCTAGT | | |
| | | | AGTCGGTG | | | | | | GCACTCCTGAGG | | GrCrUrArGrUrCr | | CCGTTATC | | |
| | | | C | | | | | | AGAAGTCTGCCG | | CrGrUrUrArUrCr | | AACTTGA | | |
| | | | | | | | | | TTA | | ArArCrUrUrGrAr | | AAAAGTG | | |
| | | | | | | | | | | | ArArArArGrUrGr | | GCACCGA | | |
| | | | | | | | | | | | GrCrArCrCrGrAr | | GTCGGTG | | |
| | | | | | | | | | | | GrUrCrGrGrUrGr | | CACTCCTG | | |
| | | | | | | | | | | | CrArCrUrCrCrUr | | AGGAGAA | | |
| | | | | | | | | | | | GrArGrGrArGrAr | | GTCTGCCG | | |
| | | | | | | | | | | | ArGrUrCrUrGrCr | | TTA | | |
| | | | | | | | | | | | CrG*mU*mU*m | | | | |
| | | | | | | | | | | | A | | | | |
| HBB8_ | GTAACG | 20053 | GTTTTAGAG | 20143 | GAG | 20233 | ACTCCT | | GTAACGGCAGA | 20413 | mG*mU*mA*rAr | 20503 | GTAACGG | 20593 | ++ |
| RT9_ | GCAGA | | CTAGAAAT | | AAG | | GAG | | CTTCTCCACGTT | | CrGrGrCrArGrAr | | CAGACTTC | | |
| PBS | CTTCTC | | AGCAAGTT | | TCT | | | | TTAGAGCTAGAA | | CrUrUrCrUrCrCr | | TCCACGTT | | |
| 15 | CAC | | AAAATAAG | | GCC | | | | ATAGCAAGTTAA | | ArCrGrUrUrUrUr | | TTAGAGCT | | |
| | | | GCTAGTCCG | | GTT | | | | AATAAGGCTAGT | | ArGrArGrCrUrAr | | AGAAATA | | |
| | | | TTATCAACT | | | | | | CCGTTATCAACT | | GrArArArUrArGr | | GCAAGTT | | |
| | | | TGAAAAAG | | | | | | TGAAAAAGTGG | | CrArArGrUrUrAr | | AAAATAA | | |
| | | | TGGCACCG | | | | | | CACCGAGTCGGT | | ArArArUrArArGr | | GGCTAGT | | |
| | | | AGTCGGTG | | | | | | GCACTCCTGAGG | | GrCrUrArGrUrCr | | CCGTTATC | | |
| | | | C | | | | | | AGAAGTCTGCCG | | CrGrUrUrArUrCr | | AACTTGA | | |
| | | | | | | | | | TT | | ArArCrUrUrGrAr | | AAAAGTG | | |
| | | | | | | | | | | | ArArArArGrUrGr | | GCACCGA | | |
| | | | | | | | | | | | GrCrArCrCrGrAr | | GTCGGTG | | |
| | | | | | | | | | | | GrUrCrGrGrUrGr | | CACTCCTG | | |
| | | | | | | | | | | | CrArCrUrCrCrUr | | AGGAGAA | | |
| | | | | | | | | | | | GrArGrGrArGrAr | | GTCTGCCG | | |
| | | | | | | | | | | | ArGrUrCrUrGrCr | | TT | | |
| | | | | | | | | | | | C*mG*mU*mU | | | | |
| HBB8_ | GTAACG | 20054 | GTTTTAGAG | 20144 | GAG | 20234 | ACTCCT | | GTAACGGCAGA | 20414 | mG*mU*mA*rAr | 20504 | GTAACGG | 20594 | +++ |
| RT9_ | GCAGA | | CTAGAAAT | | AAG | | GAG | | CTTCTCCACGTT | | CrGrGrCrArGrAr | | CAGACTTC | | |
| PBS | CTTCTC | | AGCAAGTT | | TCT | | | | TTAGAGCTAGAA | | CrUrUrCrUrCrCr | | TCCACGTT | | |
| 14 | CAC | | AAAATAAG | | GCC | | | | ATAGCAAGTTAA | | ArCrGrUrUrUrUr | | TTAGAGCT | | |
| | | | GCTAGTCCG | | GT | | | | AATAAGGCTAGT | | ArGrArGrCrUrAr | | AGAAATA | | |
| | | | TTATCAACT | | | | | | CCGTTATCAACT | | GrArArArUrArGr | | GCAAGTT | | |
| | | | TGAAAAAG | | | | | | TGAAAAAGTGG | | CrArArGrUrUrAr | | AAAATAA | | |
| | | | TGGCACCG | | | | | | CACCGAGTCGGT | | ArArArUrArArGr | | GGCTAGT | | |
| | | | AGTCGGTG | | | | | | GCACTCCTGAGG | | GrCrUrArGrUrCr | | CCGTTATC | | |
| | | | C | | | | | | AGAAGTCTGCCG | | CrGrUrUrArUrCr | | AACTTGA | | |
| | | | | | | | | | T | | ArArCrUrUrGrAr | | AAAAGTG | | |
| | | | | | | | | | | | ArArArArGrUrGr | | GCACCGA | | |
| | | | | | | | | | | | GrCrArCrCrGrAr | | GTCGGTG | | |
| | | | | | | | | | | | GrUrCrGrGrUrGr | | CACTCCTG | | |
| | | | | | | | | | | | CrArCrUrCrCrUr | | AGGAGAA | | |
| | | | | | | | | | | | GrArGrGrArGrAr | | GTCTGCCG | | |
| | | | | | | | | | | | ArGrUrCrUrGrC* | | T | | |
| | | | | | | | | | | | mC*mG*mU | | | | |
| HBB8_ | GTAACG | 20055 | GTTTTAGAG | 20145 | GAG | 20235 | ACTCCT | | GTAACGGCAGA | 20415 | mG*mU*mA*rAr | 20505 | GTAACGG | 20595 | +++ |
| RT9_ | GCAGA | | CTAGAAAT | | AAG | | GAG | | CTTCTCCACGTT | | CrGrGrCrArGrAr | | CAGACTTC | | |
| PBS | CTTCTC | | AGCAAGTT | | TCT | | | | TTAGAGCTAGAA | | CrUrUrCrUrCrCr | | TCCACGTT | | |
| 13 | CAC | | AAAATAAG | | GCC | | | | ATAGCAAGTTAA | | ArCrGrUrUrUrUr | | TTAGAGCT | | |
| | | | GCTAGTCCG | | G | | | | AATAAGGCTAGT | | ArGrArGrCrUrAr | | AGAAATA | | |
| | | | TTATCAACT | | | | | | CCGTTATCAACT | | GrArArArUrArGr | | GCAAGTT | | |
| | | | TGAAAAAG | | | | | | TGAAAAAGTGG | | CrArArGrUrUrAr | | AAAATAA | | |
| | | | TGGCACCG | | | | | | CACCGAGTCGGT | | ArArArUrArArGr | | GGCTAGT | | |
| | | | AGTCGGTG | | | | | | GCACTCCTGAGG | | GrCrUrArGrUrCr | | CCGTTATC | | |
| | | | C | | | | | | AGAAGTCTGCCG | | CrGrUrUrArUrCr | | AACTTGA | | |
| | | | | | | | | | | | ArArCrUrUrGrAr | | AAAAGTG | | |
| | | | | | | | | | | | ArArArArGrUrGr | | GCACCGA | | |
| | | | | | | | | | | | GrCrArCrCrGrAr | | GTCGGTG | | |
| | | | | | | | | | | | GrUrCrGrGrUrGr | | CACTCCTG | | |
| | | | | | | | | | | | CrArCrUrCrCrUr | | AGGAGAA | | |
| | | | | | | | | | | | GrArGrGrArGrAr | | GTCTGCCG | | |
| | | | | | | | | | | | ArGrUrCrUrG*m | | | | |
| | | | | | | | | | | | C*mC*mG | | | | |
| HBB8_ | GTAACG | 20056 | GTTTTAGAG | 20146 | GAG | 20236 | ACTCCT | | GTAACGGCAGA | 20416 | mG*mU*mA*rAr | 20506 | GTAACGG | 20596 | ++ |
| RT9_ | GCAGA | | CTAGAAAT | | AAG | | GAG | | CTTCTCCACGTT | | CrGrGrCrArGrAr | | CAGACTTC | | |
| PBS | CTTCTC | | AGCAAGTT | | TCT | | | | TTAGAGCTAGAA | | CrUrUrCrUrCrCr | | TCCACGTT | | |
| 12 | CAC | | AAAATAAG | | GCC | | | | ATAGCAAGTTAA | | ArCrGrUrUrUrUr | | TTAGAGCT | | |
| | | | GCTAGTCCG | | | | | | AATAAGGCTAGT | | ArGrArGrCrUrAr | | AGAAATA | | |
| | | | TTATCAACT | | | | | | CCGTTATCAACT | | GrArArArUrArGr | | GCAAGTT | | |
| | | | TGAAAAAG | | | | | | TGAAAAAGTGG | | CrArArGrUrUrAr | | AAAATAA | | |
| | | | TGGCACCG | | | | | | CACCGAGTCGGT | | ArArArUrArArGr | | GGCTAGT | | |
| | | | AGTCGGTG | | | | | | GCACTCCTGAGG | | GrCrUrArGrUrCr | | CCGTTATC | | |
| | | | C | | | | | | AGAAGTCTGCC | | CrGrUrUrArUrCr | | AACTTGA | | |
| | | | | | | | | | | | ArArCrUrUrGrAr | | AAAAGTG | | |
| | | | | | | | | | | | ArArArArGrUrGr | | GCACCGA | | |
| | | | | | | | | | | | GrCrArCrCrGrAr | | GTCGGTG | | |
| | | | | | | | | | | | GrUrCrGrGrUrGr | | CACTCCTG | | |
| | | | | | | | | | | | CrArCrUrCrCrUr | | AGGAGAA | | |
| | | | | | | | | | | | GrArGrGrArGrAr | | GTCTGCC | | |
| | | | | | | | | | | | ArGrUrCrU*mG* | | | | |
| | | | | | | | | | | | mC*mC | | | | |
| HBB8_ | GTAACG | 20057 | GTTTTAGAG | 20147 | GAG | 20237 | ACTCCT | | GTAACGGCAGA | 20417 | mG*mU*mA*rAr | 20507 | GTAACGG | 20597 | ++ |
| RT9_ | GCAGA | | CTAGAAAT | | AAG | | GAG | | CTTCTCCACGTT | | CrGrGrCrArGrAr | | CAGACTTC | | |
| PBS | CTTCTC | | AGCAAGTT | | TCT | | | | TTAGAGCTAGAA | | CrUrUrCrUrCrCr | | TCCACGTT | | |
| 11 | CAC | | AAAATAAG | | GC | | | | ATAGCAAGTTAA | | ArCrGrUrUrUrUr | | TTAGAGCT | | |
| | | | GCTAGTCCG | | | | | | AATAAGGCTAGT | | ArGrArGrCrUrAr | | AGAAATA | | |
| | | | TTATCAACT | | | | | | CCGTTATCAACT | | GrArArArUrArGr | | GCAAGTT | | |
| | | | TGAAAAAG | | | | | | TGAAAAAGTGG | | CrArArGrUrUrAr | | AAAATAA | | |
| | | | TGGCACCG | | | | | | CACCGAGTCGGT | | ArArArUrArArGr | | GGCTAGT | | |
| | | | AGTCGGTG | | | | | | GCACTCCTGAGG | | GrCrUrArGrUrCr | | CCGTTATC | | |
| | | | C | | | | | | AGAAGTCTGC | | CrGrUrUrArUrCr | | AACTTGA | | |
| | | | | | | | | | | | ArArCrUrUrGrAr | | AAAAGTG | | |
| | | | | | | | | | | | ArArArArGrUrGr | | GCACCGA | | |
| | | | | | | | | | | | GrCrArCrCrGrAr | | GTCGGTG | | |
| | | | | | | | | | | | GrUrCrGrGrUrGr | | CACTCCTG | | |
| | | | | | | | | | | | CrArCrUrCrCrUr | | AGGAGAA | | |
| | | | | | | | | | | | GrArGrGrArGrAr | | GTCTGC | | |
| | | | | | | | | | | | ArGrUrC*mU*m | | | | |
| | | | | | | | | | | | G*mC | | | | |
| HBB8_ | GTAACG | 20058 | GTTTTAGAG | 20148 | GAG | 20238 | ACTCCT | | GTAACGGCAGA | 20418 | mG*mU*mA*rAr | 20508 | GTAACGG | 20598 | ++ |
| RT9_ | GCAGA | | CTAGAAAT | | AAG | | GAG | | CTTCTCCACGTT | | CrGrGrCrArGrAr | | CAGACTTC | | |
| PBS | CTTCTC | | AGCAAGTT | | TCT | | | | TTAGAGCTAGAA | | CrUrUrCrUrCrCr | | TCCACGTT | | |
| 10 | CAC | | AAAATAAG | | G | | | | ATAGCAAGTTAA | | ArCrGrUrUrUrUr | | TTAGAGCT | | |
| | | | GCTAGTCCG | | | | | | AATAAGGCTAGT | | ArGrArGrCrUrAr | | AGAAATA | | |
| | | | TTATCAACT | | | | | | CCGTTATCAACT | | GrArArArUrArGr | | GCAAGTT | | |
| | | | TGAAAAAG | | | | | | TGAAAAAGTGG | | CrArArGrUrUrAr | | AAAATAA | | |
| | | | TGGCACCG | | | | | | CACCGAGTCGGT | | ArArArUrArArGr | | GGCTAGT | | |
| | | | AGTCGGTG | | | | | | GCACTCCTGAGG | | GrCrUrArGrUrCr | | CCGTTATC | | |
| | | | C | | | | | | AGAAGTCTG | | CrGrUrUrArUrCr | | AACTTGA | | |
| | | | | | | | | | | | ArArCrUrUrGrAr | | AAAAGTG | | |
| | | | | | | | | | | | ArArArArGrUrGr | | GCACCGA | | |
| | | | | | | | | | | | GrCrArCrCrGrAr | | GTCGGTG | | |
| | | | | | | | | | | | GrUrCrGrGrUrGr | | CACTCCTG | | |
| | | | | | | | | | | | CrArCrUrCrCrUr | | AGGAGAA | | |
| | | | | | | | | | | | GrArGrGrArGrAr | | GTCTG | | |
| | | | | | | | | | | | ArGrU*mC*mU* | | | | |
| | | | | | | | | | | | mG | | | | |
| HBB8_ | GTAACG | 20059 | GTTTTAGAG | 20149 | GAG | | ACTCCT | | GTAACGGCAGA | 20419 | mG*mU*mA*rAr | 20509 | GTAACGG | 20599 | + |
| RT9_ | GCAGA | | CTAGAAAT | | AAG | | GAG | | CTTCTCCACGTT | | CrGrGrCrArGrAr | | CAGACTTC | | |
| PBS | CTTCTC | | AGCAAGTT | | TCT | | | | TTAGAGCTAGAA | | CrUrUrCrUrCrCr | | TCCACGTT | | |
| 9 | CAC | | AAAATAAG | | | | | | ATAGCAAGTTAA | | ArCrGrUrUrUrUr | | TTAGAGCT | | |
| | | | GCTAGTCCG | | | | | | AATAAGGCTAGT | | ArGrArGrCrUrAr | | AGAAATA | | |
| | | | TTATCAACT | | | | | | CCGTTATCAACT | | GrArArArUrArGr | | GCAAGTT | | |
| | | | TGAAAAAG | | | | | | TGAAAAAGTGG | | CrArArGrUrUrAr | | AAAATAA | | |
| | | | TGGCACCG | | | | | | CACCGAGTCGGT | | ArArArUrArArGr | | GGCTAGT | | |
| | | | AGTCGGTG | | | | | | GCACTCCTGAGG | | GrCrUrArGrUrCr | | CCGTTATC | | |
| | | | C | | | | | | AGAAGTCT | | CrGrUrUrArUrCr | | AACTTGA | | |
| | | | | | | | | | | | ArArCrUrUrGrAr | | AAAAGTG | | |
| | | | | | | | | | | | ArArArArGrUrGr | | GCACCGA | | |
| | | | | | | | | | | | GrCrArCrCrGrAr | | GTCGGTG | | |
| | | | | | | | | | | | GrUrCrGrGrUrGr | | CACTCCTG | | |
| | | | | | | | | | | | CrArCrUrCrCrUr | | AGGAGAA | | |
| | | | | | | | | | | | GrArGrGrArGrAr | | GTCT | | |
| | | | | | | | | | | | ArG*mU*mC*m | | | | |
| | | | | | | | | | | | U | | | | |
| HBB8_ | GTAACG | 20060 | GTTTTAGAG | 20150 | GAG | | ACTCCT | | GTAACGGCAGA | 20420 | mG*mU*mA*rAr | 20510 | GTAACGG | 20600 | ++ |
| RT9_ | GCAGA | | CTAGAAAT | | AAG | | GAG | | CTTCTCCACGTT | | CrGrGrCrArGrAr | | CAGACTTC | | |
| PBS | CTTCTC | | AGCAAGTT | | TC | | | | TTAGAGCTAGAA | | CrUrUrCrUrCrCr | | TCCACGTT | | |
| 8 | CAC | | AAAATAAG | | | | | | ATAGCAAGTTAA | | ArCrGrUrUrUrUr | | TTAGAGCT | | |
| | | | GCTAGTCCG | | | | | | AATAAGGCTAGT | | ArGrArGrCrUrAr | | AGAAATA | | |
| | | | TTATCAACT | | | | | | CCGTTATCAACT | | GrArArArUrArGr | | GCAAGTT | | |
| | | | TGAAAAAG | | | | | | TGAAAAAGTGG | | CrArArGrUrUrAr | | AAAATAA | | |
| | | | TGGCACCG | | | | | | CACCGAGTCGGT | | ArArArUrArArGr | | GGCTAGT | | |
| | | | AGTCGGTG | | | | | | GCACTCCTGAGG | | GrCrUrArGrUrCr | | CCGTTATO | | |
| | | | C | | | | | | AGAAGTC | | CrGrUrUrArUrCr | | AACTTGA | | |
| | | | | | | | | | | | ArArCrUrUrGrAr | | AAAAGTG | | |
| | | | | | | | | | | | ArArArArGrUrGr | | GCACCGA | | |
| | | | | | | | | | | | GrCrArCrCrGrAr | | GTCGGTG | | |
| | | | | | | | | | | | GrUrCrGrGrUrGr | | CACTCCTG | | |
| | | | | | | | | | | | CrArCrUrCrCrUr | | AGGAGAA | | |
| | | | | | | | | | | | GrArGrGrArGrAr | | GTC | | |
| | | | | | | | | | | | A*mG*mU*mC | | | | |

TABLE B1
Table B Sequences Reproduced without Nucleotide
Modifications. The Template Sequence
(+SNP +PAM-kill) (RNA) sequences from
Table B are reproduced below without nucleotide
modifications. In some embodiments, In some
embodiments, the sequences used in this table
can be used without chemical modifications.

| | | SEQ |
|---|---|---|
| Name | Template Sequence (+SNP) (RNA) | ID NO |
| HBB8_ | GUAACGGCAGACUUCUCCACGUUUUAGAGC | 21907 |
| RT20_P | UAGAAAUAGCAAGUUAAAAUAAGGCUAGUC | |
| BS17 | CGUUAUCAACUUGAAAAAGUGGCACCGAGU | |
| | CGGUGCUGGUGCACCUGACUCCUGAGGAGA | |
| | AGUCUGCCGUUAC | |
| HBB8_ | GUAACGGCAGACUUCUCCACGUUUUAGAGC | 21908 |
| RT20_P | UAGAAAUAGCAAGUUAAAAUAAGGCUAGUC | |
| BS16 | CGUUAUCAACUUGAAAAAGUGGCACCGAGU | |
| | CGGUGCUGGUGCACCUGACUCCUGAGGAGA | |
| | AGUCUGCCGUUA | |
| HBB8_ | GUAACGGCAGACUUCUCCACGUUUUAGAGC | 21909 |
| RT20_P | UAGAAAUAGCAAGUUAAAAUAAGGCUAGUC | |
| BS15 | CGUUAUCAACUUGAAAAAGUGGCACCGAGU | |
| | CGGUGCUGGUGCACCUGACUCCUGAGGAGA | |
| | AGUCUGCCGUU | |
| HBB8_ | GUAACGGCAGACUUCUCCACGUUUUAGAGC | 21910 |
| RT20_P | UAGAAAUAGCAAGUUAAAAUAAGGCUAGUC | |
| BS14 | CGUUAUCAACUUGAAAAAGUGGCACCGAGU | |
| | CGGUGCUGGUGCACCUGACUCCUGAGGAGA | |
| | AGUCUGCCGU | |
| HBB8_ | GUAACGGCAGACUUCUCCACGUUUUAGAGC | 21911 |
| RT20_P | UAGAAAUAGCAAGUUAAAAUAAGGCUAGUC | |
| BS13 | CGUUAUCAACUUGAAAAAGUGGCACCGAGU | |
| | CGGUGCUGGUGCACCUGACUCCUGAGGAGA | |
| | AGUCUGCCG | |
| HBB8_ | GUAACGGCAGACUUCUCCACGUUUUAGAGC | 21912 |
| RT20_P | UAGAAAUAGCAAGUUAAAAUAAGGCUAGUC | |
| BS12 | CGUUAUCAACUUGAAAAAGUGGCACCGAGU | |
| | CGGUGCUGGUGCACCUGACUCCUGAGGAGA | |
| | AGUCUGCC | |
| HBB8_ | GUAACGGCAGACUUCUCCACGUUUUAGAGC | 21913 |
| RT20_P | UAGAAAUAGCAAGUUAAAAUAAGGCUAGUC | |
| BS11 | CGUUAUCAACUUGAAAAAGUGGCACCGAGU | |
| | CGGUGCUGGUGCACCUGACUCCUGAGGAGA | |
| | AGUCUGC | |
| HBB8_ | GUAACGGCAGACUUCUCCACGUUUUAGAGC | 21914 |
| RT20_P | UAGAAAUAGCAAGUUAAAAUAAGGCUAGUC | |
| BS10 | CGUUAUCAACUUGAAAAAGUGGCACCGAGU | |
| | CGGUGCUGGUGCACCUGACUCCUGAGGAGA | |
| | AGUCUG | |
| HBB8_ | GUAACGGCAGACUUCUCCACGUUUUAGAGC | 21915 |
| RT20_P | UAGAAAUAGCAAGUUAAAAUAAGGCUAGUC | |
| BS9 | CGUUAUCAACUUGAAAAAGUGGCACCGAGU | |
| | CGGUGCUGGUGCACCUGACUCCUGAGGAGA | |
| | AGUCU | |
| HBB8_ | GUAACGGCAGACUUCUCCACGUUUUAGAGC | 21916 |
| RT20_P | UAGAAAUAGCAAGUUAAAAUAAGGCUAGUC | |
| BS8 | CGUUAUCAACUUGAAAAAGUGGCACCGAGU | |
| | CGGUGCUGGUGCACCUGACUCCUGAGGAGA | |
| | AGUC | |
| HBB8_ | GUAACGGCAGACUUCUCCACGUUUUAGAGC | 21917 |
| RT19_P | UAGAAAUAGCAAGUUAAAAUAAGGCUAGUC | |
| BS17 | CGUUAUCAACUUGAAAAAGUGGCACCGAGU | |
| | CGGUGCGGUGCACCUGACUCCUGAGGAGAA | |
| | GUCUGCCGUUAC | |
| HBB8_ | GUAACGGCAGACUUCUCCACGUUUUAGAGC | 21918 |
| RT19_P | UAGAAAUAGCAAGUUAAAAUAAGGCUAGUC | |
| BS16 | CGUUAUCAACUUGAAAAAGUGGCACCGAGU | |
| | CGGUGCGGUGCACCUGACUCCUGAGGAGAA | |
| | GUCUGCCGUUA | |
| HBB8_ | GUAACGGCAGACUUCUCCACGUUUUAGAGC | 21919 |
| RT19_P | UAGAAAUAGCAAGUUAAAAUAAGGCUAGUC | |
| BS15 | CGUUAUCAACUUGAAAAAGUGGCACCGAGU | |
| | CGGUGCGGUGCACCUGACUCCUGAGGAGAA | |
| | GUCUGCCGUU | |
| HBB8_ | GUAACGGCAGACUUCUCCACGUUUUAGAGC | 21920 |
| RT19_P | UAGAAAUAGCAAGUUAAAAUAAGGCUAGUC | |
| BS14 | CGUUAUCAACUUGAAAAAGUGGCACCGAGU | |
| | CGGUGCGGUGCACCUGACUCCUGAGGAGAA | |
| | GUCUGCCGU | |
| HBB8_ | GUAACGGCAGACUUCUCCACGUUUUAGAGC | 21921 |
| RT19_P | UAGAAAUAGCAAGUUAAAAUAAGGCUAGUC | |
| BS13 | CGUUAUCAACUUGAAAAAGUGGCACCGAGU | |
| | CGGUGCGGUGCACCUGACUCCUGAGGAGAA | |
| | GUCUGCCG | |
| HBB8_ | GUAACGGCAGACUUCUCCACGUUUUAGAGC | 21922 |
| RT19_P | UAGAAAUAGCAAGUUAAAAUAAGGCUAGUC | |
| BS12 | CGUUAUCAACUUGAAAAAGUGGCACCGAGU | |
| | CGGUGCGGUGCACCUGACUCCUGAGGAGAA | |
| | GUCUGCC | |
| HBB8_ | GUAACGGCAGACUUCUCCACGUUUUAGAGC | 21923 |
| RT19_P | UAGAAAUAGCAAGUUAAAAUAAGGCUAGUC | |
| BS11 | CGUUAUCAACUUGAAAAAGUGGCACCGAGU | |
| | CGGUGCGGUGCACCUGACUCCUGAGGAGAA | |
| | GUCUGC | |
| HBB8_ | GUAACGGCAGACUUCUCCACGUUUUAGAGC | 21924 |
| RT19_P | UAGAAAUAGCAAGUUAAAAUAAGGCUAGUC | |
| BS10 | CGUUAUCAACUUGAAAAAGUGGCACCGAGU | |
| | CGGUGCGGUGCACCUGACUCCUGAGGAGAA | |
| | GUCUG | |
| HBB8_ | GUAACGGCAGACUUCUCCACGUUUUAGAGC | 21925 |
| RT19_P | UAGAAAUAGCAAGUUAAAAUAAGGCUAGUC | |
| BS9 | CGUUAUCAACUUGAAAAAGUGGCACCGAGU | |
| | CGGUGCGGUGCACCUGACUCCUGAGGAGAA | |
| | GUCU | |
| HBB8_ | GUAACGGCAGACUUCUCCACGUUUUAGAGC | 21926 |
| RT19_P | UAGAAAUAGCAAGUUAAAAUAAGGCUAGUC | |
| BS8 | CGUUAUCAACUUGAAAAAGUGGCACCGAGU | |
| | CGGUGCGGUGCACCUGACUCCUGAGGAGAA | |
| | GUC | |
| HBB8_ | GUAACGGCAGACUUCUCCACGUUUUAGAGC | 21927 |
| RT18_P | UAGAAAUAGCAAGUUAAAAUAAGGCUAGUC | |
| BS17 | CGUUAUCAACUUGAAAAAGUGGCACCGAGU | |
| | CGGUGCGUGCACCUGACUCCUGAGGAGAAG | |
| | UCUGCCGUUAC | |
| HBB8_ | GUAACGGCAGACUUCUCCACGUUUUAGAGC | 21928 |
| RT18_P | UAGAAAUAGCAAGUUAAAAUAAGGCUAGUC | |
| BS16 | CGUUAUCAACUUGAAAAAGUGGCACCGAGU | |
| | CGGUGCGUGCACCUGACUCCUGAGGAGAAG | |
| | UCUGCCGUUA | |
| HBB8_ | GUAACGGCAGACUUCUCCACGUUUUAGAGC | 21929 |
| RT18_P | UAGAAAUAGCAAGUUAAAAUAAGGCUAGUC | |
| BS15 | CGUUAUCAACUUGAAAAAGUGGCACCGAGU | |
| | CGGUGCGUGCACCUGACUCCUGAGGAGAAG | |
| | UCUGCCGUU | |
| HBB8_ | GUAACGGCAGACUUCUCCACGUUUUAGAGC | 21930 |
| RT18_P | UAGAAAUAGCAAGUUAAAAUAAGGCUAGUC | |
| BS14 | CGUUAUCAACUUGAAAAAGUGGCACCGAGU | |
| | CGGUGCGUGCACCUGACUCCUGAGGAGAAG | |
| | UCUGCCGU | |
| HBB8_ | GUAACGGCAGACUUCUCCACGUUUUAGAGC | 21931 |
| RT18_P | UAGAAAUAGCAAGUUAAAAUAAGGCUAGUC | |
| BS13 | CGUUAUCAACUUGAAAAAGUGGCACCGAGU | |
| | CGGUGCGUGCACCUGACUCCUGAGGAGAAG | |
| | UCUGCCG | |
| HBB8_ | GUAACGGCAGACUUCUCCACGUUUUAGAGC | 21932 |
| RT18_P | UAGAAAUAGCAAGUUAAAAUAAGGCUAGUC | |
| BS12 | CGUUAUCAACUUGAAAAAGUGGCACCGAGU | |
| | CGGUGCGUGCACCUGACUCCUGAGGAGAAG | |
| | UCUGCC | |
| HBB8_ | GUAACGGCAGACUUCUCCACGUUUUAGAGC | 21933 |
| RT18_P | UAGAAAUAGCAAGUUAAAAUAAGGCUAGUC | |
| BS11 | CGUUAUCAACUUGAAAAAGUGGCACCGAGU | |
| | CGGUGCGUGCACCUGACUCCUGAGGAGAAG | |
| | UCUGC | |
| HBB8_ | GUAACGGCAGACUUCUCCACGUUUUAGAGC | 21934 |
| RT18_P | UAGAAAUAGCAAGUUAAAAUAAGGCUAGUC | |
| BS10 | CGUUAUCAACUUGAAAAAGUGGCACCGAGU | |
| | CGGUGCGUGCACCUGACUCCUGAGGAGAAG | |
| | UCUG | |
| HBB8_ | GUAACGGCAGACUUCUCCACGUUUUAGAGC | 21935 |
| RT18_P | UAGAAAUAGCAAGUUAAAAUAAGGCUAGUC | |
| BS9 | CGUUAUCAACUUGAAAAAGUGGCACCGAGU | |
| | CGGUGCGUGCACCUGACUCCUGAGGAGAAG | |
| | UCU | |
| HBB8_ | GUAACGGCAGACUUCUCCACGUUUUAGAGC | 21936 |
| RT18_P | UAGAAAUAGCAAGUUAAAAUAAGGCUAGUC | |
| BS8 | CGUUAUCAACUUGAAAAAGUGGCACCGAGU | |
| | CGGUGCGUGCACCUGACUCCUGAGGAGAAG | |
| | UC | |
| HBB8_ | GUAACGGCAGACUUCUCCACGUUUUAGAGC | 21937 |
| RT17_P | UAGAAAUAGCAAGUUAAAAUAAGGCUAGUC | |
| BS17 | CGUUAUCAACUUGAAAAAGUGGCACCGAGU | |
| | CGGUGCUGCACCUGACUCCUGAGGAGAAGU | |
| | CUGCCGUUAC | |
| HBB8_ | GUAACGGCAGACUUCUCCACGUUUUAGAGC | 21938 |
| RT17_P | UAGAAAUAGCAAGUUAAAAUAAGGCUAGUC | |
| BS16 | CGUUAUCAACUUGAAAAAGUGGCACCGAGU | |
| | CGGUGCUGCACCUGACUCCUGAGGAGAAGU | |
| | CUGCCGUUA | |
| HBB8_ | GUAACGGCAGACUUCUCCACGUUUUAGAGC | 21939 |
| RT17_P | UAGAAAUAGCAAGUUAAAAUAAGGCUAGUC | |
| BS15 | CGUUAUCAACUUGAAAAAGUGGCACCGAGU | |
| | CGGUGCUGCACCUGACUCCUGAGGAGAAGU | |
| | CUGCCGUU | |
| HBB8_ | GUAACGGCAGACUUCUCCACGUUUUAGAGC | 21940 |
| RT17_P | UAGAAAUAGCAAGUUAAAAUAAGGCUAGUC | |
| BS14 | CGUUAUCAACUUGAAAAAGUGGCACCGAGU | |
| | CGGUGCUGCACCUGACUCCUGAGGAGAAGU | |
| | CUGCCGU | |
| HBB8_ | GUAACGGCAGACUUCUCCACGUUUUAGAGC | 21941 |
| RT17_P | UAGAAAUAGCAAGUUAAAAUAAGGCUAGUC | |
| BS13 | CGUUAUCAACUUGAAAAAGUGGCACCGAGU | |
| | CGGUGCUGCACCUGACUCCUGAGGAGAAGU | |
| | CUGCCG | |
| HBB8_ | GUAACGGCAGACUUCUCCACGUUUUAGAGC | 21942 |
| RT17_P | UAGAAAUAGCAAGUUAAAAUAAGGCUAGUC | |
| BS12 | CGUUAUCAACUUGAAAAAGUGGCACCGAGU | |
| | CGGUGCUGCACCUGACUCCUGAGGAGAAGU | |
| | CUGCC | |
| HBB8_ | GUAACGGCAGACUUCUCCACGUUUUAGAGC | 21943 |
| RT17_P | UAGAAAUAGCAAGUUAAAAUAAGGCUAGUC | |
| BS11 | CGUUAUCAACUUGAAAAAGUGGCACCGAGU | |
| | CGGUGCUGCACCUGACUCCUGAGGAGAAGU | |
| | CUGC | |
| HBB8_ | GUAACGGCAGACUUCUCCACGUUUUAGAGC | 21944 |
| RT17_P | UAGAAAUAGCAAGUUAAAAUAAGGCUAGUC | |
| BS10 | CGUUAUCAACUUGAAAAAGUGGCACCGAGU | |
| | CGGUGCUGCACCUGACUCCUGAGGAGAAGU | |
| | CUG | |
| HBB8_ | GUAACGGCAGACUUCUCCACGUUUUAGAGC | 21945 |
| RT17_P | UAGAAAUAGCAAGUUAAAAUAAGGCUAGUC | |
| BS9 | CGUUAUCAACUUGAAAAAGUGGCACCGAGU | |
| | CGGUGCUGCACCUGACUCCUGAGGAGAAGU | |
| | CU | |
| HBB8_ | GUAACGGCAGACUUCUCCACGUUUUAGAGC | 21946 |
| RT17_P | UAGAAAUAGCAAGUUAAAAUAAGGCUAGUC | |
| BS8 | CGUUAUCAACUUGAAAAAGUGGCACCGAGU | |
| | CGGUGCUGCACCUGACUCCUGAGGAGAAGU | |
| | C | |
| HBB8_ | GUAACGGCAGACUUCUCCACGUUUUAGAGC | 21947 |
| RT16_P | UAGAAAUAGCAAGUUAAAAUAAGGCUAGUC | |
| BS17 | CGUUAUCAACUUGAAAAAGUGGCACCGAGU | |
| | CGGUGCGCACCUGACUCCUGAGGAGAAGUC | |
| | UGCCGUUAC | |
| HBB8_ | GUAACGGCAGACUUCUCCACGUUUUAGAGC | 21948 |
| RT16_P | UAGAAAUAGCAAGUUAAAAUAAGGCUAGUC | |
| BS16 | CGUUAUCAACUUGAAAAAGUGGCACCGAGU | |
| | CGGUGCGCACCUGACUCCUGAGGAGAAGUC | |
| | UGCCGUUA | |
| HBB8_ | GUAACGGCAGACUUCUCCACGUUUUAGAGC | 21949 |
| RT16_P | UAGAAAUAGCAAGUUAAAAUAAGGCUAGUC | |
| BS15 | CGUUAUCAACUUGAAAAAGUGGCACCGAGU | |
| | CGGUGCGCACCUGACUCCUGAGGAGAAGUC | |
| | UGCCGUU | |
| HBB8_ | GUAACGGCAGACUUCUCCACGUUUUAGAGC | 21950 |
| RT16_P | UAGAAAUAGCAAGUUAAAAUAAGGCUAGUC | |
| BS14 | CGUUAUCAACUUGAAAAAGUGGCACCGAGU | |
| | CGGUGCGCACCUGACUCCUGAGGAGAAGUC | |
| | UGCCGU | |
| HBB8_ | GUAACGGCAGACUUCUCCACGUUUUAGAGC | 21951 |
| RT16_P | UAGAAAUAGCAAGUUAAAAUAAGGCUAGUC | |
| BS13 | CGUUAUCAACUUGAAAAAGUGGCACCGAGU | |
| | CGGUGCGCACCUGACUCCUGAGGAGAAGUC | |
| | UGCCG | |
| HBB8_ | GUAACGGCAGACUUCUCCACGUUUUAGAGC | 21952 |
| RT16_P | UAGAAAUAGCAAGUUAAAAUAAGGCUAGUC | |
| BS12 | CGUUAUCAACUUGAAAAAGUGGCACCGAGU | |
| | CGGUGCGCACCUGACUCCUGAGGAGAAGUC | |
| | UGCC | |
| HBB8_ | GUAACGGCAGACUUCUCCACGUUUUAGAGC | 21953 |
| RT16_P | UAGAAAUAGCAAGUUAAAAUAAGGCUAGUC | |
| BS11 | CGUUAUCAACUUGAAAAAGUGGCACCGAGU | |
| | CGGUGCGCACCUGACUCCUGAGGAGAAGUC | |
| | UGC | |
| HBB8_ | GUAACGGCAGACUUCUCCACGUUUUAGAGC | 21954 |
| RT16_P | UAGAAAUAGCAAGUUAAAAUAAGGCUAGUC | |
| BS10 | CGUUAUCAACUUGAAAAAGUGGCACCGAGU | |
| | CGGUGCGCACCUGACUCCUGAGGAGAAGUC | |
| | UG | |
| HBB8_ | GUAACGGCAGACUUCUCCACGUUUUAGAGC | 21955 |
| RT16_P | UAGAAAUAGCAAGUUAAAAUAAGGCUAGUC | |
| BS9 | CGUUAUCAACUUGAAAAAGUGGCACCGAGU | |
| | CGGUGCGCACCUGACUCCUGAGGAGAAGUC | |
| | U | |
| HBB8_ | GUAACGGCAGACUUCUCCACGUUUUAGAGC | 21956 |
| RT16_P | UAGAAAUAGCAAGUUAAAAUAAGGCUAGUC | |
| BS8 | CGUUAUCAACUUGAAAAAGUGGCACCGAGU | |
| | CGGUGCGCACCUGACUCCUGAGGAGAAGUC | |
| HBB8_ | GUAACGGCAGACUUCUCCACGUUUUAGAGC | 21957 |
| RT14_P | UAGAAAUAGCAAGUUAAAAUAAGGCUAGUC | |
| BS17 | CGUUAUCAACUUGAAAAAGUGGCACCGAGU | |
| | CGGUGCACCUGACUCCUGAGGAGAAGUCUG | |
| | CCGUUAC | |
| HBB8_ | GUAACGGCAGACUUCUCCACGUUUUAGAGC | 21958 |
| RT14_P | UAGAAAUAGCAAGUUAAAAUAAGGCUAGUC | |
| BS16 | CGUUAUCAACUUGAAAAAGUGGCACCGAGU | |
| | CGGUGCACCUGACUCCUGAGGAGAAGUCUG | |
| | CCGUUA | |
| HBB8_ | GUAACGGCAGACUUCUCCACGUUUUAGAGC | 21959 |
| RT14_P | UAGAAAUAGCAAGUUAAAAUAAGGCUAGUC | |
| BS15 | CGUUAUCAACUUGAAAAAGUGGCACCGAGU | |
| | CGGUGCACCUGACUCCUGAGGAGAAGUCUG | |
| | CCGUU | |
| HBB8_ | GUAACGGCAGACUUCUCCACGUUUUAGAGC | 21960 |
| RT14_P | UAGAAAUAGCAAGUUAAAAUAAGGCUAGUC | |
| BS14 | CGUUAUCAACUUGAAAAAGUGGCACCGAGU | |
| | CGGUGCACCUGACUCCUGAGGAGAAGUCUG | |
| | CCGU | |
| HBB8_ | GUAACGGCAGACUUCUCCACGUUUUAGAGC | 21961 |
| RT14_P | UAGAAAUAGCAAGUUAAAAUAAGGCUAGUC | |
| BS13 | CGUUAUCAACUUGAAAAAGUGGCACCGAGU | |
| | CGGUGCACCUGACUCCUGAGGAGAAGUCUG | |
| | CCG | |
| HBB8_ | GUAACGGCAGACUUCUCCACGUUUUAGAGC | 21962 |
| RT14_P | UAGAAAUAGCAAGUUAAAAUAAGGCUAGUC | |
| BS12 | CGUUAUCAACUUGAAAAAGUGGCACCGAGU | |
| | CGGUGCACCUGACUCCUGAGGAGAAGUCUG | |
| | CC | |
| HBB8_ | GUAACGGCAGACUUCUCCACGUUUUAGAGC | 21963 |
| RT14_P | UAGAAAUAGCAAGUUAAAAUAAGGCUAGUC | |
| BS11 | CGUUAUCAACUUGAAAAAGUGGCACCGAGU | |
| | CGGUGCACCUGACUCCUGAGGAGAAGUCUG | |
| | C | |
| HBB8_ | GUAACGGCAGACUUCUCCACGUUUUAGAGC | 21964 |
| RT14_P | UAGAAAUAGCAAGUUAAAAUAAGGCUAGUC | |
| BS10 | CGUUAUCAACUUGAAAAAGUGGCACCGAGU | |
| | CGGUGCACCUGACUCCUGAGGAGAAGUCUG | |
| HBB8_ | GUAACGGCAGACUUCUCCACGUUUUAGAGC | 21965 |
| RT14_P | UAGAAAUAGCAAGUUAAAAUAAGGCUAGUC | |
| BS9 | CGUUAUCAACUUGAAAAAGUGGCACCGAGU | |
| | CGGUGCACCUGACUCCUGAGGAGAAGUCU | |
| HBB8_ | GUAACGGCAGACUUCUCCACGUUUUAGAGC | 21966 |
| RT14_P | UAGAAAUAGCAAGUUAAAAUAAGGCUAGUC | |
| BS8 | CGUUAUCAACUUGAAAAAGUGGCACCGAGU | |
| | CGGUGCACCUGACUCCUGAGGAGAAGUC | |
| HBB8_ | GUAACGGCAGACUUCUCCACGUUUUAGAGC | 21967 |
| RT11_P | UAGAAAUAGCAAGUUAAAAUAAGGCUAGUC | |
| BS17 | CGUUAUCAACUUGAAAAAGUGGCACCGAGU | |
| | CGGUGCUGACUCCUGAGGAGAAGUCUGCCG | |
| | UUAC | |
| HBB8_ | GUAACGGCAGACUUCUCCACGUUUUAGAGC | 21968 |
| RT11_P | UAGAAAUAGCAAGUUAAAAUAAGGCUAGUC | |
| BS16 | CGUUAUCAACUUGAAAAAGUGGCACCGAGU | |
| | CGGUGCUGACUCCUGAGGAGAAGUCUGCCG | |
| | UUA | |
| HBB8_ | GUAACGGCAGACUUCUCCACGUUUUAGAGC | 21969 |
| RT11_P | UAGAAAUAGCAAGUUAAAAUAAGGCUAGUC | |
| BS15 | CGUUAUCAACUUGAAAAAGUGGCACCGAGU | |
| | CGGUGCUGACUCCUGAGGAGAAGUCUGCCG | |
| | UU | |
| HBB8_ | GUAACGGCAGACUUCUCCACGUUUUAGAGC | 21970 |
| RT11_P | UAGAAAUAGCAAGUUAAAAUAAGGCUAGUC | |
| BS14 | CGUUAUCAACUUGAAAAAGUGGCACCGAGU | |
| | CGGUGCUGACUCCUGAGGAGAAGUCUGCCG | |
| | U | |
| HBB8_ | GUAACGGCAGACUUCUCCACGUUUUAGAGC | 21971 |
| RT11_P | UAGAAAUAGCAAGUUAAAAUAAGGCUAGUC | |
| BS13 | CGUUAUCAACUUGAAAAAGUGGCACCGAGU | |
| | CGGUGCUGACUCCUGAGGAGAAGUCUGCCG | |
| HBB8_ | GUAACGGCAGACUUCUCCACGUUUUAGAGC | 21972 |
| RT11_P | UAGAAAUAGCAAGUUAAAAUAAGGCUAGUC | |
| BS12 | CGUUAUCAACUUGAAAAAGUGGCACCGAGU | |
| | CGGUGCUGACUCCUGAGGAGAAGUCUGCC | |
| HBB8_ | GUAACGGCAGACUUCUCCACGUUUUAGAGC | 21973 |
| RT11_P | UAGAAAUAGCAAGUUAAAAUAAGGCUAGUC | |
| BS11 | CGUUAUCAACUUGAAAAAGUGGCACCGAGU | |
| | CGGUGCUGACUCCUGAGGAGAAGUCUGC | |
| HBB8_ | GUAACGGCAGACUUCUCCACGUUUUAGAGC | 21974 |
| RT11_P | UAGAAAUAGCAAGUUAAAAUAAGGCUAGUC | |
| BS10 | CGUUAUCAACUUGAAAAAGUGGCACCGAGU | |
| | CGGUGCUGACUCCUGAGGAGAAGUCUG | |
| HBB8_ | GUAACGGCAGACUUCUCCACGUUUUAGAGC | 21975 |
| RT11_P | UAGAAAUAGCAAGUUAAAAUAAGGCUAGUC | |
| BS9 | CGUUAUCAACUUGAAAAAGUGGCACCGAGU | |
| | CGGUGCUGACUCCUGAGGAGAAGUCU | |
| HBB8_ | GUAACGGCAGACUUCUCCACGUUUUAGAGC | 21976 |
| RT11_P | UAGAAAUAGCAAGUUAAAAUAAGGCUAGUC | |
| BS8 | CGUUAUCAACUUGAAAAAGUGGCACCGAGU | |
| | CGGUGCUGACUCCUGAGGAGAAGUC | |
| HBB8_ | GUAACGGCAGACUUCUCCACGUUUUAGAGC | 21977 |
| RT10_P | UAGAAAUAGCAAGUUAAAAUAAGGCUAGUC | |
| BS17 | CGUUAUCAACUUGAAAAAGUGGCACCGAGU | |
| | CGGUGCGACUCCUGAGGAGAAGUCUGCCGU | |
| | UAC | |
| HBB8_ | GUAACGGCAGACUUCUCCACGUUUUAGAGC | 21978 |
| RT10_P | UAGAAAUAGCAAGUUAAAAUAAGGCUAGUC | |
| BS16 | CGUUAUCAACUUGAAAAAGUGGCACCGAGU | |
| | CGGUGCGACUCCUGAGGAGAAGUCUGCCGU | |
| | UA | |
| HBB8_ | GUAACGGCAGACUUCUCCACGUUUUAGAGC | 21979 |
| RT10_P | UAGAAAUAGCAAGUUAAAAUAAGGCUAGUC | |
| BS15 | CGUUAUCAACUUGAAAAAGUGGCACCGAGU | |
| | CGGUGCGACUCCUGAGGAGAAGUCUGCCGU | |
| | U | |
| HBB8_ | GUAACGGCAGACUUCUCCACGUUUUAGAGC | 21980 |
| RT10_P | UAGAAAUAGCAAGUUAAAAUAAGGCUAGUC | |
| BS14 | CGUUAUCAACUUGAAAAAGUGGCACCGAGU | |
| | CGGUGCGACUCCUGAGGAGAAGUCUGCCGU | |
| HBB8_ | GUAACGGCAGACUUCUCCACGUUUUAGAGC | 21981 |
| RT10_P | UAGAAAUAGCAAGUUAAAAUAAGGCUAGUC | |
| BS13 | CGUUAUCAACUUGAAAAAGUGGCACCGAGU | |
| | CGGUGCGACUCCUGAGGAGAAGUCUGCCG | |
| HBB8_ | GUAACGGCAGACUUCUCCACGUUUUAGAGC | 21982 |
| RT10_P | UAGAAAUAGCAAGUUAAAAUAAGGCUAGUC | |
| BS12 | CGUUAUCAACUUGAAAAAGUGGCACCGAGU | |
| | CGGUGCGACUCCUGAGGAGAAGUCUGCC | |
| HBB8_ | GUAACGGCAGACUUCUCCACGUUUUAGAGC | 21983 |
| RT10_P | UAGAAAUAGCAAGUUAAAAUAAGGCUAGUC | |
| BS11 | CGUUAUCAACUUGAAAAAGUGGCACCGAGU | |
| | CGGUGCGACUCCUGAGGAGAAGUCUGC | |
| HBB8_ | GUAACGGCAGACUUCUCCACGUUUUAGAGC | 21984 |
| RT10_P | UAGAAAUAGCAAGUUAAAAUAAGGCUAGUC | |
| BS10 | CGUUAUCAACUUGAAAAAGUGGCACCGAGU | |
| | CGGUGCGACUCCUGAGGAGAAGUCUG | |
| HBB8_ | GUAACGGCAGACUUCUCCACGUUUUAGAGC | 21985 |
| RT10_P | UAGAAAUAGCAAGUUAAAAUAAGGCUAGUC | |
| BS9 | CGUUAUCAACUUGAAAAAGUGGCACCGAGU | |
| | CGGUGCGACUCCUGAGGAGAAGUCU | |
| HBB8_ | GUAACGGCAGACUUCUCCACGUUUUAGAGC | 21986 |
| RT10_P | UAGAAAUAGCAAGUUAAAAUAAGGCUAGUC | |
| BS8 | CGUUAUCAACUUGAAAAAGUGGCACCGAGU | |
| | CGGUGCGACUCCUGAGGAGAAGUC | |
| HBB8_ | GUAACGGCAGACUUCUCCACGUUUUAGAGC | 21987 |
| RT9_P | UAGAAAUAGCAAGUUAAAAUAAGGCUAGUC | |
| BS17 | CGUUAUCAACUUGAAAAAGUGGCACCGAGU | |
| | CGGUGCACUCCUGAGGAGAAGUCUGCCGUU | |
| | AC | |
| HBB8_ | GUAACGGCAGACUUCUCCACGUUUUAGAGC | 21988 |
| RT9_P | UAGAAAUAGCAAGUUAAAAUAAGGCUAGUC | |
| BS16 | CGUUAUCAACUUGAAAAAGUGGCACCGAGU | |
| | CGGUGCACUCCUGAGGAGAAGUCUGCCGUU | |
| | A | |
| HBB8_ | GUAACGGCAGACUUCUCCACGUUUUAGAGC | 21989 |
| RT9_P | UAGAAAUAGCAAGUUAAAAUAAGGCUAGUC | |
| BS15 | CGUUAUCAACUUGAAAAAGUGGCACCGAGU | |
| | CGGUGCACUCCUGAGGAGAAGUCUGCCGUU | |
| HBB8_ | GUAACGGCAGACUUCUCCACGUUUUAGAGC | 21990 |
| RT9_P | UAGAAAUAGCAAGUUAAAAUAAGGCUAGUC | |
| BS14 | CGUUAUCAACUUGAAAAAGUGGCACCGAGU | |
| | CGGUGCACUCCUGAGGAGAAGUCUGCCGU | |
| HBB8_ | GUAACGGCAGACUUCUCCACGUUUUAGAGC | 21991 |
| RT9_P | UAGAAAUAGCAAGUUAAAAUAAGGCUAGUC | |
| BS13 | CGUUAUCAACUUGAAAAAGUGGCACCGAGU | |
| | CGGUGCACUCCUGAGGAGAAGUCUGCCG | |
| HBB8_ | GUAACGGCAGACUUCUCCACGUUUUAGAGC | 21992 |
| RT9_P | UAGAAAUAGCAAGUUAAAAUAAGGCUAGUC | |
| BS12 | CGUUAUCAACUUGAAAAAGUGGCACCGAGU | |
| | CGGUGCACUCCUGAGGAGAAGUCUGCC | |
| HBB8_ | GUAACGGCAGACUUCUCCACGUUUUAGAGC | 21993 |
| RT9_P | UAGAAAUAGCAAGUUAAAAUAAGGCUAGUC | |
| BS11 | CGUUAUCAACUUGAAAAAGUGGCACCGAGU | |
| | CGGUGCACUCCUGAGGAGAAGUCUGC | |
| HBB8_ | GUAACGGCAGACUUCUCCACGUUUUAGAGC | 21994 |
| RT9_P | UAGAAAUAGCAAGUUAAAAUAAGGCUAGUC | |
| BS10 | CGUUAUCAACUUGAAAAAGUGGCACCGAGU | |
| | CGGUGCACUCCUGAGGAGAAGUCUG | |
| HBB8_ | GUAACGGCAGACUUCUCCACGUUUUAGAGC | 21995 |
| RT9_P | UAGAAAUAGCAAGUUAAAAUAAGGCUAGUC | |
| BS9 | CGUUAUCAACUUGAAAAAGUGGCACCGAGU | |
| | CGGUGCACUCCUGAGGAGAAGUCU | |
| HBB8_ | GUAACGGCAGACUUCUCCACGUUUUAGAGC | 21996 |
| RT9_P | UAGAAAUAGCAAGUUAAAAUAAGGCUAGUC | |
| BS8 | CGUUAUCAACUUGAAAAAGUGGCACCGAGU | |
| | CGGUGCACUCCUGAGGAGAAGUC | |

TABLE C
Gene Modifying Polypeptide

| | | |
|---|---|---|
| Nucleic | ATGAAACGGACAGCCGACGGAAGCGAGTTC | SEQ ID |
| Acid | GAGTCACCAAAGAAGAAGCGGAAAGTCGAC | NO: |
| Sequence | AAGAAGTACAGCATCGGCCTGGACATCGGC | 20601 |
| | ACCAACTCTGTGGGCTGGGCCGTGATCACC | |
| | GACGAGTACAAGGTGCCCAGCAAGAAATTC | |
| | AAGGTGCTGGGCAACACCGACCGGCACAGC | |
| | ATCAAGAAGAACCTGATCGGAGCCCTGCTG | |
| | TTCGACAGCGGCGAAACAGCCGAGGCCACC | |
| | CGGCTGAAGAGAACCGCCAGAAGAAGATAC | |
| | ACCAGACGGAAGAACCGGATCTGCTATCTG | |
| | CAAGAGATCTTCAGCAACGAGATGGCCAAG | |
| | GTGGACGACAGCTTCTTCCACAGACTGGAA | |
| | GAGTCCTTCCTGGTGGAAGAGGATAAGAAG | |
| | CACGAGCGGCACCCCATCTTCGGCAACATC | |
| | GTGGACGAGGTGGCCTACCACGAGAAGTAC | |
| | CCCACCATCTACCACCTGAGAAAGAAACTG | |
| | GTGGACAGCACCGACAAGGCCGACCTGCGG | |
| | CTGATCTATCTGGCCCTGGCCCACATGATC | |
| | AAGTTCCGGGGCCACTTCCTGATCGAGGGC | |
| | GACCTGAACCCCGACAACAGCGACGTGGAC | |
| | AAGCTGTTCATCCAGCTGGTGCAGACCTAC | |
| | AACCAGCTGTTCGAGGAAAACCCCATCAAC | |
| | GCCAGCGGCGTGGACGCCAAGGCCATCCTG | |
| | TCTGCCAGACTGAGCAAGAGCAGACGGCTG | |
| | GAAAATCTGATCGCCCAGCTGCCCGGCGAG | |
| | AAGAAGAATGGCCTGTTCGGAAACCTGATT | |
| | GCCCTGAGCCTGGGCCTGACCCCCAACTTC | |
| | AAGAGCAACTTCGACCTGGCCGAGGATGCC | |
| | AAACTGCAGCTGAGCAAGGACACCTACGAC | |
| | GACGACCTGGACAACCTGCTGGCCCAGATC | |
| | GGCGACCAGTACGCCGACCTGTTTCTGGCC | |
| | GCCAAGAACCTGTCCGACGCCATCCTGCTG | |
| | AGCGACATCCTGAGAGTGAACACCGAGATC | |
| | ACCAAGGCCCCCCTGAGCGCCTCTATGATC | |
| | AAGAGATACGACGAGCACCACCAGGACCTG | |
| | ACCCTGCTGAAAGCTCTCGTGCGGCAGCAG | |
| | CTGCCTGAGAAGTACAAAGAGATTTTCTTC | |
| | GACCAGAGCAAGAACGGCTACGCCGGCTAC | |
| | ATTGACGGCGGAGCCAGCCAGGAAGAGTTC | |
| | TACAAGTTCATCAAGCCCATCCTGGAAAAG | |
| | ATGGACGGCACCGAGGAACTGCTCGTGAAG | |
| | CTGAACAGAGAGGACCTGCTGCGGAAGCAG | |
| | CGGACCTTCGACAACGGCAGCATCCCCCAC | |
| | CAGATCCACCTGGGAGAGCTGCACGCCATT | |
| | CTGCGGCGGCAGGAAGATTTTTACCCATTC | |
| | CTGAAGGACAACCGGGAAAAGATCGAGAAG | |
| | ATCCTGACCTTCCGCATCCCCTACTACGTG | |
| | GGCCCTCTGGCCAGGGGAAACAGCAGATTC | |
| | GCCTGGATGACCAGAAAGAGCGAGGAAACC | |
| | ATCACCCCCTGGAACTTCGAGGAAGTGGTG | |
| | GACAAGGGCGCTTCCGCCCAGAGCTTCATC | |
| | GAGCGGATGACCAACTTCGATAAGAACCTG | |
| | CCCAACGAGAAGGTGCTGCCCAAGCACAGC | |
| | CTGCTGTACGAGTACTTCACCGTGTATAAC | |
| | GAGCTGACCAAAGTGAAATACGTGACCGAG | |
| | GGAATGAGAAAGCCCGCCTTCCTGAGCGGC | |
| | GAGCAGAAAAAGGCCATCGTGGACCTGCTG | |
| | TTCAAGACCAACCGGAAAGTGACCGTGAAG | |
| | CAGCTGAAAGAGGACTACTTCAAGAAAATC | |
| | GAGTGCTTCGACTCCGTGGAAATCTCCGGC | |
| | GTGGAAGATCGGTTCAACGCCTCCCTGGGC | |
| | ACATACCACGATCTGCTGAAAATTATCAAG | |
| | GACAAGGACTTCCTGGACAATGAGGAAAAC | |
| | GAGGACATTCTGGAAGATATCGTGCTGACC | |
| | CTGACACTGTTTGAGGACAGAGAGATGATC | |
| | GAGGAACGGCTGAAAACCTATGCCCACCTG | |
| | TTCGACGACAAAGTGATGAAGCAGCTGAAG | |
| | CGGCGGAGATACACCGGCTGGGGCAGGCTG | |
| | AGCCGGAAGCTGATCAACGGCATCCGGGAC | |
| | AAGCAGTCCGGCAAGACAATCCTGGATTTC | |
| | CTGAAGTCCGACGGCTTCGCCAACAGAAAC | |
| | TTCATGCAGCTGATCCACGACGACAGCCTG | |
| | ACCTTTAAAGAGGACATCCAGAAAGCCCAG | |
| | GTGTCCGGCCAGGGCGATAGCCTGCACGAG | |
| | CACATTGCCAATCTGGCCGGCAGCCCCGCC | |
| | ATTAAGAAGGGCATCCTGCAGACAGTGAAG | |
| | GTGGTGGACGAGCTCGTGAAAGTGATGGGC | |
| | CGGCACAAGCCCGAGAACATCGTGATCGAA | |
| | ATGGCCAGAGAGAACCAGACCACCCAGAAG | |
| | GGACAGAAGAACAGCCGCGAGAGAATGAAG | |
| | CGGATCGAAGAGGGCATCAAAGAGCTGGGC | |
| | AGCCAGATCCTGAAAGAACACCCCGTGGAA | |
| | AACACCCAGCTGCAGAACGAGAAGCTGTAC | |
| | CTGTACTACCTGCAGAATGGGCGGGATATG | |
| | TACGTGGACCAGGAACTGGACATCAACCGG | |
| | CTGTCCGACTACGATGTGGACCATATCGTG | |
| | CCTCAGAGCTTTCTGAAGGACGACTCCATC | |
| | GACAACAAGGTGCTGACCAGAAGCGACAAG | |
| | GCCCGGGGCAAGAGCGACAACGTGCCCTCC | |
| | GAAGAGGTCGTGAAGAAGATGAAGAACTAC | |
| | TGGCGGCAGCTGCTGAACGCCAAGCTGATT | |
| | ACCCAGAGAAAGTTCGACAATCTGACCAAG | |
| | GCCGAGAGAGGCGGCCTGAGCGAACTGGAT | |
| | AAGGCCGGCTTCATCAAGAGACAGCTGGTG | |
| | GAAACCCGGCAGATCACAAAGCACGTGGCA | |
| | CAGATCCTGGACTCCCGGATGAACACTAAG | |
| | TACGACGAGAATGACAAGCTGATCCGGGAA | |
| | GTGAAAGTGATCACCCTGAAGTCCAAGCTG | |
| | GTGTCCGATTTCCGGAAGGATTTCCAGTTT | |
| | TACAAAGTGCGCGAGATCAACAACTACCAC | |
| | CACGCCCACGACGCCTACCTGAACGCCGTC | |
| | GTGGGAACCGCCCTGATCAAAAAGTACCCT | |
| | AAGCTGGAAAGCGAGTTCGTGTACGGCGAC | |
| | TACAAGGTGTACGACGTGCGGAAGATGATC | |
| | GCCAAGAGCGAGCAGGAAATCGGCAAGGCT | |
| | ACCGCCAAGTACTTCTTCTACAGCAACATC | |
| | ATGAACTTTTTCAAGACCGAGATTACCCTG | |
| | GCCAACGGCGAGATCCGGAAGCGGCCTCTG | |
| | ATCGAGACAAACGGCGAAACCGGGGAGATC | |
| | GTGTGGGATAAGGGCCGGGATTTTGCCACC | |
| | GTGCGGAAAGTGCTGAGCATGCCCCAAGTG | |
| | AATATCGTGAAAAAGACCGAGGTGCAGACA | |
| | GGCGGCTTCAGCAAAGAGTCTATCCTGCCC | |
| | AAGAGGAACAGCGATAAGCTGATCGCCAGA | |
| | AAGAAGGACTGGGACCCTAAGAAGTACGGC | |
| | GGCTTCGACAGCCCCACCGTGGCCTATTCT | |
| | GTGCTGGTGGTGGCCAAAGTGGAAAAGGGC | |
| | AAGTCCAAGAAACTGAAGAGTGTGAAAGAG | |
| | CTGCTGGGGATCACCATCATGGAAAGAAGC | |
| | AGCTTCGAGAAGAATCCCATCGACTTTCTG | |
| | GAAGCCAAGGGCTACAAAGAAGTGAAAAAG | |
| | GACCTGATCATCAAGCTGCCTAAGTACTCC | |
| | CTGTTCGAGCTGGAAAACGGCCGGAAGAGA | |
| | ATGCTGGCCTCTGCCGGCGAACTGCAGAAG | |
| | GGAAACGAACTGGCCCTGCCCTCCAAATAT | |
| | GTGAACTTCCTGTACCTGGCCAGCCACTAT | |
| | GAGAAGCTGAAGGGCTCCCCCGAGGATAAT | |
| | GAGCAGAAACAGCTGTTTGTGGAACAGCAC | |
| | AAGCACTACCTGGACGAGATCATCGAGCAG | |
| | ATCAGCGAGTTCTCCAAGAGAGTGATCCTG | |
| | GCCGACGCTAATCTGGACAAAGTGCTGTCC | |
| | GCCTACAACAAGCACCGGGATAAGCCCATC | |
| | AGAGAGCAGGCCGAGAATATCATCCACCTG | |
| | TTTACCCTGACCAATCTGGGAGCCCCTGCC | |
| | GCCTTCAAGTACTTTGACACCACCATCGAC | |
| | CGGAAGAGGTACACCAGCACCAAAGAGGTG | |
| | CTGGACGCCACCCTGATCCACCAGAGCATC | |
| | ACCGGCCTGTACGAGACACGGATCGACCTG | |
| | TCTCAGCTGGGAGGTGACTCTGGAGGATCT | |
| | AGCGGAGGATCCTCTGGCAGCGAGACACCA | |
| | GGAACAAGCGAGTCAGCAACACCAGAGAGC | |
| | AGTGGCGGCAGCAGCGGCGGCAGCAGCACC | |
| | CTAAATATAGAAGATGAGTATCGGCTACAT | |
| | GAGACCTCAAAAGAGCCAGATGTTTCTCTA | |
| | GGGTCCACATGGCTGTCTGATTTTCCTCAG | |
| | GCCTGGGCGGAAACCGGGGGCATGGGACTG | |
| | GCAGTTCGCCAAGCTCCTCTGATCATACCT | |
| | CTGAAAGCAACCTCTACCCCCGTGTCCATA | |
| | AAACAATACCCCATGTCACAAGAAGCCAGA | |
| | CTGGGGATCAAGCCCCACATACAGAGACTG | |
| | TTGGACCAGGGAATACTGGTACCCTGCCAG | |
| | TCCCCCTGGAACACGCCCCTGCTACCCGTT | |
| | AAGAAACCAGGGACTAATGATTATAGGCCT | |
| | GTCCAGGATCTGAGAGAAGTCAACAAGCGG | |
| | GTGGAAGACATCCACCCCACCGTGCCCAAC | |
| | CCTTACAACCTCTTGAGCGGGCTCCCACCG | |
| | TCCCACCAGTGGTACACTGTGCTTGATTTA | |
| | AAGGATGCCTTTTTCTGCCTGAGACTCCAC | |
| | CCCACCAGTCAGCCTCTCTTCGCCTTTGAG | |
| | TGGAGAGATCCAGAGATGGGAATCTCAGGA | |
| | CAATTGACCTGGACCAGACTCCCACAGGGT | |
| | TTCAAAAACAGTCCCACCCTGTTTAATGAG | |
| | GCACTGCACAGAGACCTAGCAGACTTCCGG | |
| | ATCCAGCACCCAGACTTGATCCTGCTACAG | |
| | TACGTGGATGACTTACTGCTGGCCGCCACT | |
| | TCTGAGCTAGACTGCCAACAAGGTACTCGG | |
| | GCCCTGTTACAAACCCTAGGGAACCTCGGG | |
| | TATCGGGCCTCGGCCAAGAAAGCCCAAATT | |
| | TGCCAGAAACAGGTCAAGTATCTGGGGTAT | |
| | CTTCTAAAAGAGGGTCAGAGATGGCTGACT | |
| | GAGGCCAGAAAAGAGACTGTGATGGGGCAG | |
| | CCTACTCCGAAGACCCCTCGACAACTAAGG | |
| | GAGTTCCTAGGGAAGGCAGGCTTCTGTCGC | |
| | CTCTTCATCCCTGGGTTTGCAGAAATGGCA | |
| | GCCCCCCTGTACCCTCTCACCAAACCGGGG | |
| | ACTCTGTTTAATTGGGGCCCAGACCAACAA | |
| | AAGGCCTATCAAGAAATCAAGCAAGCTCTT | |
| | CTAACTGCCCCAGCCCTGGGGTTGCCAGAT | |
| | TTGACTAAGCCCTTTGAACTCTTTGTCGAC | |
| | GAGAAGCAGGGCTACGCCAAAGGTGTCCTA | |
| | ACGCAAAAACTGGGACCTTGGCGTCGGCCG | |
| | GTGGCCTACCTGTCCAAAAAGCTAGACCCA | |
| | GTAGCAGCTGGGTGGCCCCCTTGCCTACGG | |
| | ATGGTAGCAGCCATTGCCGTACTGACAAAG | |
| | GATGCAGGCAAGCTAACCATGGGACAGCCA | |
| | CTAGTCATTCTGGCCCCCCATGCAGTAGAG | |
| | GCACTAGTCAAACAACCCCCCGACCGCTGG | |
| | CTTTCCAACGCCCGGATGACTCACTATCAG | |
| | GCCTTGCTTTTGGACACGGACCGGGTCCAG | |
| | TTCGGACCGGTGGTAGCCCTGAACCCGGCT | |
| | ACGCTGCTCCCACTGCCTGAGGAAGGGCTG | |
| | CAACACAACTGCCTTGATATCCTGGCCGAA | |
| | GCCCACGGAACCCGACCCGACCTAACGGAC | |
| | CAGCCGCTCCCAGACGCCGACCACACCTGG | |
| | TACACGGATGGAAGCAGTCTCTTACAAGAG | |
| | GGACAGCGTAAGGCGGGAGCTGCGGTGACC | |
| | ACCGAGACCGAGGTAATCTGGGCTAAAGCC | |
| | CTGCCAGCCGGGACATCCGCTCAGCGGGCT | |
| | GAACTGATAGCACTCACCCAGGCCCTAAAG | |
| | ATGGCAGAAGGTAAGAAGCTAAATGTTTAT | |
| | ACTGATAGCCGTTATGCTTTTGCTACTGCC | |
| | CATATCCATGGAGAAATATACAGAAGGCGT | |
| | GGGTGGCTCACATCAGAAGGCAAAGAGATC | |
| | AAAAATAAAGACGAGATCTTGGCCCTACTA | |
| | AAAGCCCTCTTTCTGCCCAAAAGACTTAGC | |
| | ATAATCCATTGTCCAGGACATCAAAAGGGA | |
| | CACAGCGCCGAGGCTAGAGGCAACCGGATG | |
| | GCTGACCAAGCGGCCCGAAAGGCAGCCATC | |
| | ACAGAGACTCCAGACACCTCTACCCTCCTC | |
| | ATAGAAAATTCATCACCCTCTGGCGGCTCA | |
| | AAAAGAACCGCCGACGGCAGCGAATTCGAG | |
| | CCCAAGAAGAAGAGGAAAGTC | |
| Amino | MKRTADGSEFESPKKKRKVDKKYSIGLDIG | SEQ ID |
| Acid | TNSVGWAVITDEYKVPSKKFKVLGNTDRHS | NO: |
| Sequence | IKKNLIGALLFDSGETAEATRLKRTARRRY | 20602 |
| | TRRKNRICYLQEIFSNEMAKVDDSFFHRLE | |
| | ESFLVEEDKKHERHPIFGNIVDEVAYHEKY | |
| | PTIYHLRKKLVDSTDKADLRLIYLALAHMI | |
| | KFRGHFLIEGDLNPDNSDVDKLFIQLVQTY | |
| | NQLFEENPINASGVDAKAILSARLSKSRRL | |
| | ENLIAQLPGEKKNGLFGNLIALSLGLTPNF | |
| | KSNFDLAEDAKLQLSKDTYDDDLDNLLAQI | |
| | GDQYADLFLAAKNLSDAILLSDILRVNTEI | |
| | TKAPLSASMIKRYDEHHQDLTLLKALVRQQ | |
| | LPEKYKEIFFDQSKNGYAGYIDGGASQEEF | |
| | YKFIKPILEKMDGTEELLVKLNREDLLRKQ | |
| | RTFDNGSIPHQIHLGELHAILRRQEDFYPF | |
| | LKDNREKIEKILTFRIPYYVGPLARGNSRF | |
| | AWMTRKSEETITPWNFEEVVDKGASAQSFI | |
| | ERMTNFDKNLPNEKVLPKHSLLYEYFTVYN | |
| | ELTKVKYVTEGMRKPAFLSGEQKKAIVDLL | |
| | FKTNRKVTVKQLKEDYFKKIECFDSVEISG | |
| | VEDRFNASLGTYHDLLKIIKDKDFLDNEEN | |
| | EDILEDIVLTLTLFEDREMIEERLKTYAHL | |
| | FDDKVMKQLKRRRYTGWGRLSRKLINGIRD | |
| | KQSGKTILDFLKSDGFANRNFMQLIHDDSL | |
| | TFKEDIQKAQVSGQGDSLHEHIANLAGSPA | |
| | IKKGILQTVKVVDELVKVMGRHKPENIVIE | |
| | MARENQTTQKGQKNSRERMKRIEEGIKELG | |
| | SQILKEHPVENTQLQNEKLYLYYLQNGRDM | |
| | YVDQELDINRLSDYDVDHIVPQSFLKDDSI | |
| | DNKVLTRSDKARGKSDNVPSEEVVKKMKNY | |
| | WRQLLNAKLITQRKFDNLTKAERGGLSELD | |
| | KAGFIKRQLVETRQITKHVAQILDSRMNTK | |
| | YDENDKLIREVKVITLKSKLVSDFRKDFQF | |
| | YKVREINNYHHAHDAYLNAVVGTALIKKYP | |
| | KLESEFVYGDYKVYDVRKMIAKSEQEIGKA | |
| | TAKYFFYSNIMNFFKTEITLANGEIRKRPL | |
| | IETNGETGEIVWDKGRDFATVRKVLSMPQV | |
| | NIVKKTEVQTGGFSKESILPKRNSDKLIAR | |
| | KKDWDPKKYGGFDSPTVAYSVLVVAKVEKG | |
| | KSKKLKSVKELLGITIMERSSFEKNPIDFL | |
| | EAKGYKEVKKDLIIKLPKYSLFELENGRKR | |
| | MLASAGELQKGNELALPSKYVNFLYLASHY | |
| | EKLKGSPEDNEQKQLFVEQHKHYLDEIIEQ | |
| | ISEFSKRVILADANLDKVLSAYNKHRDKPI | |
| | REQAENIIHLFTLTNLGAPAAFKYFDTTID | |
| | RKRYTSTKEVLDATLIHQSITGLYETRIDL | |
| | SQLGGDSGGSSGGSSGSETPGTSESATPES | |
| | SGGSSGGSSTLNIEDEYRLHETSKEPDVSL | |
| | GSTWLSDFPQAWAETGGMGLAVRQAPLIIP | |
| | LKATSTPVSIKQYPMSQEARLGIKPHIQRL | |
| | LDQGILVPCQSPWNTPLLPVKKPGTNDYRP | |
| | VQDLREVNKRVEDIHPTVPNPYNLLSGLPP | |
| | SHQWYTVLDLKDAFFCLRLHPTSQPLFAFE | |
| | WRDPEMGISGQLTWTRLPQGFKNSPTLFNE | |
| | ALHRDLADFRIQHPDLILLQYVDDLLLAAT | |
| | SELDCQQGTRALLQTLGNLGYRASAKKAQI | |
| | CQKQVKYLGYLLKEGQRWLTEARKETVMGQ | |
| | PTPKTPRQLREFLGKAGFCRLFIPGFAEMA | |
| | APLYPLTKPGTLFNWGPDQQKAYQEIKQAL | |
| | LTAPALGLPDLTKPFELFVDEKQGYAKGVL | |
| | TQKLGPWRRPVAYLSKKLDPVAAGWPPCLR | |
| | MVAAIAVLTKDAGKLTMGQPLVILAPHAVE | |
| | ALVKQPPDRWLSNARMTHYQALLLDTDRVQ | |
| | FGPVVALNPATLLPLPEEGLQHNCLDILAE | |
| | AHGTRPDLTDQPLPDADHTWYTDGSSLLQE | |
| | GQRKAGAAVTTETEVIWAKALPAGTSAQRA | |
| | ELIALTQALKMAEGKKLNVYTDSRYAFATA | |
| | HIHGEIYRRRGWLTSEGKEIKNKDEILALL | |
| | KALFLPKRLSIIHCPGHQKGHSAEARGNRM | |
| | ADQAARKAAITETPDTSTLLIENSSPSGGS | |
| | KRTADGSEFEPKKKRKV | |

### Example 5: Quantifying Activity of a Gene Editing Polypeptide and Template for Rewriting the Endogenous B-Globin Locus Achieved in 293T Cells and CD34+Primary Human Hematopoietic Stem Cells (HSCs)

[0911] This example demonstrates the use of a gene modifying system containing a gene modifying polypeptide and a template RNA, to convert the glutamic acid codon (GAG) at amino acid position 7 in the endogenous B-globin locus in primary human HSCs to alanine (GCA), thereby rewriting a non-pathogenic sequence into position 7. This conversion comprises a change of two base pairs (i.e., replacement of the DNA bases adenine and guanine at nucleotide positions 20 and 21 to the bases cytosine and adenine, respectively).

[0912] In this example, the template RNA contained:
[0913] (1) a gRNA spacer;
[0914] (2) a gRNA scaffold;
[0915] (3) a heterologous object sequence; and
[0916] (4) a primer binding site (PBS) sequence.

[0917] More specifically, the template RNAs comprised the following sequences from 5′ to 3′, wherein the first 3, and last 3 bases have 2′-O-methyl phosphorothioate chemical modifications.

FYF tgRNA11
(SEQ ID NO: 20603)
CAUGGUGCACCUGACUCCUGGUUUUAGAGCUAGAAAUAGCAAGUU
AAAAUAAGGCUAGUCCGUUAUCAACUUGAAAAAGUGGCACCGAGU
CGGUGCGACUUCUCUGCAGGAGUCAGGU
FYF tgRNA12
(SEQ ID NO: 20604)
CAUGGUGCACCUGACUCCUGGUUUUAGAGCUAGAAAUAGCAAGUU
AAAAUAAGGCUAGUCCGUUAUCAACUUGAAAAAGUGGCACCGAGU
CGGUGCGACUUCUCUGCAGGAGUCAGGUG
FYF tgRNA13
(SEQ ID NO: 20605)
CAUGGUGCACCUGACUCCUGGUUUUAGAGCUAGAAAUAGCAAGUU
AAAAUAAGGCUAGUCCGUUAUCAACUUGAAAAAGUGGCACCGAGU
CGGUGCGACUUCUCUGCAGGAGUCAGGUGCAC
FYF tgRNA14
(SEQ ID NO: 20606)
CAUGGUGCACCUGACUCCUGGUUUUAGAGCUAGAAAUAGCAAGUU
AAAAUAAGGCUAGUCCGUUAUCAACUUGAAAAAGUGGCACCGAGU
CGGUGCAGACUUCUCUGCAGGAGUCAGGUG
FYF tgRNA15
(SEQ ID NO: 20607)
CAUGGUGCACCUGACUCCUGGUUUUAGAGCUAGAAAUAGCAAGUU
AAAAUAAGGCUAGUCCGUUAUCAACUUGAAAAAGUGGCACCGAGU
CGGUGCAGACUUCUCUGCAGGAGUCAGGUGC
FYF tgRNA16
(SEQ ID NO: 20608)
CAUGGUGCACCUGACUCCUGGUUUUAGAGCUAGAAAUAGCAAGUU
AAAAUAAGGCUAGUCCGUUAUCAACUUGAAAAAGUGGCACCGAGU
CGGUGCAGACUUCUCUGCAGGAGUCAGGUGCA
FYF tgRNA17
(SEQ ID NO: 20609)
CAUGGUGCACCUGACUCCUGGUUUUAGAGCUAGAAAUAGCAAGUU
AAAAUAAGGCUAGUCCGUUAUCAACUUGAAAAAGUGGCACCGAGU
CGGUGCAGACUUCUCUGCAGGAGUCAGGUGCAC
FYF tgRNA18
(SEQ ID NO: 20610)
GCAUGGUGCACCUGACUCCUGGUUUUAGAGCUAGAAAUAGCAAGU
UAAAAUAAGGCUAGUCCGUUAUCAACUUGAAAAAGUGGCACCGAG
UCGGUGCAGACUUCUCUGCAGGAGUCAGGUGCAC
FYF tgRNA19
(SEQ ID NO: 20611)
CAUGGUGCACCUGACUCCUGGUUUUAGAGCUAGAAAUAGCAAGUU
AAAAUAAGGCUAGUCCGUUAUCAACUUGAAAAAGUGGCACCGAGU
CGGUGCGGCAGACUUCUCUGCAGGAGUCAGGUGC
FYF tgRNA20
(SEQ ID NO: 20612)
CAUGGUGCACCUGACUCCUGGUUUUAGAGCUAGAAAUAGCAAGUU
AAAAUAAGGCUAGUCCGUUAUCAACUUGAAAAAGUGGCACCGAGU
CGGUGCGGCAGACUUCUCUGCAGGAGUCAGGUGCAC

[0918] The gene modifying polypeptides tested comprised the sequence set out in Example 8 labeled RNAV209.

[0919] The gene modifying system comprising the gene modifying polypeptides and the template RNA described above was transfected into 293T cells and human HSCs. The gene modifying polypeptide and the template RNA were delivered by nucleofection in RNA format. Specifically, 1000 or 2000 ng of gene modifying polypeptide RNA were combined with 1000 or 2000 ng template RNA in RNA format, all at a 1 to 1 ratio. The RNA mixture was added to 200,000 293T cells or 200,000 primary human HSCs in a total of 20 μL of Lonza SF buffer (293T) or Lonza P3 buffer (HSC) and cells were nucleofected in 16-well nucleofection cassettes using program DS-150 (293T) or DZ-100 (HSC). After nucleofection, cells incubated at room temperature for 10 minutes and were transferred to 24-well plates containing 500 μL of DMEM+10% fetal bovine serum (293T) or 500 μL of StemSpan-XF+SCF at 100 ng/mL, Flt3-L at 100 ng/ml, and TPO at 100 ng/mL (HSC) in each well and cultured at 37° C., 5% CO₂ for 3 days prior to cell lysis and genomic DNA extraction. To analyze gene editing activity, primers flanking the target insertion site locus were used to amplify across the locus. Amplicons were analyzed via short read sequencing using an Illumina MiSeq. Replacement of the DNA bases adenine and guanine at nucleotide positions 20 and 21 to the bases cytosine and adenine, respectively, downstream of the transcriptional start site within the endogenous B-globin locus indicates successful editing.

[0920] The gene modifying systems tested achieved up to 18.5% average perfect rewrite in 293T cells and up to 7.9% perfect rewrite in primary human HSCs. As shown in FIG. 2, average perfect rewrite levels of 4%-18% were detected in 293T cells (single nick at 2000 ng per RNA) and 0%-2.5% in primary human HSCs (single nick at 2000 ng per RNA) when screened with template gRNAs. As shown in FIG. 3, average perfect rewrite levels of 6%-18.5% were detected in 293T cells (single nick at 2000 ng per RNA) and 0%-7.9% in primary human HSCs (single nick at 2000 ng per RNA) using the gRNAs shown. These results demonstrate the use of a gene modifying system to rewrite a non-pathogenic sequence into a clinically relevant codon in the endogenous B-globin locus in primary human HSCs.

### Example 6: Quantifying Activity of a Gene Editing Polypeptide and Template for Rewriting the Endogenous B-Globin Locus Achieved in Human Primary Fibroblasts

[0921] This example demonstrates the use of a gene modifying system containing a gene modifying polypeptide and a template RNA, to convert the glutamic acid codon (GAG) at amino acid position 7 in the endogenous B-globin locus in human primary fibroblasts to alanine (GCA). This conversion comprises a change of two base pairs (i.e., replacement of the DNA bases adenine and guanine at nucleotide positions 20 and 21 to the bases cytosine and adenine, respectively).

[0922] In this example, the template RNA contained:
[0923] (1) a gRNA spacer;
[0924] (2) a gRNA scaffold;
[0925] (3) a heterologous object sequence; and
[0926] (4) a primer binding site (PBS) sequence.

[0927] More specifically, the template RNA comprised the sequence of tgRNA14 as described in the previous example.

[0928] The gene modifying polypeptides tested comprised the sequence set out in Example 8 labeled RNAV209.

[0929] The system further comprises a gRNA sequence designed to produce a second nick, wherein the first 3, and last 3 bases have 2′-O-methyl phosphorothioate modifications and is comprised of the following sequence

(SEQ ID NO: 20613)
5′-CCUUGAUACCAACCUGCCCAGUUUUAGAGCUAGAAAUAGCAA
GUUAAAAUAAGGCUAGUCCGUUAUCAACUUGAAAAAGUGGCACCG
AGUCGGUGCUUUU-3′.

[0930] The gene modifying system comprising the gene modifying polypeptides and the template RNA described above was electroporated into human primary fibroblasts. The gene modifying polypeptide and the template RNA were delivered by electroporation in RNA format and comprised the sequences detailed above. Specifically, two doses were delivered (1000 ng and 2000 ng) wherein each gene editing component was delivered as RNA at the specified dose. For example, for the 1000 ng dose, 1000 ng of gene modifying polypeptide RNA were combined with 1000 ng template RNA in RNA format and 1000 ng of second nick gRNA in RNA format, in a 10 μL electroporation mixture comprised of 200,000 primary human fibroblasts resuspended in Buffer R (Invitrogen). The electroporation mixture was then aspirated into a 10 μL neon electroporation tip (Invitrogen), transferred to the neon electroporation system (Invitrogen), and electroporated with one pulse at 1700 mV, for 20 mS. Cells were then transferred to one well of a 12-well plate (Corning), cultured in 1 mL of Glutamax containing DMEM supplemented with 15% fetal bovine serum, 1% non-essential amino acids, 1% sodium pyruvate, and 1% HEPES (all Gibco), and cultured for 3 days at 37° C., 5% CO₂ prior to cell lysis and genomic DNA extraction. To analyze gene editing activity, primers flanking the target insertion site locus were used to amplify across the locus. Amplicons were analyzed via short read sequencing using an Illumina MiSeq. Replacement of the DNA bases adenine and guanine at nucleotide positions 20 and 21 to the bases cytosine and adenine, respectively, downstream of the transcriptional start site within the endogenous B-globin locus indicated successful editing.

[0931] As shown in FIG. 4, perfect rewrite levels of 3.7% and 10.6% were detected at the 1000 ng and 2000 ng doses, respectively, when the gene editing polypeptide was combined with the template guide RNA and no second nick gRNA was added. Addition of a second nick increased perfect rewriting from 3.7% to 44.5% at the 1000 ng dose and from 10.6% to 56.5% at the 2000 ng dose. In this experiment, indel levels in the range of 1.5-1.65% (single nick; 1000 ng, 2000 ng) and 7.9-5.8% (second nick; 1000 ng, 2000 ng) were observed. These results demonstrate the use of a gene modifying system to rewrite a non-pathogenic sequence into a clinically relevant codon in the endogenous B-globin locus in human primary fibroblasts. Furthermore, introduction of a second nick gRNA increased perfect rewriting by five to ten-fold, depending on dose administered.

### Example 7: Comparing the Activity of a Gene Editing Polypeptide and Multiple Templates for Rewriting Different Sequences into the Same Location within the Endogenous B-Globin Locus in Wild-Type Human Primary Fibroblasts and Fibroblasts Containing the Sickle Cell Mutation

[0932] This example demonstrates similar efficacy when installing different mutations into the same genomic loci by changing the sequences within the reverse transcriptase (RT) domain of a template guide RNA and holding the design of a gene modifying polypeptide, template RNA primer binding side (PBS) and template guide RNA scaffold constant. In this example, two adjacent DNA bases, one of which is positioned at the site mutated in sickle cell disease within the B-globin locus, were substituted in wild type fibroblasts, converting the glutamic acid codon (GAG) at amino acid position 7 in the endogenous B-globin locus in human primary fibroblasts to alanine (GCA). In parallel, at the same amino acid position, the valine codon (GTG) present in sickle mutation containing fibroblasts was converted to a synonymous glutamic acid codon (GAA).

[0933] In this example, the template RNA contained:
[0934] (1) a gRNA spacer;
[0935] (2) a gRNA scaffold;
[0936] (3) a heterologous object sequence; and
[0937] (4) a primer binding site (PBS) sequence.
   More specifically, the template RNA utilized in wild type fibroblasts comprised the sequence of tgRNA14 as described in the previous example.
   The template RNA utilized in sickle fibroblasts comprised the following sequence and contained 2′-O-methyl phosphorothioate modifications at the first 3, and last 3 bases:

(SEQ ID NO: 20614)
5′-CAUGGUGCACCUGACUCCUGGUUUUAGAGCUAGAAAUAGCAA
GUUAAAAUAAGGCUAGUCCGUUAUCAACUUGAAAAAGUGGCACCG
AGUCGGUGCAGACUUCUCUUCAGGAGUCAGGUG-3′

[0938] The gene modifying polypeptides tested comprised the sequence set out in Example 8 labeled RNAV209.

[0939] The system further comprised a gRNA sequence designed to produce a second nick, wherein the gRNA has a sequence of

(SEQ ID NO: 20615)
5′-CCUUGAUACCAACCUGCCCAGUUUUAGAGCUAGAAAUAGCAA
GUUAAAAUAAGGCUAGUCCGUUAUCAACUUGAAAAAGUGGCACCG
AGUCGGUGCUUUU-3′.

[0940] The same gRNA comprised of the sequence above was utilized for both wild type and sickle cell second nick conditions within this example.

[0941] The gene modifying system comprising the gene modifying polypeptides and the template RNA described above was electroporated into wild type and sickle mutation-containing human primary fibroblasts. The gene modifying polypeptide and the template RNA were delivered by electroporation in RNA format and comprised of the sequences detailed above. One dose was delivered (1000 ng) wherein each gene editing component was delivered as RNA at the specified dose. Specifically, 1000 ng of gene modifying polypeptide RNA were combined with 1000 ng template RNA in RNA format and 1000 ng of second nick gRNA in RNA format, in a 10 pL electroporation mixture comprised of 200,000 primary human fibroblasts resuspended in Buffer R (Invitrogen). The electroporation mixture was then aspirated into a 10 μL neon electroporation tip (Invitrogen), transferred to the neon electroporation system (Invitrogen), and electroporated with one pulse at 1700 mV, for 20 mS. Cells were then transferred to one well of a 12-well plate (Corning), cultured in 1 mL of Glutamax containing DMEM supplemented with 15% fetal bovine serum, 1% non-essential amino acids, 1% sodium pyruvate, and 1% HEPES (all Gibco), and cultured for 3 days at 37° C., 5% CO₂ prior to cell lysis and genomic DNA extraction. To analyze gene editing activity, primers flanking the target insertion site locus were used to amplify across the locus. Amplicons were analyzed by Sanger sequencing followed by analysis using the TIDER algorithm. Replacement of the DNA bases adenine and guanine at nucleotide positions 20 and 21 to the bases cytosine and adenine, respectively, downstream of the transcriptional start site within the endogenous B-globin locus indicated successful editing in wild type cells. Conversely, replacement of the DNA bases thymine and guanine at nucleotide positions 20 and 21 to the base adenine, respectively, downstream of the transcriptional start site within the endogenous B-globin locus indicated successful editing in sickle mutation containing fibroblasts.

[0942] As shown in FIG. 5, perfect rewrite levels of 10.8% and 6.1% were detected in wild type and sickle fibroblasts, respectively, when the gene editing polypeptide was combined with the template guide RNA. Addition of a second nick increased perfect rewriting to 75.6% in wild type cells and to 74.6% in sickle fibroblasts. These results demonstrate the use of a gene modifying system to correct a pathogenic mutation in sickle mutation-bearing human primary fibroblasts and to install a non-pathogenic mutation into wild-type human primary fibroblasts. Furthermore, introduction of a second nick gRNA increased perfect rewriting more than 7-fold in wild type primary fibroblasts and over ten-fold in sickle primary fibroblasts.

### Example 8: Quantifying Activity of a Gene Editing Polypeptide and Template for Rewriting the Endogenous FAH Locus Achieved in Primary Mouse Hepatocytes

[0943] This example demonstrates the use of a gene modifying system containing a gene modifying polypeptide and a template RNA, to convert an A nucleotide to a G nucleotide in the endogenous Fah locus in mouse primary hepatocytes derived from a Fah5981SB mouse. The Fah5981SB mouse model harbors a G to A point mutation in the last nucleotide of exon 8 of the Fah gene, leading to aberrant mRNA splicing and subsequent mRNA degradation, without the production of Fah protein and, and thus serves as a mouse model of hereditary tyrosinemia type I.

[0944] In this example, the template RNA contained:
[0945] (1) a gRNA spacer;
[0946] (2) a gRNA scaffold;
[0947] (3) a heterologous object sequence; and
[0948] (4) a primer binding site (PBS) sequence.

[0949] More specifically, the template RNA (including chemical modification pattern) comprised the following sequences:

FAH1_R14_P12 Heavy
RNACS048
(SEQ ID NO: 20616)
mG*mG*mA*rUrGrGrUrCrCrUrCrArUrGrArArCrGrArCrG
rUrUrUrUrArGrAmGmCmUmAmGmAmAmAmUmAmGmCrArArGr
UrUrArArArArUrArArGrGrCrUrArGrUrCrCrGrUrUrArU
rCrAmAmCmUmUmGmAmAmAmAmAmGmUmGmGmCmAmCmCmGmAm
GmUmCmGmGmUmGmCrUrUrArCrCrGrCrUrCrCrArGrUrCrG
rUrUrCrArUrGrArG*mG*mA*mC
FAH1_R15_P10_Heavy
RNACS049
(SEQ ID NO: 20617)
mG*mG*mA*rUrGrGrUrCrCrUrCrArUrGrArArCrGrArCrG
rUrUrUrUrArGrAmGmCmUmAmGmAmAmAmUmAmGmCrArArGr
UrUrArArArArUrArArGrGrCrUrArGrUrCrCrGrUrUrArU
rCrAmAmCmUmUmGmAmAmAmAmAmGmUmGmGmCmAmCmCmGmAm
GmUmCmGmGmUmGmCrArUrUrArCrCrGrCrUrCrCrArGrUrC
rGrUrUrCrArUrG*mA*mG*mG
FAH2_R19_P11_MUT_Heavy
RNACS052
(SEQ ID NO: 20618)
mU*mC*mA*rGrArGrGrArArGrCrUrGrGrGrCrCrArCrCrG
rUrUrUrUrArGrAmGmCmUmAmGmAmAmAmUmAmGmCrArArGr
UrUrArArArArUrArArGrGrCrUrArGrUrCrCrGrUrUrArU
rCrAmAmCmUmUmGmAmAmAmAmAmGmUmGmGmCmAmCmCmGmAm
GmUmCmGmGmUmGmCrUrGrGrArGrCrGrGrUrArArUrGrGrC
rUrGrGrUrGrGrCrCrCrArGrC*mU*mU*mC
FAH2_R19_P13_MUT_Heavy
RNACS053
(SEQ ID NO: 20619)
mU*mC*mA*rGrArGrGrArArGrCrUrGrGrGrCrCrArCrCrG
rUrUrUrUrArGrAmGmCmUmAmGmAmAmAmUmAmGmCrArArGr
UrUrArArArArUrArArGrGrCrUrArGrUrCrCrGrUrUrArU
rCrAmAmCmUmUmGmAmAmAmAmAmGmUmGmGmCmAmCmCmGmAm
GmUmCmGmGmUmGmCrUrGrGrArGrCrGrGrUrArArUrGrGrC
rUrGrGrUrGrGrCrCrCrArGrCrUrU*mC*mC*mU

Additional exemplary template RNAs that could be utilized in this experiment include the following:

FAH1
RNACS050
(SEQ ID NO: 20620)
mG*mG*mA*rUrGrGrUrCrCrUrCrArUrGrArArCrGrArCrG
rUrUrUrUrArGrAmGmCmUmAmGmAmAmAmUmAmGmCrArArGr
UrUrArArArArUrArArGrGrCrUrArGrUrCrCrGrUrUrArU
rCrAmAmCmUmUmGmAmAmAmAmAmGmUmGmGmCmAmCmCmGmAm
GmUmCmGmGmUmGmCrArGrGrCrArUrUrArCrCrGrCrUrCrC
rArGrUrCrGrUrUrCrArUrGrArG*mG*mA*mC
FAH1
RNACS051
(SEQ ID NO: 20621)
mG*mG*mA*rUrGrGrUrCrCrUrCrArUrGrArArCrGrArCrG
rUrUrUrUrArGrAmGmCmUmAmGmAmAmAmUmAmGmCrArArGr
UrUrArArArArUrArArGrGrCrUrArGrUrCrCrGrUrUrArU
rCrAmAmCmUmUmGmAmAmAmAmAmGmUmGmGmCmAmCmCmGmAm
GmUmCmGmGmUmGmCrArGrGrCrArUrUrArCrCrGrCrUrCrC
rArGrUrCrGrUrUrCrArUrG*mA*mG*mG

[0950] In the sequences above m=2′-O-methyl ribonucleotide, r=ribose and *=phosphorothioate bond.

[0951] The gene modifying polypeptides tested comprised sequence of: RNAV209 (nCas9-RT) and RNAV214 (wtCas9-RT). Specifically, the nCas9-RT and the wtCas9-RT had the following amino acid sequences:

nCas9-RT (RNAV209):
(SEQ ID NO: 20622)
MPAAKRVKLDGGDKKYSIGLDIGTNSVGWAVITDEYKVPSKKFK
VLGNTDRHSIKKNLIGALLFDSGETAEATRLKRTARRRYTRRKNR
ICYLQEIFSNEMAKVDDSFFHRLEESFLVEEDKKHERHPIFGNI
VDEVAYHEKYPTIYHLRKKLVDSTDKADLRLIYLALAHMIKFRG
HFLIEGDLNPDNSDVDKLFIQLVQTYNQLFEENPINASGVDAKAI
LSARLSKSRRLENLIAQLPGEKKNGLFGNLIALSLGLTPNFKSNF
DLAEDAKLQLSKDTYDDDLDNLLAQIGDQYADLFLAAKNLSDAIL
LSDILRVNTEITKAPLSASMIKRYDEHHQDLTLLKALVRQQLP
EKYKEIFFDQSKNGYAGYIDGGASQEEFYKFIKPILEKMDGTEEL
LVKLNREDLLRKQRTFDNGSIPHQIHLGELHAILRRQEDFYPFLK
DNREKIEKILTFRIPYYVGPLARGNSRFAWMTRKSEETITPWNFE
EVVDKGASAQSFIERMTNFDKNLPNEKVLPKHSLLYEYFTVYNEL
TKVKYVTEGMRKPAFLSGEQKKAIVDLLFKTNRKVTVKQLKEDYF
KKIECFDSVEISGVEDRFNASLGTYHDLLKIIKDKDFLDNEENED
ILEDIVLTLTLFEDREMIEERLKTYAHLFDDKVMKQLKRRRYTGW
GRLSRKLINGIRDKQSGKTILDFLKSDGFANRNFMQLIHDDSLTF
KEDIQKAQVSGQGDSLHEHIANLAGSPAIKKGILQTVKVVDELV
KVMGRHKPENIVIEMARENQTTQKGQKNSRERMKRIEEGIKELGS
QILKEHPVENTQLQNEKLYLYYLQNGRDMYVDQELDINRLSDYDV
DHIVPQSFLKDDSIDNKVLTRSDKARGKSDNVPSEEVVKKMKNYW
RQLLNAKLITQRKFDNLTKAERGGLSELDKAGFIKRQLVETRQIT
KHVAQILDSRMNTKYDENDKLIREVKVITLKSKLVSDFRKDFQFY
KVREINNYHHAHDAYLNAVVGTALIKKYPKLESEFVYGDYKVYDV
RKMIAKSEQEIGKATAKYFFYSNIMNFFKTEITLANGEIRKRPLI
ETNGETGEIVWDKGRDFATVRKVLSMPQVNIVKKTEVQTGGFSKE
SILPKRNSDKLIARKKDWDPKKYGGFDSPTVAYSVLVVAKVEKGK
SKKLKSVKELLGITIMERSSFEKNPIDFLEAKGYKEVKKDLIIKL
PKYSLFELENGRKRMLASAGELQKGNELALPSKYVNFLYLASHYE
KLKGSPEDNEQKQLFVEQHKHYLDEIIEQISEFSKRVILADANLD
KVLSAYNKHRDKPIREQAENIIHLFTLTNLGAPAAFKYFDTTIDR
KRYTSTKEVLDATLIHQSITGLYETRIDLSQLGGDSGGSSGGSSG
SETPGTSESATPESSGGSSGGSSTLNIEDEYRLHETSKEPDVSLG
STWLSDFPQAWAETGGMGLAVRQAPLIIPLKATSTPVSIKQYPMS
QEARLGIKPHIQRLLDQGILVPCQSPWNTPLLPVKKPGTNDYRPV
QDLREVNKRVEDIHPTVPNPYNLLSGLPPSHQWYTVLDLKDAFFC
LRLHPTSQPLFAFEWRDPEMGISGQLTWTRLPQGFKNSPTLFNEA
LHRDLADFRIQHPDLILLQYVDDLLLAATSELDCQQGTRALLQTL
GNLGYRASAKKAQICQKQVKYLGYLLKEGQRWLTEARKETVMGQP
TPKTPRQLREFLGKAGFCRLFIPGFAEMAAPLYPLTKPGTLFNWG
PDQQKAYQEIKQALLTAPALGLPDLTKPFELFVDEKQGYAKGVLT
QKLGPWRRPVAYLSKKLDPVAAGWPPCLRMVAAIAVLTKDAGKLT
MGQPLVILAPHAVEALVKQPPDRWLSNARMTHYQALLLDTDRVQF
GPVVALNPATLLPLPEEGLQHNCLDILAEAHGTRPDLTDQPLPDA
DHTWYTDGSSLLQEGQRKAGAAVTTETEVIWAKALPAGTSAQRAE
LIALTQALKMAEGKKLNVYTDSRYAFATAHIHGEIYRRRGWLTSE
GKEIKNKDEILALLKALFLPKRLSIIHCPGHQKGHSAEARGNRMA
DQAARKAAITETPDTSTLLIENSSPSGGSKRTADGSEFEKRTADG
SEFESPKKKAKVE
wtCas9-RT
(RNAV214):
(SEQ ID NO: 20623)
MPAAKRVKLDGGDKKYSIGLDIGTNSVGWAVITDEYKVPSKKF
KVLGNTDRHSIKKNLIGALLFDSGETAEATRLKRTARRRYTRRKN
RICYLQEIFSNEMAKVDDSFFHRLEESFLVEEDKKHERHPIFGNI
VDEVAYHEKYPTIYHLRKKLVDSTDKADLRLIYLALAHMIKFRG
HFLIEGDLNPDNSDVDKLFIQLVQTYNQLFEENPINASGVDAKAI
LSARLSKSRRLENLIAQLPGEKKNGLFGNLIALSLGLTPNFKSNF
DLAEDAKLQLSKDTYDDDLDNLLAQIGDQYADLFLAAKNLSDAIL
LSDILRVNTEITKAPLSASMIKRYDEHHQDLTLLKALVRQQLPE
KYKEIFFDQSKNGYAGYIDGGASQEEFYKFIKPILEKMDGTEELL
VKLNREDLLRKQRTFDNGSIPHQIHLGELHAILRRQEDFYPFLKD
NREKIEKILTFRIPYYVGPLARGNSRFAWMTRKSEETITPWNFEE
VVDKGASAQSFIERMTNFDKNLPNEKVLPKHSLLYEYFTVYNELT
KVKYVTEGMRKPAFLSGEQKKAIVDLLFKTNRKVTVKQLKEDYFK
KIECFDSVEISGVEDRFNASLGTYHDLLKIIKDKDFLDNEENEDI
LEDIVLTLTLFEDREMIEERLKTYAHLFDDKVMKQLKRRRYTGWG
RLSRKLINGIRDKQSGKTILDFLKSDGFANRNFMQLIHDDSLTFK
EDIQKAQVSGQGDSLHEHIANLAGSPAIKKGILQTVKVVDELVKV
MGRHKPENIVIEMARENQTTQKGQKNSRERMKRIEEGIKELGSQI
LKEHPVENTQLQNEKLYLYYLQNGRDMYVDQELDINRLSDYDVDH
IVPQSFLKDDSIDNKVLTRSDKNRGKSDNVPSEEVVKKMKNYWRQ
LLNAKLITQRKFDNLTKAERGGLSELDKAGFIKRQLVETRQITKH
VAQILDSRMNTKYDENDKLIREVKVITLKSKLVSDFRKDFQFYKV
REINNYHHAHDAYLNAVVGTALIKKYPKLESEFVYGDYKVYDVRK
MIAKSEQEIGKATAKYFFYSNIMNFFKTEITLANGEIRKRPLIET
NGETGEIVWDKGRDFATVRKVLSMPQVNIVKKTEVQTGGFSKESI
LPKRNSDKLIARKKDWDPKKYGGFDSPTVAYSVLVVAKVEKGKSK
KLKSVKELLGITIMERSSFEKNPIDFLEAKGYKEVKKDLIIKLPK
YSLFELENGRKRMLASAGELQKGNELALPSKYVNFLYLASHYEKL
KGSPEDNEQKQLFVEQHKHYLDEIIEQISEFSKRVILADANLDKV
LSAYNKHRDKPIREQAENIIHLFTLTNLGAPAAFKYFDTTIDRKR
YTSTKEVLDATLIHQSITGLYETRIDLSQLGGDSGGSSGGSSGSE
TPGTSESATPESSGGSSGGSSTLNIEDEYRLHETSKEPDVSLGST
WLSDFPQAWAETGGMGLAVRQAPLIIPLKATSTPVSIKQYPMSQE
ARLGIKPHIQRLLDQGILVPCQSPWNTPLLPVKKPGTNDYRPVQ
DLREVNKRVEDIHPTVPNPYNLLSGLPPSHQWYTVLDLKDAFFCL
RLHPTSQPLFAFEWRDPEMGISGQLTWTRLPQGFKNSPTLFNEAL
HRDLADFRIQHPDLILLQYVDDLLLAATSELDCQQGTRALLQTLG
NLGYRASAKKAQICQKQVKYLGYLLKEGQRWLTEARKETVMGQPT
PKTPRQLREFLGKAGFCRLFIPGFAEMAAPLYPLTKPGTLFNWGP
DQQKAYQEIKQALLTAPALGLPDLTKPFELFVDEKQGYAKGVLTQ
KLGPWRRPVAYLSKKLDPVAAGWPPCLRMVAAIAVLTKDAGKLTM
GQPLVILAPHAVEALVKQPPDRWLSNARMTHYQALLLDTDRVQFG
PVVALNPATLLPLPEEGLQHNCLDILAEAHGTRPDLTDQPLPDAD
HTWYTDGSSLLQEGQRKAGAAVTTETEVIWAKALPAGTSAQRAEL
IALTQALKMAEGKKLNVYTDSRYAFATAHIHGEIYRRRGWLTSEG
KEIKNKDEILALLKALFLPKRLSIIHCPGHQKGHSAEARGNRMAD
QAARKAAITETPDTSTLLIENSSPSGGSKRTADGSEFEKRTADGS
EFESPKKKAKVE

Underlining indicates the residue that differs between the nickase and wild-type sequences.

[0952] The gene modifying system comprising the gene modifying polypeptides listed above and the template RNA described above were transfected into primary mouse hepatocytes. The gene modifying polypeptide and the template RNA were delivered by nucleofection in the RNA format. Specifically, 4 ug of gene modifying polypeptide mRNA were combined with 10 ug of chemically synthesized template RNA in 5 μL of water. The transfection mix was added to 100,000 mouse primary hepatocytes in Buffer P3 [Lonza], and cells were nucleofected using program DG-138. After nucleofection, cells were grown at 37° C., 5% CO₂ for 3 days prior to cell lysis and genomic DNA extraction. To analyze gene editing activity, primers flanking the target insertion site locus were used to amplify across the locus. Amplicons were analyzed via short read sequencing using an Illumina MiSeq. Conversion of terminal A to G sequence in exon 8 of fah gene indicates successful editing.

[0953] As shown in FIG. 2, for FAH2 templates, perfect rewrite levels (conversion of A to G with no unwanted mutations detected) of 4-8% were detected with RNAV209 but not with RNAV214-040. Indel levels of 4.4 to 6.6% were observed with RNAV209. Furthermore, the amount of WT Fah mRNA was measured using quantitative RT-PCR using primers that bind to exons 7 and 8. As shown in FIG. 3, FAH2 templates result in an increase in the abundance of Fah mRNA relative to WT by up to 12% when FAH2 template is tested with RNAV209-013 mRNA. These results demonstrate the use of a gene modifying system to reverse a mutation in the Fah gene, resulting in partial restoration of the expression of wild-type Fah mRNA.

### Example 9: Quantifying Activity of a Gene Editing Polypeptide and Template In Vivo for Rewriting the Endogenous FAH Locus Achieved in Mouse Liver

[0954] This example demonstrates the use of a gene modifying system containing a gene modifying polypeptide and a template RNA, to convert an A nucleotide to a G nucleotide in the Fah5981SB mouse model into the endogenous Fah locus in mouse liver. The Fah5981SB mouse model harbors a G to A point mutation in the last nucleotide of exon 8 of the Fah gene, leading to aberrant mRNA splicing and subsequent mRNA degradation, without the production of Fah protein and serves as a mouse model of hereditary tyrosinemia type I.

[0955] In this example, the template RNA contained:
[0956] (1) a gRNA spacer;
[0957] (2) a gRNA scaffold;
[0958] (3) a heterologous object sequence; and
[0959] (4) a primer binding site (PBS) sequence.

[0960] More specifically, the template RNA comprised the following sequences:

FAH1_R14_P12_Heavy
RNACS048
(SEQ ID NO: 20624)
mG*mG*mA*rUrGrGrUrCrCrUrCrArUrGrArArCrGrArCrG
rUrUrUrUrArGrAmGmCmUmAmGmAmAmAmUmAmGmCrArArGr
UrUrArArArArUrArArGrGrCrUrArGrUrCrCrGrUrUrArU
rCrAmAmCmUmUmGmAmAmAmAmAmGmUmGmGmCmAmCmCmGmAm
GmUmCmGmGmUmGmCrUrUrArCrCrGrCrUrCrCrArGrUrCrG
rUrUrCrArUrGrArG*mG*mA*mC
FAH1_R15_P10_Heavy
RNACS049
(SEQ ID NO: 20625)
mG*mG*mA*rUrGrGrUrCrCrUrCrArUrGrArArCrGrArCrG
rUrUrUrUrArGrAmGmCmUmAmGmAmAmAmUmAmGmCrArArGr
UrUrArArArArUrArArGrGrCrUrArGrUrCrCrGrUrUrArU
rCrAmAmCmUmUmGmAmAmAmAmAmGmUmGmGmCmAmCmCmGmAm
GmUmCmGmGmUmGmCrArUrUrArCrCrGrCrUrCrCrArGrUrC
rGrUrUrCrArUrG*mA*mG*mG
FAH2_R19_P11_MUT_Heavy
RNACS052
(SEQ ID NO: 20626)
mU*mC*mA*rGrArGrGrArArGrCrUrGrGrGrCrCrArCrCrG
rUrUrUrUrArGrAmGmCmUmAmGmAmAmAmUmAmGmCrArArGr
UrUrArArArArUrArArGrGrCrUrArGrUrCrCrGrUrUrArU
rCrAmAmCmUmUmGmAmAmAmAmAmGmUmGmGmCmAmCmCmGmAm
GmUmCmGmGmUmGmCrUrGrGrArGrCrGrGrUrArArUrGrGrC
rUrGrGrUrGrGrCrCrCrArGrC*mU*mU*mC
FAH2_R19_P13_MUT_Heavy
RNACS053
mU*mC*mA*rGrArGrGrArArGrCrUrGrGrGrCrCrArCrCrG
(SEQ ID NO: 20627)
rUrUrUrUrArGrAmGmCmUmAmGmAmAmAmUmAmGmCrArArGr
UrUrArArArArUrArArGrGrCrUrArGrUrCrCrGrUrUrArU
rCrAmAmCmUmUmGmAmAmAmAmAmGmUmGmGmCmAmCmCmGmAm
GmUmCmGmGmUmGmCrUrGrGrArGrCrGrGrUrArArUrGrGrC
rUrGrGrUrGrGrCrCrCrArGrCrUrU*mC*mC*mU

[0961] The gene modifying polypeptides tested comprised a sequence of: RNAV209 and RNAV214, the sequences of which are each provided in Example 3.

[0962] The gene modifying system comprising the gene modifying polypeptides and the template RNA described above was formulated in LNP and delivered to mice. Specifically, 2 mg/kg of total RNA equivalent formulated in LNPs, combined at 1:1 (w/w) of template RNA and mRNA, were dosed intravenously in 7 to 9-week-old, mixed gender Fah5981SB mice. Six hours or 6 days post-dosing, animals were sacrificed, and their liver collected for analyses. To determine the expression distribution of the gene modifying polypeptide in the liver, 6-hr liver samples were subjected to immunohistochemistry using an anti-Cas9 antibody. Upon staining, quantification of Cas9-positive hepatocytes was determined by QuPath Markup. As shown in FIG. 4, the expression of the gene modifying polypeptide was observed in 82-91% of hepatocytes.

[0963] To analyze gene editing activity, primers flanking the target insertion site locus were used to amplify across the locus in the genomic DNA of liver samples collected 6 days post-dosing. Amplicons were analyzed via short read sequencing using an Illumina MiSeq. Conversion of an A nucleotide to a G nucleotide indicates successful editing. As shown in FIG. 5, perfect rewrite levels (conversion of A to G with no unwanted mutations detected) of 0.1%-1.9% were detected across the different groups. Indel levels were in the range of 0.2%-0.4%.

[0964] To determine the phenotypic correction caused by the gene editing activity, the restoration of wild-type FAH mRNA was determined by real-time qRT-PCR, and the restoration of Fah protein expression determined by immunohistochemistry using an anti-Fah antibody. As shown in FIG. 6, wild-type mRNA restoration of 0.1%-6%, relative to littermate heterozygous mice, was detected across the different groups. As shown in FIG. 7, Fah protein was detected in 0.1%-7% of liver cross-sectional area across the different groups. These results demonstrate the use of a gene modifying system to reverse a mutation in the Fah gene in an in vivo mouse model for hereditary tyrosinemia type I, resulting in partial restoration of expression of wild-type Fah mRNA and Fah protein.

### Example 10. Gene Editing at the TTR Locus in an In Vivo Mouse Model

[0965] This Example demonstrates successful delivery of an mRNA and guide using Cas9-mediated gene editing using the protospacer sequence ACACAAAUACCAGUCCAGCG (SEQ ID NO: 20630) that targets the TTR locus using a gene modifying polypeptide and RNA in a C57Blk/6 mouse.

[0966] RNAs were prepared as follows. An mRNA encoding a gene modifying polypeptide having the sequence shown in Table 10A below was produced by in vitro transcription and the purified mRNA was dissolved in 1 mM sodium citrate, pH 6, to a final concentration of RNA of 1-2 mg/mL. Similarly, a guide RNA having a sequence shown in Table 10A below was produced by chemical synthesis and dissolved in water or aqueous buffer, to a final concentration of RNA of 1-2 mg/mL.

TABLE 10A
Sequences of Example 10

| Name | Nucleic acid sequence | SEQ ID NO |
|---|---|---|
| Cas9-RT | AUGCCUGCGGCUAAGCGGGU | 20628 |
| gene | AAAAUUGGAUGGUGGGGACA | |
| modifying | AGAAGUACAGCAUCGGCCUG | |
| poly- | GACAUCGGCACCAACUCUGU | |
| peptide | GGGCUGGGCCGUGAUCACCG | |
| | ACGAGUACAAGGUGCCCAGC | |
| | AAGAAAUUCAAGGUGCUGGG | |
| | CAACACCGACCGGCACAGCA | |
| | UCAAGAAGAACCUGAUCGGA | |
| | GCCCUGCUGUUCGACAGCGG | |
| | CGAAACAGCCGAGGCCACCC | |
| | GGCUGAAGAGAACCGCCAGA | |
| | AGAAGAUACACCAGACGGAA | |
| | GAACCGGAUCUGCUAUCUGC | |
| | AAGAGAUCUUCAGCAACGAG | |
| | AUGGCCAAGGUGGACGACAG | |
| | CUUCUUCCACAGACUGGAAG | |
| | AGUCCUUCCUGGUGGAAGAG | |
| | GAUAAGAAGCACGAGCGGCA | |
| | CCCCAUCUUCGGCAACAUCG | |
| | UGGACGAGGUGGCCUACCAC | |
| | GAGAAGUACCCCACCAUCUA | |
| | CCACCUGAGAAAGAAACUGG | |
| | UGGACAGCACCGACAAGGCC | |
| | GACCUGCGGCUGAUCUAUCU | |
| | GGCCCUGGCCCACAUGAUCA | |
| | AGUUCCGGGGCCACUUCCUG | |
| | AUCGAGGGCGACCUGAACCC | |
| | CGACAACAGCGACGUGGACA | |
| | AGCUGUUCAUCCAGCUGGUG | |
| | CAGACCUACAACCAGCUGUU | |
| | CGAGGAAAACCCCAUCAACG | |
| | CCAGCGGCGUGGACGCCAAG | |
| | GCCAUCCUGUCUGCCAGACU | |
| | GAGCAAGAGCAGACGGCUGG | |
| | AAAAUCUGAUCGCCCAGCUG | |
| | CCCGGCGAGAAGAAGAAUGG | |
| | CCUGUUCGGAAACCUGAUUG | |
| | CCCUGAGCCUGGGCCUGACC | |
| | CCCAACUUCAAGAGCAACUU | |
| | CGACCUGGCCGAGGAUGCCA | |
| | AACUGCAGCUGAGCAAGGAC | |
| | ACCUACGACGACGACCUGGA | |
| | CAACCUGCUGGCCCAGAUCG | |
| | GCGACCAGUACGCCGACCUG | |
| | UUUCUGGCCGCCAAGAACCU | |
| | GUCCGACGCCAUCCUGCUGA | |
| | GCGACAUCCUGAGAGUGAAC | |
| | ACCGAGAUCACCAAGGCCCC | |
| | CCUGAGCGCCUCUAUGAUCA | |
| | AGAGAUACGACGAGCACCAC | |
| | CAGGACCUGACCCUGCUGAA | |
| | AGCUCUCGUGCGGCAGCAGC | |
| | UGCCUGAGAAGUACAAAGAG | |
| | AUUUUCUUCGACCAGAGCAA | |
| | GAACGGCUACGCCGGCUACA | |
| | UUGACGGCGGAGCCAGCCAG | |
| | GAAGAGUUCUACAAGUUCAU | |
| | CAAGCCCAUCCUGGAAAAGA | |
| | UGGACGGCACCGAGGAACUG | |
| | CUCGUGAAGCUGAACAGAGA | |
| | GGACCUGCUGCGGAAGCAGC | |
| | GGACCUUCGACAACGGCAGC | |
| | AUCCCCCACCAGAUCCACCU | |
| | GGGAGAGCUGCACGCCAUUC | |
| | UGCGGCGGCAGGAAGAUUUU | |
| | UACCCAUUCCUGAAGGACAA | |
| | CCGGGAAAAGAUCGAGAAGA | |
| | UCCUGACCUUCCGCAUCCCC | |
| | UACUACGUGGGCCCUCUGGC | |
| | CAGGGGAAACAGCAGAUUCG | |
| | CCUGGAUGACCAGAAAGAGC | |
| | GAGGAAACCAUCACCCCCUG | |
| | GAACUUCGAGGAAGUGGUGG | |
| | ACAAGGGCGCUUCCGCCCAG | |
| | AGCUUCAUCGAGCGGAUGAC | |
| | CAACUUCGAUAAGAACCUGC | |
| | CCAACGAGAAGGUGCUGCCC | |
| | AAGCACAGCCUGCUGUACGA | |
| | GUACUUCACCGUGUAUAACG | |
| | AGCUGACCAAAGUGAAAUAC | |
| | GUGACCGAGGGAAUGAGAAA | |
| | GCCCGCCUUCCUGAGCGGCG | |
| | AGCAGAAAAAGGCCAUCGUG | |
| | GACCUGCUGUUCAAGACCAA | |
| | CCGGAAAGUGACCGUGAAGC | |
| | AGCUGAAAGAGGACUACUUC | |
| | AAGAAAAUCGAGUGCUUCGA | |
| | CUCCGUGGAAAUCUCCGGCG | |
| | UGGAAGAUCGGUUCAACGCC | |
| | UCCCUGGGCACAUACCACGA | |
| | UCUGCUGAAAAUUAUCAAGG | |
| | ACAAGGACUUCCUGGACAAU | |
| | GAGGAAAACGAGGACAUUCU | |
| | GGAAGAUAUCGUGCUGACCC | |
| | UGACACUGUUUGAGGACAGA | |
| | GAGAUGAUCGAGGAACGGCU | |
| | GAAAACCUAUGCCCACCUGU | |
| | UCGACGACAAAGUGAUGAAG | |
| | CAGCUGAAGCGGCGGAGAUA | |
| | CACCGGCUGGGGCAGGCUGA | |
| | GCCGGAAGCUGAUCAACGGC | |
| | AUCCGGGACAAGCAGUCCGG | |
| | CAAGACAAUCCUGGAUUUCC | |
| | UGAAGUCCGACGGCUUCGCC | |
| | AACAGAAACUUCAUGCAGCU | |
| | GAUCCACGACGACAGCCUGA | |
| | CCUUUAAAGAGGACAUCCAG | |
| | AAAGCCCAGGUGUCCGGCCA | |
| | GGGCGAUAGCCUGCACGAGC | |
| | ACAUUGCCAAUCUGGCCGGC | |
| | AGCCCCGCCAUUAAGAAGGG | |
| | CAUCCUGCAGACAGUGAAGG | |
| | UGGUGGACGAGCUCGUGAAA | |
| | GUGAUGGGCCGGCACAAGCC | |
| | CGAGAACAUCGUGAUCGAAA | |
| | UGGCCAGAGAGAACCAGACC | |
| | ACCCAGAAGGGACAGAAGAA | |
| | CAGCCGCGAGAGAAUGAAGC | |
| | GGAUCGAAGAGGGCAUCAAA | |
| | GAGCUGGGCAGCCAGAUCCU | |
| | GAAAGAACACCCCGUGGAAA | |
| | ACACCCAGCUGCAGAACGAG | |
| | AAGCUGUACCUGUACUACCU | |
| | GCAGAAUGGGCGGGAUAUGU | |
| | ACGUGGACCAGGAACUGGAC | |
| | AUCAACCGGCUGUCCGACUA | |
| | CGAUGUGGACCAUAUCGUGC | |
| | CUCAGAGCUUUCUGAAGGAC | |
| | GACUCCAUCGACAACAAGGU | |
| | GCUGACCAGAAGCGACAAGA | |
| | AUCGGGGCAAGAGCGACAAC | |
| | GUGCCCUCCGAAGAGGUCGU | |
| | GAAGAAGAUGAAGAACUACU | |
| | GGCGGCAGCUGCUGAACGCC | |
| | AAGCUGAUUACCCAGAGAAA | |
| | GUUCGACAAUCUGACCAAGG | |
| | CCGAGAGAGGCGGCCUGAGC | |
| | GAACUGGAUAAGGCCGGCUU | |
| | CAUCAAGAGACAGCUGGUGG | |
| | AAACCCGGCAGAUCACAAAG | |
| | CACGUGGCACAGAUCCUGGA | |
| | CUCCCGGAUGAACACUAAGU | |
| | ACGACGAGAAUGACAAGCUG | |
| | AUCCGGGAAGUGAAAGUGAU | |
| | CACCCUGAAGUCCAAGCUGG | |
| | UGUCCGAUUUCCGGAAGGAU | |
| | UUCCAGUUUUACAAAGUGCG | |
| | CGAGAUCAACAACUACCACC | |
| | ACGCCCACGACGCCUACCUG | |
| | AACGCCGUCGUGGGAACCGC | |
| | CCUGAUCAAAAAGUACCCUA | |
| | AGCUGGAAAGCGAGUUCGUG | |
| | UACGGCGACUACAAGGUGUA | |
| | CGACGUGCGGAAGAUGAUCG | |
| | CCAAGAGCGAGCAGGAAAUC | |
| | GGCAAGGCUACCGCCAAGUA | |
| | CUUCUUCUACAGCAACAUCA | |
| | UGAACUUUUUCAAGACCGAG | |
| | AUUACCCUGGCCAACGGCGA | |
| | GAUCCGGAAGCGGCCUCUGA | |
| | UCGAGACAAACGGCGAAACC | |
| | GGGGAGAUCGUGUGGGAUAA | |
| | GGGCCGGGAUUUUGCCACCG | |
| | UGCGGAAAGUGCUGAGCAUG | |
| | CCCCAAGUGAAUAUCGUGAA | |
| | AAAGACCGAGGUGCAGACAG | |
| | GCGGCUUCAGCAAAGAGUCU | |
| | AUCCUGCCCAAGAGGAACAG | |
| | CGAUAAGCUGAUCGCCAGAA | |
| | AGAAGGACUGGGACCCUAAG | |
| | AAGUACGGCGGCUUCGACAG | |
| | CCCCACCGUGGCCUAUUCUG | |
| | UGCUGGUGGUGGCCAAAGUG | |
| | GAAAAGGGCAAGUCCAAGAA | |
| | ACUGAAGAGUGUGAAAGAGC | |
| | UGCUGGGGAUCACCAUCAUG | |
| | GAAAGAAGCAGCUUCGAGAA | |
| | GAAUCCCAUCGACUUUCUGG | |
| | AAGCCAAGGGCUACAAAGAA | |
| | GUGAAAAAGGACCUGAUCAU | |
| | CAAGCUGCCUAAGUACUCCC | |
| | UGUUCGAGCUGGAAAACGGC | |
| | CGGAAGAGAAUGCUGGCCUC | |
| | UGCCGGCGAACUGCAGAAGG | |
| | GAAACGAACUGGCCCUGCCC | |
| | UCCAAAUAUGUGAACUUCCU | |
| | GUACCUGGCCAGCCACUAUG | |
| | AGAAGCUGAAGGGCUCCCCC | |
| | GAGGAUAAUGAGCAGAAACA | |
| | GCUGUUUGUGGAACAGCACA | |
| | AGCACUACCUGGACGAGAUC | |
| | AUCGAGCAGAUCAGCGAGUU | |
| | CUCCAAGAGAGUGAUCCUGG | |
| | CCGACGCUAAUCUGGACAAA | |
| | GUGCUGUCCGCCUACAACAA | |
| | GCACCGGGAUAAGCCCAUCA | |
| | GAGAGCAGGCCGAGAAUAUC | |
| | AUCCACCUGUUUACCCUGAC | |
| | CAAUCUGGGAGCCCCUGCCG | |
| | CCUUCAAGUACUUUGACACC | |
| | ACCAUCGACCGGAAGAGGUA | |
| | CACCAGCACCAAAGAGGUGC | |
| | UGGACGCCACCCUGAUCCAC | |
| | CAGAGCAUCACCGGCCUGUA | |
| | CGAGACACGGAUCGACCUGU | |
| | CUCAGCUGGGAGGUGACUCU | |
| | GGAGGAUCUAGCGGAGGAUC | |
| | CUCUGGCAGCGAGACACCAG | |
| | GAACAAGCGAGUCAGCAACA | |
| | CCAGAGAGCAGUGGCGGCAG | |
| | CAGCGGCGGCAGCAGCACCC | |
| | UAAAUAUAGAAGAUGAGUAU | |
| | CGGCUACAUGAGACCUCAAA | |
| | AGAGCCAGAUGUUUCUCUAG | |
| | GGUCCACAUGGCUGUCUGAU | |
| | UUUCCUCAGGCCUGGGCGGA | |
| | AACCGGGGGCAUGGGACUGG | |
| | CAGUUCGCCAAGCUCCUCUG | |
| | AUCAUACCUCUGAAAGCAAC | |
| | CUCUACCCCCGUGUCCAUAA | |
| | AACAAUACCCCAUGUCACAA | |
| | GAAGCCAGACUGGGGAUCAA | |
| | GCCCCACAUACAGAGACUGU | |
| | UGGACCAGGGAAUACUGGUA | |
| | CCCUGCCAGUCCCCCUGGAA | |
| | CACGCCCCUGCUACCCGUUA | |
| | AGAAACCAGGGACUAAUGAU | |
| | UAUAGGCCUGUCCAGGAUCU | |
| | GAGAGAAGUCAACAAGCGGG | |
| | UGGAGGACAUCCACCCCACC | |
| | GUGCCCAACCCUUACAACCU | |
| | CUUGAGCGGGCUCCCACCGU | |
| | CCCACCAGUGGUACACUGUG | |
| | CUUGAUUUAAAGGAUGCCUU | |
| | UUUCUGCCUGAGACUCCACC | |
| | CCACCAGUCAGCCUCUCUUC | |
| | GCCUUUGAGUGGAGAGAUCC | |
| | AGAGAUGGGAAUCUCAGGAC | |
| | AAUUGACCUGGACCAGACUC | |
| | CCACAGGGUUUCAAAAACAG | |
| | UCCCACCCUGUUUAAUGAGG | |
| | CACUGCACAGAGACCUAGCA | |
| | GACUUCCGGAUCCAGCACCC | |
| | AGACUUGAUCCUGCUACAGU | |
| | ACGUGGAUGACUUACUGCUG | |
| | GCCGCCACUUCUGAGCUAGA | |
| | CUGCCAACAAGGUACUCGGG | |
| | CCCUGUUACAAACCCUAGGG | |
| | AACCUCGGGUAUCGGGCCUC | |
| | GGCCAAGAAAGCCCAAAUUU | |
| | GCCAGAAACAGGUCAAGUAU | |
| | CUGGGGUAUCUUCUAAAAGA | |
| | GGGUCAGAGAUGGCUGACUG | |
| | AGGCCAGAAAAGAGACUGUG | |
| | AUGGGGCAGCCUACUCCGAA | |
| | GACCCCUCGACAACUAAGGG | |
| | AGUUCCUAGGGAAGGCAGGC | |
| | UUCUGUCGCCUCUUCAUCCC | |
| | UGGGUUUGCAGAAAUGGCAG | |
| | CCCCCCUGUACCCUCUCACC | |
| | AAACCGGGGACUCUGUUUAA | |
| | UUGGGGCCCAGACCAACAAA | |
| | AGGCCUAUCAAGAAAUCAAG | |
| | CAAGCCCUUCUAACUGCCCC | |
| | AGCCCUGGGGUUGCCAGAUU | |
| | UGACUAAGCCCUUUGAACUC | |
| | UUUGUCGACGAGAAGCAGGG | |
| | CUACGCCAAAGGUGUCCUAA | |
| | CGCAAAAACUGGGACCUUGG | |
| | CGUCGGCCGGUGGCCUACCU | |
| | GUCCAAAAAGCUAGACCCAG | |
| | UAGCAGCUGGGUGGCCCCCU | |
| | UGCCUACGGAUGGUAGCAGC | |
| | CAUUGCCGUACUGACAAAGG | |
| | AUGCAGGCAAGCUAACCAUG | |
| | GGACAGCCACUAGUCAUUCU | |
| | GGCCCCCCAUGCAGUAGAGG | |
| | CACUAGUCAAACAACCCCCC | |
| | GACCGCUGGCUUUCCAACGC | |
| | CCGGAUGACUCACUAUCAGG | |
| | CCUUGCUUUUGGACACGGAC | |
| | CGGGUCCAGUUCGGACCGGU | |
| | GGUAGCCCUGAACCCGGCUA | |
| | CGCUGCUCCCACUGCCUGAG | |
| | GAAGGGCUGCAACACAACUG | |
| | CCUUGAUAUCCUGGCCGAAG | |
| | CCCACGGAACCCGACCCGAC | |
| | CUAACGGACCAGCCGCUCCC | |
| | AGACGCCGACCACACCUGGU | |
| | ACACGGAUGGAAGCAGUCUC | |
| | UUACAAGAGGGACAGCGUAA | |
| | GGCGGGAGCUGCGGUGACCA | |
| | CCGAGACCGAGGUAAUCUGG | |
| | GCUAAAGCCCUGCCAGCCGG | |
| | GACAUCCGCUCAGCGGGCUG | |
| | AACUGAUAGCACUCACCCAG | |
| | GCCCUAAAGAUGGCAGAAGG | |
| | UAAGAAGCUAAAUGUUUAUA | |
| | CUGAUAGCCGUUAUGCUUUU | |
| | GCUACUGCCCAUAUCCAUGG | |
| | AGAAAUAUACAGAAGGCGUG | |
| | GGUGGCUCACAUCAGAAGGC | |
| | AAAGAGAUCAAAAAUAAAGA | |
| | CGAGAUCUUGGCCCUACUAA | |
| | AAGCCCUCUUUCUGCCCAAA | |
| | AGACUUAGCAUAAUCCAUUG | |
| | UCCAGGACAUCAAAAGGGAC | |
| | ACAGCGCCGAGGCUAGAGGC | |
| | AACCGGAUGGCUGACCAAGC | |
| | GGCCCGAAAGGCAGCCAUCA | |
| | CAGAGACUCCAGACACCUCU | |
| | ACCCUCCUCAUAGAAAAUUC | |
| | AUCACCCUCUGGCGGCUCAA | |
| | AAAGAACCGCCGACGGCAGC | |
| | GAAUUCGAGAAAAGGACGGC | |
| | GGAUGGUAGCGAAUUCGAGA | |
| | GCCCUAAAAAGAAGGCCAAG | |
| | GUAGAGUAA | |
| guide RNA | mA*mC*mA*CAAAUACCAGU | 20629 |
| | CCAGCGGUUUUAGAmGmCmU | |
| | mAmGmAmAmAmUmAmGmCAA | |
| | GUUAAAAUAAGGCUAGUCCG | |
| | UUAUCAmAmCmUmUmGmAmA | |
| | mAmAmAmGmUmGmGmCmAmC | |
| | mCmGmAmGmUmCmGmGmUmG | |
| | mCmU*mU*mU*mU | |
| | m = 2′OMethyl, | |
| | * = phosphorothioate | |
| | linkage | |

[0967] Lipid nanoparticle (LNP) components (ionizable lipid, helper lipid, sterol, PEG) were dissolved in 100% ethanol with the lipid component molar ratios of 47:8:43.5:1.5, respectively. RNA (guide and mRNA) was combined in a 1:1 weight ratio and diluted to a concentration of 0.05-0.2 mg/mL in sodium acetate buffer, pH 5. RNA was formulated into distinct LNPs with a lipid amine to total RNA phosphate (N:P) molar ratio of 4.0. The LNPs were formed by microfluidic or turbulent mixing of the lipid and RNA solutions. A 3:1 ratio of aqueous to organic solvent was maintained during mixing using differential flow rates. After mixing, the LNPs were diluted, collected and buffer exchanged into 50 mM Tris, 9% sucrose buffer using tangential flow filtration. Formulations were concentrated to 1.0 mg/mL or higher then filtered through 0.2 μm sterile filter. The final LNP were stored at −80° C. until further use.

[0968] The LNP formulations were delivered intravenously by bolus tail vein injection to C57Blk/6 mice that were approximately 8 weeks old at concentrations ranging from 1-0.1 mg/kg. The expression of the Cas9-RT was measured by 6 hours after injection by euthanizing animals and collecting livers during necropsy. Animals were euthanized at 5 days after injection where liver was collected upon necropsy to which the activity of gene editing of the TTR locus was assessed. Expression of the Cas9-RT gene editing polypeptide in liver was measured by Western blot where Cas9 was detected by a mouse monoclonal antibody (7A9-3A3, Cell Signaling Technology) and GAPDH (Cell Signaling Technology) was used as a loading control. (FIG. 12). Editing of the TTR locus was quantified by Sanger sequencing followed by TIDE analysis of an amplicon of the TTR locus near the binding site of the protospacer. Editing of the TTR locus was observed, as shown in FIG. 13. TTR protein levels in serum were quantified by an ELISA using a standard curve (Aviva Biosciences). TTR protein levels in serum declined in treated animals, as shown in FIG. 14. These experiments demonstrate that the Cas9-RT polypeptide can be expressed in vivo, and can edit the TTR locus, resulting in a decrease in TTR protein levels in serum.

### Example 11. Gene Editing at the TTR Locus in an In Vivo Cynomolgus Macaque Model

[0969] This Example demonstrates successful delivery of an mRNA and guide using Cas9-mediated gene editing using the protospacer sequence ACACAAAUACCAGUCCAGCG (SEQ ID NO: 20630) that targets the TTR locus using a gene modifying polypeptide and RNA in a cynomolgus model.

[0970] RNAs were prepared as follows. An mRNA encoding a gene modifying polypeptide having the sequence shown in Table 11A below was produced by in vitro transcription and the purified mRNA was dissolved in 1 mM sodium citrate, pH 6, to a final concentration of RNA of 1-2 mg/mL. Similarly, a guide RNA having a sequence shown in Table 11A below was produced by chemical synthesis and dissolved in water or aqueous buffer, to a final concentration of RNA of 1-2 mg/mL.

TABLE 11A
Sequences of Example 11

| Name | Nucleic acid sequence | SEQ ID NO |
|---|---|---|
| Cas9-RT gene | AUGCCUGCGGCUAAGCGGGUAAAAU | 20631 |
| modifying | UGGAUGGUGGGGACAAGAAGUACAG | |
| polypeptide | CAUCGGCCUGGACAUCGGCACCAAC | |
| | UCUGUGGGCUGGGCCGUGAUCACCG | |
| | ACGAGUACAAGGUGCCCAGCAAGAA | |
| | AUUCAAGGUGCUGGGCAACACCGAC | |
| | CGGCACAGCAUCAAGAAGAACCUGA | |
| | UCGGAGCCCUGCUGUUCGACAGCGG | |
| | CGAAACAGCCGAGGCCACCCGGCUG | |
| | AAGAGAACCGCCAGAAGAAGAUACA | |
| | CCAGACGGAAGAACCGGAUCUGCUA | |
| | UCUGCAAGAGAUCUUCAGCAACGAG | |
| | AUGGCCAAGGUGGACGACAGCUUCU | |
| | UCCACAGACUGGAAGAGUCCUUCCU | |
| | GGUGGAAGAGGAUAAGAAGCACGAG | |
| | CGGCACCCCAUCUUCGGCAACAUCG | |
| | UGGACGAGGUGGCCUACCACGAGAA | |
| | GUACCCCACCAUCUACCACCUGAGA | |
| | AAGAAACUGGUGGACAGCACCGACA | |
| | AGGCCGACCUGCGGCUGAUCUAUCU | |
| | GGCCCUGGCCCACAUGAUCAAGUUC | |
| | CGGGGCCACUUCCUGAUCGAGGGCG | |
| | ACCUGAACCCCGACAACAGCGACGU | |
| | GGACAAGCUGUUCAUCCAGCUGGUG | |
| | CAGACCUACAACCAGCUGUUCGAGG | |
| | AAAACCCCAUCAACGCCAGCGGCGU | |
| | GGACGCCAAGGCCAUCCUGUCUGCC | |
| | AGACUGAGCAAGAGCAGACGGCUGG | |
| | AAAAUCUGAUCGCCCAGCUGCCCGG | |
| | CGAGAAGAAGAAUGGCCUGUUCGGA | |
| | AACCUGAUUGCCCUGAGCCUGGGCC | |
| | UGACCCCCAACUUCAAGAGCAACUU | |
| | CGACCUGGCCGAGGAUGCCAAACUG | |
| | CAGCUGAGCAAGGACACCUACGACG | |
| | ACGACCUGGACAACCUGCUGGCCCA | |
| | GAUCGGCGACCAGUACGCCGACCUG | |
| | UUUCUGGCCGCCAAGAACCUGUCCG | |
| | ACGCCAUCCUGCUGAGCGACAUCCU | |
| | GAGAGUGAACACCGAGAUCACCAAG | |
| | GCCCCCCUGAGCGCCUCUAUGAUCA | |
| | AGAGAUACGACGAGCACCACCAGGA | |
| | CCUGACCCUGCUGAAAGCUCUCGUG | |
| | CGGCAGCAGCUGCCUGAGAAGUACA | |
| | AAGAGAUUUUCUUCGACCAGAGCAA | |
| | GAACGGCUACGCCGGCUACAUUGAC | |
| | GGCGGAGCCAGCCAGGAAGAGUUCU | |
| | ACAAGUUCAUCAAGCCCAUCCUGGA | |
| | AAAGAUGGACGGCACCGAGGAACUG | |
| | CUCGUGAAGCUGAACAGAGAGGACC | |
| | UGCUGCGGAAGCAGCGGACCUUCGA | |
| | CAACGGCAGCAUCCCCCACCAGAUC | |
| | CACCUGGGAGAGCUGCACGCCAUUC | |
| | UGCGGCGGCAGGAAGAUUUUUACCC | |
| | AUUCCUGAAGGACAACCGGGAAAAG | |
| | AUCGAGAAGAUCCUGACCUUCCGCA | |
| | UCCCCUACUACGUGGGCCCUCUGGC | |
| | CAGGGGAAACAGCAGAUUCGCCUGG | |
| | AUGACCAGAAAGAGCGAGGAAACCA | |
| | UCACCCCCUGGAACUUCGAGGAAGU | |
| | GGUGGACAAGGGCGCUUCCGCCCAG | |
| | AGCUUCAUCGAGCGGAUGACCAACU | |
| | UCGAUAAGAACCUGCCCAACGAGAA | |
| | GGUGCUGCCCAAGCACAGCCUGCUG | |
| | UACGAGUACUUCACCGUGUAUAACG | |
| | AGCUGACCAAAGUGAAAUACGUGAC | |
| | CGAGGGAAUGAGAAAGCCCGCCUUC | |
| | CUGAGCGGCGAGCAGAAAAAGGCCA | |
| | UCGUGGACCUGCUGUUCAAGACCAA | |
| | CCGGAAAGUGACCGUGAAGCAGCUG | |
| | AAAGAGGACUACUUCAAGAAAAUCG | |
| | AGUGCUUCGACUCCGUGGAAAUCUC | |
| | CGGCGUGGAAGAUCGGUUCAACGCC | |
| | UCCCUGGGCACAUACCACGAUCUGC | |
| | UGAAAAUUAUCAAGGACAAGGACUU | |
| | CCUGGACAAUGAGGAAAACGAGGAC | |
| | AUUCUGGAAGAUAUCGUGCUGACCC | |
| | UGACACUGUUUGAGGACAGAGAGAU | |
| | GAUCGAGGAACGGCUGAAAACCUAU | |
| | GCCCACCUGUUCGACGACAAAGUGA | |
| | UGAAGCAGCUGAAGCGGCGGAGAUA | |
| | CACCGGCUGGGGCAGGCUGAGCCGG | |
| | AAGCUGAUCAACGGCAUCCGGGACA | |
| | AGCAGUCCGGCAAGACAAUCCUGGA | |
| | UUUCCUGAAGUCCGACGGCUUCGCC | |
| | AACAGAAACUUCAUGCAGCUGAUCC | |
| | ACGACGACAGCCUGACCUUUAAAGA | |
| | GGACAUCCAGAAAGCCCAGGUGUCC | |
| | GGCCAGGGCGAUAGCCUGCACGAGC | |
| | ACAUUGCCAAUCUGGCCGGCAGCCC | |
| | CGCCAUUAAGAAGGGCAUCCUGCAG | |
| | ACAGUGAAGGUGGUGGACGAGCUCG | |
| | UGAAAGUGAUGGGCCGGCACAAGCC | |
| | CGAGAACAUCGUGAUCGAAAUGGCC | |
| | AGAGAGAACCAGACCACCCAGAAGG | |
| | GACAGAAGAACAGCCGCGAGAGAAU | |
| | GAAGCGGAUCGAAGAGGGCAUCAAA | |
| | GAGCUGGGCAGCCAGAUCCUGAAAG | |
| | AACACCCCGUGGAAAACACCCAGCU | |
| | GCAGAACGAGAAGCUGUACCUGUAC | |
| | UACCUGCAGAAUGGGCGGGAUAUGU | |
| | ACGUGGACCAGGAACUGGACAUCAA | |
| | CCGGCUGUCCGACUACGAUGUGGAC | |
| | CAUAUCGUGCCUCAGAGCUUUCUGA | |
| | AGGACGACUCCAUCGACAACAAGGU | |
| | GCUGACCAGAAGCGACAAGAAUCGG | |
| | GGCAAGAGCGACAACGUGCCCUCCG | |
| | AAGAGGUCGUGAAGAAGAUGAAGAA | |
| | CUACUGGCGGCAGCUGCUGAACGCC | |
| | AAGCUGAUUACCCAGAGAAAGUUCG | |
| | ACAAUCUGACCAAGGCCGAGAGAGG | |
| | CGGCCUGAGCGAACUGGAUAAGGCC | |
| | GGCUUCAUCAAGAGACAGCUGGUGG | |
| | AAACCCGGCAGAUCACAAAGCACGU | |
| | GGCACAGAUCCUGGACUCCCGGAUG | |
| | AACACUAAGUACGACGAGAAUGACA | |
| | AGCUGAUCCGGGAAGUGAAAGUGAU | |
| | CACCCUGAAGUCCAAGCUGGUGUCC | |
| | GAUUUCCGGAAGGAUUUCCAGUUUU | |
| | ACAAAGUGCGCGAGAUCAACAACUA | |
| | CCACCACGCCCACGACGCCUACCUG | |
| | AACGCCGUCGUGGGAACCGCCCUGA | |
| | UCAAAAAGUACCCUAAGCUGGAAAG | |
| | CGAGUUCGUGUACGGCGACUACAAG | |
| | GUGUACGACGUGCGGAAGAUGAUCG | |
| | CCAAGAGCGAGCAGGAAAUCGGCAA | |
| | GGCUACCGCCAAGUACUUCUUCUAC | |
| | AGCAACAUCAUGAACUUUUUCAAGA | |
| | CCGAGAUUACCCUGGCCAACGGCGA | |
| | GAUCCGGAAGCGGCCUCUGAUCGAG | |
| | ACAAACGGCGAAACCGGGGAGAUCG | |
| | UGUGGGAUAAGGGCCGGGAUUUUGC | |
| | CACCGUGCGGAAAGUGCUGAGCAUG | |
| | CCCCAAGUGAAUAUCGUGAAAAAGA | |
| | CCGAGGUGCAGACAGGCGGCUUCAG | |
| | CAAAGAGUCUAUCCUGCCCAAGAGG | |
| | AACAGCGAUAAGCUGAUCGCCAGAA | |
| | AGAAGGACUGGGACCCUAAGAAGUA | |
| | CGGCGGCUUCGACAGCCCCACCGUG | |
| | GCCUAUUCUGUGCUGGUGGUGGCCA | |
| | AAGUGGAAAAGGGCAAGUCCAAGAA | |
| | ACUGAAGAGUGUGAAAGAGCUGCUG | |
| | GGGAUCACCAUCAUGGAAAGAAGCA | |
| | GCUUCGAGAAGAAUCCCAUCGACUU | |
| | UCUGGAAGCCAAGGGCUACAAAGAA | |
| | GUGAAAAAGGACCUGAUCAUCAAGC | |
| | UGCCUAAGUACUCCCUGUUCGAGCU | |
| | GGAAAACGGCCGGAAGAGAAUGCUG | |
| | GCCUCUGCCGGCGAACUGCAGAAGG | |
| | GAAACGAACUGGCCCUGCCCUCCAA | |
| | AUAUGUGAACUUCCUGUACCUGGCC | |
| | AGCCACUAUGAGAAGCUGAAGGGCU | |
| | CCCCCGAGGAUAAUGAGCAGAAACA | |
| | GCUGUUUGUGGAACAGCACAAGCAC | |
| | UACCUGGACGAGAUCAUCGAGCAGA | |
| | UCAGCGAGUUCUCCAAGAGAGUGAU | |
| | CCUGGCCGACGCUAAUCUGGACAAA | |
| | GUGCUGUCCGCCUACAACAAGCACC | |
| | GGGAUAAGCCCAUCAGAGAGCAGGC | |
| | CGAGAAUAUCAUCCACCUGUUUACC | |
| | CUGACCAAUCUGGGAGCCCCUGCCG | |
| | CCUUCAAGUACUUUGACACCACCAU | |
| | CGACCGGAAGAGGUACACCAGCACC | |
| | AAAGAGGUGCUGGACGCCACCCUGA | |
| | UCCACCAGAGCAUCACCGGCCUGUA | |
| | CGAGACACGGAUCGACCUGUCUCAG | |
| | CUGGGAGGUGACUCUGGAGGAUCUA | |
| | GCGGAGGAUCCUCUGGCAGCGAGAC | |
| | ACCAGGAACAAGCGAGUCAGCAACA | |
| | CCAGAGAGCAGUGGCGGCAGCAGCG | |
| | GCGGCAGCAGCACCCUAAAUAUAGA | |
| | AGAUGAGUAUCGGCUACAUGAGACC | |
| | UCAAAAGAGCCAGAUGUUUCUCUAG | |
| | GGUCCACAUGGCUGUCUGAUUUUCC | |
| | UCAGGCCUGGGCGGAAACCGGGGGC | |
| | AUGGGACUGGCAGUUCGCCAAGCUC | |
| | CUCUGAUCAUACCUCUGAAAGCAAC | |
| | CUCUACCCCCGUGUCCAUAAAACAA | |
| | UACCCCAUGUCACAAGAAGCCAGAC | |
| | UGGGGAUCAAGCCCCACAUACAGAG | |
| | ACUGUUGGACCAGGGAAUACUGGUA | |
| | CCCUGCCAGUCCCCCUGGAACACGC | |
| | CCCUGCUACCCGUUAAGAAACCAGG | |
| | GACUAAUGAUUAUAGGCCUGUCCAG | |
| | GAUCUGAGAGAAGUCAACAAGCGGG | |
| | UGGAGGACAUCCACCCCACCGUGCC | |
| | CAACCCUUACAACCUCUUGAGCGGG | |
| | CUCCCACCGUCCCACCAGUGGUACA | |
| | CUGUGCUUGAUUUAAAGGAUGCCUU | |
| | UUUCUGCCUGAGACUCCACCCCACC | |
| | AGUCAGCCUCUCUUCGCCUUUGAGU | |
| | GGAGAGAUCCAGAGAUGGGAAUCUC | |
| | AGGACAAUUGACCUGGACCAGACUC | |
| | CCACAGGGUUUCAAAAACAGUCCCA | |
| | CCCUGUUUAAUGAGGCACUGCACAG | |
| | AGACCUAGCAGACUUCCGGAUCCAG | |
| | CACCCAGACUUGAUCCUGCUACAGU | |
| | ACGUGGAUGACUUACUGCUGGCCGC | |
| | CACUUCUGAGCUAGACUGCCAACAA | |
| | GGUACUCGGGCCCUGUUACAAACCC | |
| | UAGGGAACCUCGGGUAUCGGGCCUC | |
| | GGCCAAGAAAGCCCAAAUUUGCCAG | |
| | AAACAGGUCAAGUAUCUGGGGUAUC | |
| | UUCUAAAAGAGGGUCAGAGAUGGCU | |
| | GACUGAGGCCAGAAAAGAGACUGUG | |
| | AUGGGGCAGCCUACUCCGAAGACCC | |
| | CUCGACAACUAAGGGAGUUCCUAGG | |
| | GAAGGCAGGCUUCUGUCGCCUCUUC | |
| | AUCCCUGGGUUUGCAGAAAUGGCAG | |
| | CCCCCCUGUACCCUCUCACCAAACC | |
| | GGGGACUCUGUUUAAUUGGGGCCCA | |
| | GACCAACAAAAGGCCUAUCAAGAAA | |
| | UCAAGCAAGCCCUUCUAACUGCCCC | |
| | AGCCCUGGGGUUGCCAGAUUUGACU | |
| | AAGCCCUUUGAACUCUUUGUCGACG | |
| | AGAAGCAGGGCUACGCCAAAGGUGU | |
| | CCUAACGCAAAAACUGGGACCUUGG | |
| | CGUCGGCCGGUGGCCUACCUGUCCA | |
| | AAAAGCUAGACCCAGUAGCAGCUGG | |
| | GUGGCCCCCUUGCCUACGGAUGGUA | |
| | GCAGCCAUUGCCGUACUGACAAAGG | |
| | AUGCAGGCAAGCUAACCAUGGGACA | |
| | GCCACUAGUCAUUCUGGCCCCCCAU | |
| | GCAGUAGAGGCACUAGUCAAACAAC | |
| | CCCCCGACCGCUGGCUUUCCAACGC | |
| | CCGGAUGACUCACUAUCAGGCCUUG | |
| | CUUUUGGACACGGACCGGGUCCAGU | |
| | UCGGACCGGUGGUAGCCCUGAACCC | |
| | GGCUACGCUGCUCCCACUGCCUGAG | |
| | GAAGGGCUGCAACACAACUGCCUUG | |
| | AUAUCCUGGCCGAAGCCCACGGAAC | |
| | CCGACCCGACCUAACGGACCAGCCG | |
| | CUCCCAGACGCCGACCACACCUGGU | |
| | ACACGGAUGGAAGCAGUCUCUUACA | |
| | AGAGGGACAGCGUAAGGCGGGAGCU | |
| | GCGGUGACCACCGAGACCGAGGUAA | |
| | UCUGGGCUAAAGCCCUGCCAGCCGG | |
| | GACAUCCGCUCAGCGGGCUGAACUG | |
| | AUAGCACUCACCCAGGCCCUAAAGA | |
| | UGGCAGAAGGUAAGAAGCUAAAUGU | |
| | UUAUACUGAUAGCCGUUAUGCUUUU | |
| | GCUACUGCCCAUAUCCAUGGAGAAA | |
| | UAUACAGAAGGCGUGGGUGGCUCAC | |
| | AUCAGAAGGCAAAGAGAUCAAAAAU | |
| | AAAGACGAGAUCUUGGCCCUACUAA | |
| | AAGCCCUCUUUCUGCCCAAAAGACU | |
| | UAGCAUAAUCCAUUGUCCAGGACAU | |
| | CAAAAGGGACACAGCGCCGAGGCUA | |
| | GAGGCAACCGGAUGGCUGACCAAGC | |
| | GGCCCGAAAGGCAGCCAUCACAGAG | |
| | ACUCCAGACACCUCUACCCUCCUCA | |
| | UAGAAAAUUCAUCACCCUCUGGCGG | |
| | CUCAAAAAGAACCGCCGACGGCAGC | |
| | GAAUUCGAGAAAAGGACGGCGGAUG | |
| | GUAGCGAAUUCGAGAGCCCUAAAAA | |
| | GAAGGCCAAGGUAGAGUAA | |
| guide RNA | mA*mC*mA*CAAAUACCAGUCCAGC | 20632 |
| | GGUUUUAGAmGmCmUmAmGmAmAmA | |
| | mUmAmGmCAAGUUAAAAUAAGGCUA | |
| | GUCCGUUAUCAmAmCmUmUmGmAmA | |
| | mAmAmAmGmUmGmGmCmAmCmCmGm | |
| | AmGmUmCmGmGmUmGmCmU*mU*mU | |
| | *mU | |
| | m = 2′OMethyl, | |
| | * = phosphorothioate linkage | |

[0971] Lipid nanoparticle (LNP) components (ionizable lipid, helper lipid, sterol, PEG) were dissolved in 100% ethanol with the lipid component molar ratios of 47:8:43.5:1.5, respectively. RNA (guide and mRNA) was combined in a 1:1 weight ratio and diluted to a concentration of 0.05-0.2 mg/mL in sodium acetate buffer, pH 5. RNA was formulated into distinct LNPs with a lipid amine to total RNA phosphate (N:P) molar ratio of 4.0. The LNPs were formed by microfluidic or turbulent mixing of the lipid and RNA solutions. A 3:1 ratio of aqueous to organic solvent was maintained during mixing using differential flow rates. After mixing, the LNPs were diluted, collected and buffer exchanged into 50 mM Tris, 9% sucrose buffer using tangential flow filtration. Formulations were concentrated to 1.0 mg/mL or higher then filtered through 0.2 μm sterile filter. The final LNP were stored at −80° C. until further use. The LNP formulations were delivered intravenously by infusion over the course of 1 hour at 2 mg/kg where the volume of the infusion was 5 ml/kg. Cynomolgus macaques from mainland Asia were given dexamethasone 2 mg/kg bolus via intramuscular injection 1.5-2 h prior to intravenous infusion using a syringe pump. Animals were monitored after infusion and the expression of the Cas9-RT was measured by laparoscopic biopsies taken from the liver 8-12 h, 24 h, and 48 h after infusion. Animals were euthanized 14 days after infusion and liver was harvested by dividing the organ up into 8 different segments to which the activity of gene editing of the TTR locus was assessed. Expression of the Cas9-RT gene editing polypeptide in liver was quantified by capillary electrophoresis western blot using the ProteinSimple Jess system (bio-techne) where Cas9 was detected by a mouse monoclonal antibody (7A9-3A3, Cell Signaling Technology).

[0972] Relative expression of the Cas9-RT gene editing polypeptide was measured by an area under curve analysis, as shown in FIG. 15. Editing of the TTR locus was quantified by amplicon-sequencing of the TTR locus near the binding site of the protospacer. Editing of the TTR locus was observed, as shown in FIG. 16. These experiments demonstrate that the Cas9-RT polypeptide can be expressed in vivo in a non-human primate model and can edit the TTR locus.

### Example 12: Quantifying Activity of a Gene Modifying Polypeptide and Template RNA for Editing the Endogenous B-Globin Locus Achieved in CD34+Primary Human Hematopoietic Stem Cells (HSCs)

[0973] This example demonstrates the use of a gene modifying system containing an exemplary gene modifying polypeptide and a template RNA, to convert the glutamic acid codon (GAG) at amino acid position 7 in the endogenous B-globin locus in primary human HSCs to alanine (GCG), thereby demonstrating targeting the sequence position associated with sickle cell disease (SCD) and editing of the sequence to encode a non-pathogenic amino acid at position 7. The “C” residue installed by this process is referred to as the “Makassar” variant and is a non-pathogenic sequence variant that occurs in the human population. This conversion comprises the change of one base pair (i.e., replacement of the DNA base adenine at nucleotide positions 20 to the base cytosine in SEQ ID NO: 20633).

(SEQ ID NO: 20633)
ATGGTGCATCTGACTCCTGAGGAGAAGTCTGCCGTTACTGCCCTG
TGGGGCAAGGTGAACGTGGATGAAGTTGGTGGTGAGGCCCTGGGC
AGGCTGCTGGTGGTCTACCCTTGGACCCAGAGGTTCTTTGAGTCC
TTTGGGGATCTGTCCACTCCTGATGCTGTTATGGGCAACCCTAAG
GTGAAGGCTCATGGCAAGAAAGTGCTCGGTGCCTTTAGTGATGGC
CTGGCTCACCTGGACAACCTCAAGGGCACCTTTGCCACACTGAGT
GAGCTGCACTGTGACAAGCTGCACGTGGATCCTGAGAACTTCAGG
CTCCTGGGCAACGTGCTGGTCTGTGTGCTGGCCCATCACTTTGGC
AAAGAATTCACCCCACCAGTGCAGGCTGCCTATCAGAAAGTGGTG
GCTGGTGTGGCTAATGCCCTGGCCCACAAGTATCACTAAGCTCGC
TTTCTTGCTGTCCAATTTCTATTAAAGGTTCCTTTGTTCCCTAA

[0974] In this example, the template RNAs contained:
[0975] (1) a gRNA spacer;
[0976] (2) a gRNA scaffold;
[0977] (3) a heterologous object sequence; and
[0978] (4) a primer binding site (PBS) sequence.

[0979] The exemplary template RNAs comprised the following sequences from 5′ to 3′ wherein the first 3, and last 3 bases have 2′-O-methyl phosphorothioate chemical modifications as indicated. In the sequences below, m=2′-O-methyl ribonucleotide, r=ribose, and *=phosphorothioate bond.

tg34
(SEQ ID NO: 20634)
mG*mU*mA*rArCrGrGrCrArGrArCrUrUrCrUrCrCrUrCrG
rUrUrUrUrArGrArGrCrUrArGrArArArUrArGrCrArArGr
UrUrArArArArUrArArGrGrCrUrArGrUrCrCrGrUrUrArU
rCrArArCrUrUrGrArArArArArGrUrGrGrCrArCrCrGrAr
GrUrCrGrGrUrGrCrArCrCrUrGrArCrUrCrCrUrGrCrGrG
rArGrArArGrUrC*mU*mG*mC
tg35
(SEQ ID NO: 20635)
mG*mU*mA*rArCrGrGrCrArGrArCrUrUrCrUrCrCrUrCrG
rUrUrUrUrArGrArGrCrUrArGrArArArUrArGrCrArArGr
UrUrArArArArUrArArGrGrCrUrArGrUrCrCrGrUrUrArU
rCrArArCrUrUrGrArArArArArGrUrGrGrCrArCrCrGrAr
GrUrCrGrGrUrGrCrArCrCrUrGrArCrUrCrCrUrGrCrGrG
rArGrArArGrUrCrU*mG*mC*mC
tg36
(SEQ ID NO: 20636)
mG*mU*mA*rArCrGrGrCrArGrArCrUrUrCrUrCrCrUrCrG
rUrUrUrUrArGrArGrCrUrArGrArArArUrArGrCrArArGr
UrUrArArArArUrArArGrGrCrUrArGrUrCrCrGrUrUrArU
rCrArArCrUrUrGrArArArArArGrUrGrGrCrArCrCrGrAr
GrUrCrGrGrUrGrCrGrCrArCrCrUrGrArCrUrCrCrUrGrC
rGrGrArGrArArGrUrC*mU*mG*mC

Unmodified versions of these sequences are shown in Table BB below. In some embodiments, the sequences used in this table can be used without chemical modifications.

TABLE BB
tg34, tg35, and tg36 without
nucleotide modifications.

| | | SEQ |
|---|---|---|
| Name | Sequence | ID NO |
| tg34 | GUAACGGCAGACUUCUCCUCGUUUU | 21767 |
| | AGAGCUAGAAAUAGCAAGUUAAAAU | |
| | AAGGCUAGUCCGUUAUCAACUUGAA | |
| | AAAGUGGCACCGAGUCGGUGCACCU | |
| | GACUCCUGCGGAGAAGUCUGC | |
| tg35 | GUAACGGCAGACUUCUCCUCGUUUU | 21768 |
| | AGAGCUAGAAAUAGCAAGUUAAAAU | |
| | AAGGCUAGUCCGUUAUCAACUUGAA | |
| | AAAGUGGCACCGAGUCGGUGCACCU | |
| | GACUCCUGCGGAGAAGUCUGCC | |
| tg36 | GUAACGGCAGACUUCUCCUCGUUUU | 21769 |
| | AGAGCUAGAAAUAGCAAGUUAAAAU | |
| | AAGGCUAGUCCGUUAUCAACUUGAA | |
| | AAAGUGGCACCGAGUCGGUGCGCAC | |
| | CUGACUCCUGCGGAGAAGUCUGC | |

The gene modifying polypeptide tested comprised the sequence set out in Example 8 labeled RNAV209.

[0980] The gene modifying system comprising the gene modifying polypeptides and the template RNA described above was transfected into human HSCs. The gene modifying polypeptide and the template RNA were delivered by nucleofection in RNA format. Specifically, 2000 ng of mRNA encoding the gene modifying polypeptide were combined with 2000 ng template RNA. The RNA mixture was added to 200,000 primary human HSCs in a total of 20 μL of Lonza P3 buffer and HSC were nucleofected in 16-well nucleofection cassettes using program DZ-100. After nucleofection, cells were incubated at room temperature for 10 minutes and were transferred to 24-well plates containing 500 μL of StemSpan-XF+SCF at 100 ng/mL, Flt3-L at 100 ng/ml, and TPO at 100 ng/mL in each well and cultured at 37° C., 5% CO₂ for 3 days prior to cell lysis and genomic DNA extraction. To analyze gene editing activity, primers flanking the target insertion site locus were used to amplify across the locus. Amplicons were analyzed via short read sequencing using an Illumina MiSeq. Replacement of the DNA base adenine at nucleotide position 20 to the base cytosine downstream of the transcriptional start site within the endogenous B-globin locus indicated successful editing.

[0981] As shown in FIG. 17, average perfect rewrite levels, corresponding to replacement of the C nucleotide with an A at the SCD codon, of 1.3%-1.8% were detected in primary human HSCs when the primary human HSCs were treated with the exemplary template gRNAs and mRNA encoding the exemplary gene modifying polypeptide. These results demonstrate the use of a gene modifying system to edit a non-pathogenic sequence into a clinically relevant codon in the endogenous B-globin locus in primary human HSCs. The results further demonstrate that several exemplary template RNAs can be used to achieve the desired editing.

### Example 13: Comparing the Activity of Different Second Strand-Targeting gRNA in Combination with a Gene Modifying Polypeptide and Template RNAs for Editing the Endogenous B-Globin Locus in CD34+Primary Human Hematopoietic Stem Cells (HSCs)

[0982] This example demonstrates the use of exemplary gene modifying systems containing a gene modifying polypeptide, a template RNA, and one of several different exemplary second strand-targeting gRNAs to convert the glutamic acid codon (GAG) at amino acid position 7 in the endogenous B-globin locus in primary human HSCs to alanine (GCA or GCG), thereby demonstrating targeting the sequence position associated with sickle cell disease (SCD) and editing of the sequence to encode a non-pathogenic amino acid at position 7. This conversion comprises a change of two base pairs for exemplary template RNAs comprising the exemplary HBB5 spacer (i.e., replacement of the DNA bases adenine and guanine at nucleotide positions 20 and 21 to the bases cytosine and adenine, respectively) and the change of one base pair for exemplary template RNAs comprising the exemplary HBB8 spacer (i.e., replacement of the DNA base adenine at nucleotide positions 20 to the base cytosine).

[0983] In this example, the template RNA contained:
[0984] (1) a gRNA spacer;
[0985] (2) a gRNA scaffold;
[0986] (3) a heterologous object sequence; and
[0987] (4) a primer binding site (PBS) sequence.

[0988] The template RNAs comprised the nucleic acid sequence set out in Example 5 labeled FYF tgRNA14 for the exemplary HBB5 template RNA or tg34 for the exemplary HBB8 template RNA, respectively.

[0989] The gene modifying polypeptide comprised the amino acid sequence set out in Example 8 labeled RNAV209.

[0990] The second strand-targeting gRNA sequences, designed to produce a second nick, comprised the sequences listed in Table X¹.

TABLE X1
Exemplary Second Strand-Targeting gRNAs

| | | SEQ |
|---|---|---|
| Name | RNA sequence | ID NO |
| HBB5_ | mC*mU*mU*rGrCrCrCrCrArCrArGrGrGrCrA | 20817 |
| 216rv | rGrUrArArGrUrUrUrUrArGrAmGmCmUmAmGm | |
| | AmAmAmUmAmGmCrArArGrUrUrArArArArUrA | |
| | rArGrGrCrUrArGrUrCrCrGrUrUrArUrCrAm | |
| | AmCmUmUmGmAmAmAmAmAmGmUmGmGmCmAmCmC | |
| | mGmAmGmUmCmGmGmUmGmCmU*mU*mU*mU | |
| HBB5_ | mU*mG*mC*rArGrGrArGrUrCrArGrGrUrGrC | 20818 |
| 24rv | rArCrCrArGrUrUrUrUrArGrAmGmCmUmAmGm | |
| | AmAmAmUmAmGmCrArArGrUrUrArArArArUrA | |
| | rArGrGrCrUrArGrUrCrCrGrUrUrArUrCrAm | |
| | AmCmUmUmGmAmAmAmAmAmGmUmGmGmCmAmCmC | |
| | mGmAmGmUmCmGmGmUmGmCmU*mU*mU*mU | |
| HBB5_ | mC*mA*mG*rArCrUrUrCrUrCrUrGrCrArGrG | 20819 |
| 34rv | rArGrUrCrGrUrUrUrUrArGrAmGmCmUmAmGm | |
| | AmAmAmUmAmGmCrArArGrUrUrArArArArUrA | |
| | rArGrGrCrUrArGrUrCrCrGrUrUrArUrCrAm | |
| | AmCmUmUmGmAmAmAmAmAmGmUmGmGmCmAmCmC | |
| | mGmAmGmUmCmGmGmUmGmCmU*mU*mU*mU | |
| HBB5_ | mC*mA*mG*rArCrUrUrCrUrCrUrGrCrCrGrG | 20820 |
| 34rv_ | rArGrUrCrGrUrUrUrUrArGrAmGmCmUmAmGm | |
| h | AmAmAmUmAmGmCrArArGrUrUrArArArArUrA | |
| s1 | rArGrGrCrUrArGrUrCrCrGrUrUrArUrCrAm | |
| | AmCmUmUmGmAmAmAmAmAmGmUmGmGmCmAmCmC | |
| | mGmAmGmUmCmGmGmUmGmCmU*mU*mU*mU | |
| HBB5_ | mG*mU*mA*rArCrGrGrCrArGrArCrUrUrCrU | 20821 |
| 41rv | rCrUrGrCrGrUrUrUrUrArGrAmGmCmUmAmGm | |
| | AmAmAmUmAmGmCrArArGrUrUrArArArArUrA | |
| | rArGrGrCrUrArGrUrCrCrGrUrUrArUrCrAm | |
| | AmCmUmUmGmAmAmAmAmAmGmUmGmGmCmAmCmC | |
| | mGmAmGmUmCmGmGmUmGmCmU*mU*mU*mU | |
| HBB5_ | mA*mA*mG*rCrArArArUrGrUrArArGrCrArA | 20822 |
| 122rv | rUrArGrArGrUrUrUrUrArGrAmGmCmUmAmGm | |
| | AmAmAmUmAmGmCrArArGrUrUrArArArArUrA | |
| | rArGrGrCrUrArGrUrCrCrGrUrUrArUrCrAm | |
| | AmCmUmUmGmAmAmAmAmAmGmUmGmGmCmAmCmC | |
| | mGmAmGmUmCmGmGmUmGmCmU*mU*mU*mU | |
| HBB5_ | mC*mU*mG*rArCrUrUrUrUrArUrGrCrCrCrA | 20823 |
| 92rv | rGrCrCrCrGrUrUrUrUrArGrAmGmCmUmAmGm | |
| | AmAmAmUmAmGmCrArArGrUrUrArArArArUrA | |
| | rArGrGrCrUrArGrUrCrCrGrUrUrArUrCrAm | |
| | AmCmUmUmGmAmAmAmAmAmGmUmGmGmCmAmCmC | |
| | mGmAmGmUmCmGmGmUmGmCmU*mU*mU*mU | |
| HBB5_ | mC*mC*mU*rUrGrArUrArCrCrArArCrCrUrG | 20824 |
| g27 | rCrCrCrArGrUrUrUrUrArGrAmGmCmUmAmGm | |
| | AmAmAmUmAmGmCrArArGrUrUrArArArArUrA | |
| | rArGrGrCrUrArGrUrCrCrGrUrUrArUrCrAm | |
| | AmCmUmUmGmAmAmAmAmAmGmUmGmGmCmAmCmC | |
| | mGmAmGmUmCmGmGmUmGmCmU*mU*mU*mU | |
| HBB5_ | mC*mA*mC*rGrUrUrCrArCrCrUrUrGrCrCrC | 20825 |
| g37 | rCrArCrArGrUrUrUrUrArGrAmGmCmUmAmGm | |
| | AmAmAmUmAmGmCrArArGrUrUrArArArArUrA | |
| | rArGrGrCrUrArGrUrCrCrGrUrUrArUrCrAm | |
| | AmCmUmUmGmAmAmAmAmAmGmUmGmGmCmAmCmC | |
| | mGmAmGmUmCmGmGmUmGmCmU*mU*mU*mU | |
| HBB5_ | mC*mC*mA*rCrGrUrUrCrArCrCrUrUrGrCrC | 20826 |
| g38 | rCrCrArCrGrUrUrUrUrArGrArGrCrUrArGr | |
| | ArArArUrArGrCrArArGrUrUrArArArArUrA | |
| | rArGrGrCrUrArGrUrCrCrGrUrUrArUrCrAr | |
| | ArCrUrUrGrArArArArArGrUrGrGrCrArCrC | |
| | rGrArGrUrCrGrGrUrGrCmU*mU*mU*rU | |
| HBB5_ | mA*mC*mC*rUrUrGrArUrArCrCrArArCrCrU | 20827 |
| g39 | rGrCrCrCrGrUrUrUrUrArGrArGrCrUrArGr | |
| | ArArArUrArGrCrArArGrUrUrArArArArUrA | |
| | rArGrGrCrUrArGrUrCrCrGrUrUrArUrCrAr | |
| | ArCrUrUrGrArArArArArGrUrGrGrCrArCrC | |
| | rGrArGrUrCrGrGrUrGrCmU*mU*mU*rU | |
| HBB5_ | mU*mC*mC*rArCrArUrGrCrCrCrArGrUrUrU | 20828 |
| g40 | rCrUrArUrGrUrUrUrUrArGrArGrCrUrArGr | |
| | ArArArUrArGrCrArArGrUrUrArArArArUrA | |
| | rArGrGrCrUrArGrUrCrCrGrUrUrArUrCrAr | |
| | ArCrUrUrGrArArArArArGrUrGrGrCrArCrC | |
| | rGrArGrUrCrGrGrUrGrCmU*mU*mU*rU | |
| HBB8_ | mC*mA*mG*rGrGrCrUrGrGrGrCrArUrArArA | 20829 |
| gRNA1 | rArGrUrCrGrUrUrUrUrArGrAmGmCmUmAmGm | |
| | AmAmAmUmAmGmCrArArGrUrUrArArArArUrA | |
| | rArGrGrCrUrArGrUrCrCrGrUrUrArUrCrAm | |
| | AmCmUmUmGmAmAmAmAmAmGmUmGmGmCmAmCmC | |
| | mGmAmGmUmCmGmGmUmGmCmU*mU*mU*mU | |
| HBB8_ | mA*mG*mG*rGrCrUrGrGrGrCrArUrArArArA | 20830 |
| gRNA2 | rGrUrCrArGrUrUrUrUrArGrAmGmCmUmAmGm | |
| | AmAmAmUmAmGmCrArArGrUrUrArArArArUrA | |
| | rArGrGrCrUrArGrUrCrCrGrUrUrArUrCrAm | |
| | AmCmUmUmGmAmAmAmAmAmGmUmGmGmCmAmCmC | |
| | mGmAmGmUmCmGmGmUmGmCmU*mU*mU*mU | |
| HBB8_ | mG*mC*mA*rArCrCrUrCrArArArCrArGrArC | 20831 |
| gRNA3 | rArCrCrArGrUrUrUrUrArGrAmGmCmUmAmGm | |
| | AmAmAmUmAmGmCrArArGrUrUrArArArArUrA | |
| | rArGrGrCrUrArGrUrCrCrGrUrUrArUrCrAm | |
| | AmCmUmUmGmAmAmAmAmAmGmUmGmGmCmAmCmC | |
| | mGmAmGmUmCmGmGmUmGmCmU*mU*mU*mU | |
| HBB8_ | mG*mG*mA*rGrGrGrCrArGrGrArGrCrCrArG | 20832 |
| gRNA4 | rGrGrCrUrGrUrUrUrUrArGrAmGmCmUmAmGm | |
| | AmAmAmUmAmGmCrArArGrUrUrArArArArUrA | |
| | rArGrGrCrUrArGrUrCrCrGrUrUrArUrCrAm | |
| | AmCmUmUmGmAmAmAmAmAmGmUmGmGmCmAmCmC | |
| | mGmAmGmUmCmGmGmUmGmCmU*mU*mU*mU | |
| HBB8_ | mG*mU*mC*rUrGrCrCrGrUrUrArCrUrGrCrC | 20833 |
| 231fw | rCrUrGrUrGrUrUrUrUrArGrAmGmCmUmAmGm | |
| | AmAmAmUmAmGmCrArArGrUrUrArArArArUrA | |
| | rArGrGrCrUrArGrUrCrCrGrUrUrArUrCrAm | |
| | AmCmUmUmGmAmAmAmAmAmGmUmGmGmCmAmCmC | |
| | mGmAmGmUmCmGmGmUmGmCmU*mU*mU*mU | |
| HBB8_ | mC*mG*mU*rUrArCrUrGrCrCrCrUrGrUrGrG | 20834 |
| 237fw | rGrGrCrArGrUrUrUrUrArGrAmGmCmUmAmGm | |
| | AmAmAmUmAmGmCrArArGrUrUrArArArArUrA | |
| | rArGrGrCrUrArGrUrCrCrGrUrUrArUrCrAm | |
| | AmCmUmUmGmAmAmAmAmAmGmUmGmGmCmAmCmC | |
| | mGmAmGmUmCmGmGmUmGmCmU*mU*mU*mU | |
| HBB8_ | mC*mC*mU*rGrUrGrGrGrGrCrArArGrGrUrG | 20835 |
| 246fw | rArArCrGrGrUrUrUrUrArGrAmGmCmUmAmGm | |
| | AmAmAmUmAmGmCrArArGrUrUrArArArArUrA | |
| | rArGrGrCrUrArGrUrCrCrGrUrUrArUrCrAm | |
| | AmCmUmUmGmAmAmAmAmAmGmUmGmGmCmAmCmC | |
| | mGmAmGmUmCmGmGmUmGmCmU*mU*mU*mU | |
| HBB8_ | mA*mA*mG*rGrUrGrArArCrGrUrGrGrArUrG | 20836 |
| 256fw | rArArGrUrGrUrUrUrUrArGrAmGmCmUmAmGm | |
| | AmAmAmUmAmGmCrArArGrUrUrArArArArUrA | |
| | rArGrGrCrUrArGrUrCrCrGrUrUrArUrCrAm | |
| | AmCmUmUmGmAmAmAmAmAmGmUmGmGmCmAmCmC | |
| | mGmAmGmUmCmGmGmUmGmCmU*mU*mU*mU | |
| HBB8_ | mU*mG*mA*rArGrUrUrGrGrUrGrGrUrGrArG | 20837 |
| 270fw | rGrCrCrCrGrUrUrUrUrArGrAmGmCmUmAmGm | |
| | AmAmAmUmAmGmCrArArGrUrUrArArArArUrA | |
| | rArGrGrCrUrArGrUrCrCrGrUrUrArUrCrAm | |
| | AmCmUmUmGmAmAmAmAmAmGmUmGmGmCmAmCmC | |
| | mGmAmGmUmCmGmGmUmGmCmU*mU*mU*mU | |
| HBB8_ | mU*mG*mG*rUrGrArGrGrCrCrCrUrGrGrGrC | 20838 |
| 279fw | rArGrGrUrGrUrUrUrUrArGrAmGmCmUmAmGm | |
| | AmAmAmUmAmGmCrArArGrUrUrArArArArUrA | |
| | rArGrGrCrUrArGrUrCrCrGrUrUrArUrCrAm | |
| | AmCmUmUmGmAmAmAmAmAmGmUmGmGmCmAmCmC | |
| | mGmAmGmUmCmGmGmUmGmCmU*mU*mU*mU | |
| HBB8_ | mU*mG*mG*rUrArUrCrArArGrGrUrUrArCrA | 20839 |
| 299fw | rArGrArCrGrUrUrUrUrArGrAmGmCmUmAmGm | |
| | AmAmAmUmAmGmCrArArGrUrUrArArArArUrA | |
| | rArGrGrCrUrArGrUrCrCrGrUrUrArUrCrAm | |
| | AmCmUmUmGmAmAmAmAmAmGmUmGmGmCmAmCmC | |
| | mGmAmGmUmCmGmGmUmGmCmU*mU*mU*mU | |
| HBB8_ | mA*mA*mG*rGrUrUrArCrArArGrArCrArGrG | 20840 |
| 306fw | rUrUrUrArGrUrUrUrUrArGrAmGmCmUmAmGm | |
| | AmAmAmUmAmGmCrArArGrUrUrArArArArUrA | |
| | rArGrGrCrUrArGrUrCrCrGrUrUrArUrCrAm | |
| | AmCmUmUmGmAmAmAmAmAmGmUmGmGmCmAmCmC | |
| | mGmAmGmUmCmGmGmUmGmCmU*mU*mU*mU | |

[0991] Table XIA shows the sequences of XI without modifications. In some embodiments, the sequences used in this table can be used without chemical modifications.

TABLE X1A
Table X1 Sequences without Modifications

| | | SEQ |
|---|---|---|
| | | ID |
| Name | RNA sequence | NO |
| HBB5_216 | CUUGCCCCACAGGGCAGUAAGUUUUAGAGCUAGAAAUAGCAAGUUAAAAUAAGGCUAGUCCGUUAUCA | 21770 |
| rv | ACUUGAAAAAGUGGCACCGAGUCGGUGCUUUU | |
| HBB5_24r | UGCAGGAGUCAGGUGCACCAGUUUUAGAGCUAGAAAUAGCAAGUUAAAAUAAGGCUAGUCCGUUAUCA | 21771 |
| v | ACUUGAAAAAGUGGCACCGAGUCGGUGCUUUU | |
| HBB5_34r | CAGACUUCUCUGCAGGAGUCGUUUUAGAGCUAGAAAUAGCAAGUUAAAAUAAGGCUAGUCCGUUAUCA | 21772 |
| v | ACUUGAAAAAGUGGCACCGAGUCGGUGCUUUU | |
| HBB5_34r | CAGACUUCUCUGCCGGAGUCGUUUUAGAGCUAGAAAUAGCAAGUUAAAAUAAGGCUAGUCCGUUAUCA | 21773 |
| v_hs1 | ACUUGAAAAAGUGGCACCGAGUCGGUGCUUUU | |
| HBB5_41r | GUAACGGCAGACUUCUCUGCGUUUUAGAGCUAGAAAUAGCAAGUUAAAAUAAGGCUAGUCCGUUAUCA | 21774 |
| v | ACUUGAAAAAGUGGCACCGAGUCGGUGCUUUU | |
| HBB5_122 | AAGCAAAUGUAAGCAAUAGAGUUUUAGAGCUAGAAAUAGCAAGUUAAAAUAAGGCUAGUCCGUUAUCA | 21775 |
| rv | ACUUGAAAAAGUGGCACCGAGUCGGUGCUUUU | |
| HBB5_92r | CUGACUUUUAUGCCCAGCCCGUUUUAGAGCUAGAAAUAGCAAGUUAAAAUAAGGCUAGUCCGUUAUCA | 21776 |
| v | ACUUGAAAAAGUGGCACCGAGUCGGUGCUUUU | |
| HBB5_g27 | CCUUGAUACCAACCUGCCCAGUUUUAGAGCUAGAAAUAGCAAGUUAAAAUAAGGCUAGUCCGUUAUCA | 21777 |
| | ACUUGAAAAAGUGGCACCGAGUCGGUGCUUUU | |
| HBB5_g37 | CACGUUCACCUUGCCCCACAGUUUUAGAGCUAGAAAUAGCAAGUUAAAAUAAGGCUAGUCCGUUAUCA | 21778 |
| | ACUUGAAAAAGUGGCACCGAGUCGGUGCUUUU | |
| HBB5_g38 | CCACGUUCACCUUGCCCCACGUUUUAGAGCUAGAAAUAGCAAGUUAAAAUAAGGCUAGUCCGUUAUCA | 21779 |
| | ACUUGAAAAAGUGGCACCGAGUCGGUGCUUUU | |
| HBB5_g39 | ACCUUGAUACCAACCUGCCCGUUUUAGAGCUAGAAAUAGCAAGUUAAAAUAAGGCUAGUCCGUUAUCA | 21780 |
| | ACUUGAAAAAGUGGCACCGAGUCGGUGCUUUU | |
| HBB5_g40 | UCCACAUGCCCAGUUUCUAUGUUUUAGAGCUAGAAAUAGCAAGUUAAAAUAAGGCUAGUCCGUUAUCA | 21781 |
| | ACUUGAAAAAGUGGCACCGAGUCGGUGCUUUU | |
| HBB8_gR | CAGGGCUGGGCAUAAAAGUCGUUUUAGAGCUAGAAAUAGCAAGUUAAAAUAAGGCUAGUCCGUUAUCA | 21782 |
| NA1 | ACUUGAAAAAGUGGCACCGAGUCGGUGCUUUU | |
| HBB8_gR | AGGGCUGGGCAUAAAAGUCAGUUUUAGAGCUAGAAAUAGCAAGUUAAAAUAAGGCUAGUCCGUUAUCA | 21783 |
| NA2 | ACUUGAAAAAGUGGCACCGAGUCGGUGCUUUU | |
| HBB8_gR | GCAACCUCAAACAGACACCAGUUUUAGAGCUAGAAAUAGCAAGUUAAAAUAAGGCUAGUCCGUUAUCA | 21784 |
| NA3 | ACUUGAAAAAGUGGCACCGAGUCGGUGCUUUU | |
| HBB8_gR | GGAGGGCAGGAGCCAGGGCUGUUUUAGAGCUAGAAAUAGCAAGUUAAAAUAAGGCUAGUCCGUUAUCA | 21785 |
| NA4 | ACUUGAAAAAGUGGCACCGAGUCGGUGCUUUU | |
| HBB8_231 | GUCUGCCGUUACUGCCCUGUGUUUUAGAGCUAGAAAUAGCAAGUUAAAAUAAGGCUAGUCCGUUAUCA | 21786 |
| fw | ACUUGAAAAAGUGGCACCGAGUCGGUGCUUUU | |
| HBB8_237 | CGUUACUGCCCUGUGGGGCAGUUUUAGAGCUAGAAAUAGCAAGUUAAAAUAAGGCUAGUCCGUUAUCA | 21787 |
| fw | ACUUGAAAAAGUGGCACCGAGUCGGUGCUUUU | |
| HBB8_246 | CCUGUGGGGCAAGGUGAACGGUUUUAGAGCUAGAAAUAGCAAGUUAAAAUAAGGCUAGUCCGUUAUCA | 21788 |
| fw | ACUUGAAAAAGUGGCACCGAGUCGGUGCUUUU | |
| HBB8_256 | AAGGUGAACGUGGAUGAAGUGUUUUAGAGCUAGAAAUAGCAAGUUAAAAUAAGGCUAGUCCGUUAUC | 21789 |
| fw | AACUUGAAAAAGUGGCACCGAGUCGGUGCUUUU | |
| HBB8_270 | UGAAGUUGGUGGUGAGGCCCGUUUUAGAGCUAGAAAUAGCAAGUUAAAAUAAGGCUAGUCCGUUAUCA | 21790 |
| fw | ACUUGAAAAAGUGGCACCGAGUCGGUGCUUUU | |
| HBB8_279 | UGGUGAGGCCCUGGGCAGGUGUUUUAGAGCUAGAAAUAGCAAGUUAAAAUAAGGCUAGUCCGUUAUCA | 21791 |
| fw | ACUUGAAAAAGUGGCACCGAGUCGGUGCUUUU | |
| HBB8_299 | UGGUAUCAAGGUUACAAGACGUUUUAGAGCUAGAAAUAGCAAGUUAAAAUAAGGCUAGUCCGUUAUCA | 21792 |
| fw | ACUUGAAAAAGUGGCACCGAGUCGGUGCUUUU | |
| HBB8_306 | AAGGUUACAAGACAGGUUUAGUUUUAGAGCUAGAAAUAGCAAGUUAAAAUAAGGCUAGUCCGUUAUCA | 21793 |
| fw | ACUUGAAAAAGUGGCACCGAGUCGGUGCUUUU | |

[0992] The gene modifying system comprising the gene modifying polypeptides and the template RNA described above was transfected into human HSCs. The gene modifying polypeptide and the template RNA were delivered by nucleofection in RNA format. Specifically, 3000 ng of mRNA encoding the gene modifying polypeptide were combined with 2000 ng template RNA and 2000 ng (for systems comprising HBB5 template RNA) or 3000 ng (for systems comprising HBB8 template RNA) of second strand-targeting gRNA. The RNA mixture was added to 200,000 primary human HSCs in a total of 20 μL of Lonza P3 buffer and HSC were nucleofected in 16-well nucleofection cassettes using program DZ-100. After nucleofection, cells incubated at room temperature for 10 minutes and were transferred to 24-well plates containing 500 μL of StemSpan-XF+SCF at 100 ng/ml, Flt3-L at 100 ng/mL, and TPO at 100 ng/mL in each well and cultured at 37° C., 5% CO₂ for 3 days prior to cell lysis and genomic DNA extraction. To analyze gene editing activity, primers flanking the target insertion site locus were used to amplify across the locus. Amplicons were analyzed via short read sequencing using an Illumina MiSeq. Replacement of the DNA bases adenine and guanine at nucleotide positions 20 and 21 to the bases cytosine and adenine (HBB5 template RNA) or replacement of the DNA bases adenine at nucleotide positions 20 to the base cytosine (HBB8 template RNA) downstream of the transcriptional start site within the endogenous B-globin locus indicated successful editing.

[0993] As shown in FIG. 18A, average perfect rewrite levels, corresponding to replacement of adenine and guanine at nucleotide positions 20 and 21 to the bases cytosine and adenine (respectively) at the SCD codon, of 4.5%-21.3% were detected in primary human HSCs when the HSCs were treated with exemplary gene modifying systems comprising exemplary HBB5 template RNA tg14 and various second strand-targeting gRNAs. As shown in FIG. 18B, average perfect rewrite levels, corresponding to replacement of adenine at nucleotide positions 20 to the base cytosine at the SCD codon, of 2.9%-24.6% were detected in primary human HSCs when the HSCs were treated with exemplary gene modifying systems comprising exemplary HBB8 template gRNA tg34 and various second strand-targeting gRNAs.

[0994] These results demonstrate that use of a second strand-targeting gRNA increases the editing activity of exemplary gene modifying systems targeting a clinically relevant codon in the endogenous B-globin locus in primary human HSCs. The results further demonstrate that adjusting the positioning of a second strand-targeting gRNA (e.g., relative to the sequence targeted by a spacer of an exemplary template RNA) increases the enhancement to editing activity, e.g., to more than 9-fold higher than perfect rewriting in the absence of second strand-targeting gRNA.

### Example 14: Characterizing Configurations of Template RNAs Including Silent Substitutions for Editing the Endogenous B-Globin Locus in CD34+Primary Human Hematopoietic Stem Cells (HSCs)

[0995] This example demonstrates the use of a gene modifying system containing an exemplary gene modifying polypeptide and various template RNAs comprising different silent substitutions, to convert the glutamic acid codon at amino acid position 7 in the endogenous B-globin locus in primary human HSCs to alanine, thereby demonstrating targeting the sequence position associated with sickle cell disease (SCD) and editing of the sequence to encode a non-pathogenic sequence into position 7. This conversion comprises a change of two base pairs for exemplary HBB5 template RNAs (i.e., replacement of the DNA bases adenine and guanine at nucleotide positions 20 and 21 to the bases cytosine and adenine) plus the inclusion of additional relevant silent substitutions (which alter the nucleic acid sequence of the DNA but not the protein sequence through the usage of different synonymous codons).

[0996] In this example, the template RNA contained:
[0997] (1) a gRNA spacer;
[0998] (2) a gRNA scaffold;
[0999] (3) a heterologous object sequence; and
[1000] (4) a primer binding site (PBS) sequence.

[1001] More specifically, the exemplary template RNAs comprised the following sequences from 5′ to 3′, wherein the first 3, and last 3 bases have 2′-O-methyl phosphorothioate chemical modifications. In the sequences below, m=2′-O-methyl ribonucleotide, r=ribose, and *=phosphorothioate bond. Different combinations of substitutions and RT/PBS length were included (Table X²).

TABLE X2
Exemplary Silent Substitution-Containing Template RNAs.

| | | SEQ | | | |
|---|---|---|---|---|---|
| | | ID | RT | PBS | Substi- |
| Name | Sequence | NO | length | length | tution |
| tg14_ | mC*mA*mU*rGrGrUrGrCrArCrC | 20841 | 14 | 10 | none |
| h | rUrGrArCrUrCrCrUrGrGrUrUr | | | | |
| | UrUrArGrAmGmCmUmAmGmAmAmA | | | | |
| | mUmAmGmCrArArGrUrUrArArAr | | | | |
| | ArUrArArGrGrCrUrArGrUrCrC | | | | |
| | rGrUrUrArUrCrAmAmCmUmUmGm | | | | |
| | AmAmAmAmAmGmUmGmGmCmAmCmC | | | | |
| | mGmAmGmUmCmGmGmUmGmCrArGr | | | | |
| | ArCrUrUrCrUrCrUrGrCrArGrG | | | | |
| | rArGrUrCrArG*mG*mU*mG | | | | |
| tg14_ | mC*mA*mU*rGrGrUrGrCrArCrC | 20842 | 14 | 10 | sub |
| hs1 | rUrGrArCrUrCrCrUrGrGrUrUr | | | | 1 |
| | UrUrArGrAmGmCmUmAmGmAmAmA | | | | |
| | mUmAmGmCrArArGrUrUrArArAr | | | | |
| | ArUrArArGrGrCrUrArGrUrCrC | | | | |
| | rGrUrUrArUrCrAmAmCmUmUmGm | | | | |
| | AmAmAmAmAmGmUmGmGmCmAmCmC | | | | |
| | mGmAmGmUmCmGmGmUmGmCrArGr | | | | |
| | ArCrUrUrCrUrCrUrGrCrCrGrG | | | | |
| | rArGrUrCrArG*mG*mU*mG | | | | |
| tg14_ | mC*mA*mU*rGrGrUrGrCrArCrC | 20843 | 14 | 10 | sub |
| hs2 | rUrGrArCrUrCrCrUrGrGrUrUr | | | | 2 |
| | UrUrArGrAmGmCmUmAmGmAmAmA | | | | |
| | mUmAmGmCrArArGrUrUrArArAr | | | | |
| | ArUrArArGrGrCrUrArGrUrCrC | | | | |
| | rGrUrUrArUrCrAmAmCmUmUmGm | | | | |
| | AmAmAmAmAmGmUmGmGmCmAmCmC | | | | |
| | mGmAmGmUmCmGmGmUmGmCrArGr | | | | |
| | ArCrUrUrCrUrCrUrGrCrGrGrG | | | | |
| | rArGrUrCrArG*mG*mU*mG | | | | |
| tg14_ | mC*mA*mU*rGrGrUrGrCrArCrC | 20844 | 14 | 10 | sub |
| hs3 | rUrGrArCrUrCrCrUrGrGrUrUr | | | | 3 |
| | UrUrArGrAmGmCmUmAmGmAmAmA | | | | |
| | mUmAmGmCrArArGrUrUrArArAr | | | | |
| | ArUrArArGrGrCrUrArGrUrCrC | | | | |
| | rGrUrUrArUrCrAmAmCmUmUmGm | | | | |
| | AmAmAmAmAmGmUmGmGmCmAmCmC | | | | |
| | mGmAmGmUmCmGmGmUmGmCrArGr | | | | |
| | ArCrUrUrCrUrCrUrGrCrUrGrG | | | | |
| | rArGrUrCrArG*mG*mU*mG | | | | |
| tg14_ | mC*mA*mU*rGrGrUrGrCrArCrC | 20845 | 14 | 10 | sub |
| hs4 | rUrGrArCrUrCrCrUrGrGrUrUr | | | | 4 |
| | UrUrArGrAmGmCmUmAmGmAmAmA | | | | |
| | mUmAmGmCrArArGrUrUrArArAr | | | | |
| | ArUrArArGrGrCrUrArGrUrCrC | | | | |
| | rGrUrUrArUrCrAmAmCmUmUmGm | | | | |
| | AmAmAmAmAmGmUmGmGmCmAmCmC | | | | |
| | mGmAmGmUmCmGmGmUmGmCrArGr | | | | |
| | ArUrUrUrCrUrCrUrGrCrArGrG | | | | |
| | rArGrUrCrArG*mG*mU*mG | | | | |
| tg14_ | mC*mA*mU*rGrGrUrGrCrArCrC | 20846 | 14 | 10 | sub |
| hs5 | rUrGrArCrUrCrCrUrGrGrUrUr | | | | 5 |
| | UrUrArGrAmGmCmUmAmGmAmAmA | | | | |
| | mUmAmGmCrArArGrUrUrArArAr | | | | |
| | ArUrArArGrGrCrUrArGrUrCrC | | | | |
| | rGrUrUrArUrCrAmAmCmUmUmGm | | | | |
| | AmAmAmAmAmGmUmGmGmCmAmCmC | | | | |
| | mGmAmGmUmCmGmGmUmGmCrArGr | | | | |
| | ArCrUrUrUrUrCrUrGrCrArGrG | | | | |
| | rArGrUrCrArG*mG*mU*mG | | | | |
| tg14_ | mC*mA*mU*rGrGrUrGrCrArCrC | 20847 | 14 | 10 | sub |
| hs6 | rUrGrArCrUrCrCrUrGrGrUrUr | | | | 6 |
| | UrUrArGrAmGmCmUmAmGmAmAmA | | | | |
| | mUmAmGmCrArArGrUrUrArArAr | | | | |
| | ArUrArArGrGrCrUrArGrUrCrC | | | | |
| | rGrUrUrArUrCrAmAmCmUmUmGm | | | | |
| | AmAmAmAmAmGmUmGmGmCmAmCmC | | | | |
| | mGmAmGmUmCmGmGmUmGmCrArGr | | | | |
| | ArCrUrUrUrUrCrUrGrCrCrGrG | | | | |
| | rArGrUrCrArG*mG*mU*mG | | | | |
| tg14_ | mC*mA*mU*rGrGrUrGrCrArCrC | 20848 | 14 | 10 | sub |
| hs7 | rUrGrArCrUrCrCrUrGrGrUrUr | | | | 7 |
| | UrUrArGrAmGmCmUmAmGmAmAmA | | | | |
| | mUmAmGmCrArArGrUrUrArArAr | | | | |
| | ArUrArArGrGrCrUrArGrUrCrC | | | | |
| | rGrUrUrArUrCrAmAmCmUmUmGm | | | | |
| | AmAmAmAmAmGmUmGmGmCmAmCmC | | | | |
| | mGmAmGmUmCmGmGmUmGmCrArGr | | | | |
| | ArCrUrUrUrUrCrUrGrCrGrGrG | | | | |
| | rArGrUrCrArG*mG*mU*mG | | | | |
| tg14_ | mC*mA*mU*rGrGrUrGrCrArCrC | 20849 | 14 | 10 | sub |
| hs8 | rUrGrArCrUrCrCrUrGrGrUrUr | | | | 8 |
| | UrUrArGrAmGmCmUmAmGmAmAmA | | | | |
| | mUmAmGmCrArArGrUrUrArArAr | | | | |
| | ArUrArArGrGrCrUrArGrUrCrC | | | | |
| | rGrUrUrArUrCrAmAmCmUmUmGm | | | | |
| | AmAmAmAmAmGmUmGmGmCmAmCmC | | | | |
| | mGmAmGmUmCmGmGmUmGmCrArGr | | | | |
| | ArCrUrUrUrUrCrUrGrCrUrGrG | | | | |
| | rArGrUrCrArG*mG*mU*mG | | | | |
| tg14_ | mC*mA*mU*rGrGrUrGrCrArCrC | 20850 | 14 | 10 | sub |
| hs9 | rUrGrArCrUrCrCrUrGrGrUrUr | | | | 9 |
| | UrUrArGrAmGmCmUmAmGmAmAmA | | | | |
| | mUmAmGmCrArArGrUrUrArArAr | | | | |
| | ArUrArArGrGrCrUrArGrUrCrC | | | | |
| | rGrUrUrArUrCrAmAmCmUmUmGm | | | | |
| | AmAmAmAmAmGmUmGmGmCmAmCmC | | | | |
| | mGmAmGmUmCmGmGmUmGmCrArGr | | | | |
| | ArUrUrUrCrUrCrUrGrCrCrGrG | | | | |
| | rArGrUrCrArG*mG*mU*mG | | | | |
| tg14_ | mC*mA*mU*rGrGrUrGrCrArCrC | 20851 | 14 | 10 | sub |
| hs10 | rUrGrArCrUrCrCrUrGrGrUrUr | | | | 10 |
| | UrUrArGrAmGmCmUmAmGmAmAmA | | | | |
| | mUmAmGmCrArArGrUrUrArArAr | | | | |
| | ArUrArArGrGrCrUrArGrUrCrC | | | | |
| | rGrUrUrArUrCrAmAmCmUmUmGm | | | | |
| | AmAmAmAmAmGmUmGmGmCmAmCmC | | | | |
| | mGmAmGmUmCmGmGmUmGmCrArGr | | | | |
| | ArUrUrUrCrUrCrUrGrCrGrGrG | | | | |
| | rArGrUrCrArG*mG*mU*mG | | | | |
| tg14_ | mC*mA*mU*rGrGrUrGrCrArCrC | 20852 | 14 | 10 | sub |
| hs11 | rUrGrArCrUrCrCrUrGrGrUrUr | | | | 11 |
| | UrUrArGrAmGmCmUmAmGmAmAmA | | | | |
| | mUmAmGmCrArArGrUrUrArArAr | | | | |
| | ArUrArArGrGrCrUrArGrUrCrC | | | | |
| | rGrUrUrArUrCrAmAmCmUmUmGm | | | | |
| | AmAmAmAmAmGmUmGmGmCmAmCmC | | | | |
| | mGmAmGmUmCmGmGmUmGmCrArGr | | | | |
| | ArUrUrUrCrUrCrUrGrCrUrGrG | | | | |
| | rArGrUrCrArG*mG*mU*mG | | | | |
| tg14_ | mC*mA*mU*rGrGrUrGrCrArCrC | 20853 | 14 | 10 | sub |
| hs12 | rUrGrArCrUrCrCrUrGrGrUrUr | | | | 12 |
| | UrUrArGrAmGmCmUmAmGmAmAmA | | | | |
| | mUmAmGmCrArArGrUrUrArArAr | | | | |
| | ArUrArArGrGrCrUrArGrUrCrC | | | | |
| | rGrUrUrArUrCrAmAmCmUmUmGm | | | | |
| | AmAmAmAmAmGmUmGmGmCmAmCmC | | | | |
| | mGmAmGmUmCmGmGmUmGmCrArGr | | | | |
| | ArUrUrUrUrUrCrUrGrCrArGrG | | | | |
| | rArGrUrCrArG*mG*mU*mG | | | | |
| tg14_ | mC*mA*mU*rGrGrUrGrCrArCrC | 20854 | 14 | 10 | sub |
| hs13 | rUrGrArCrUrCrCrUrGrGrUrUr | | | | 13 |
| | UrUrArGrAmGmCmUmAmGmAmAmA | | | | |
| | mUmAmGmCrArArGrUrUrArArAr | | | | |
| | ArUrArArGrGrCrUrArGrUrCrC | | | | |
| | rGrUrUrArUrCrAmAmCmUmUmGm | | | | |
| | AmAmAmAmAmGmUmGmGmCmAmCmC | | | | |
| | mGmAmGmUmCmGmGmUmGmCrArGr | | | | |
| | ArUrUrUrUrUrCrUrGrCrCrGrG | | | | |
| | rArGrUrCrArG*mG*mU*mG | | | | |
| tg14_ | mC*mA*mU*rGrGrUrGrCrArCrC | 20855 | 14 | 10 | sub |
| hs14 | rUrGrArCrUrCrCrUrGrGrUrUr | | | | 14 |
| | UrUrArGrAmGmCmUmAmGmAmAmA | | | | |
| | mUmAmGmCrArArGrUrUrArArAr | | | | |
| | ArUrArArGrGrCrUrArGrUrCrC | | | | |
| | rGrUrUrArUrCrAmAmCmUmUmGm | | | | |
| | AmAmAmAmAmGmUmGmGmCmAmCmC | | | | |
| | mGmAmGmUmCmGmGmUmGmCrArGr | | | | |
| | ArUrUrUrUrUrCrUrGrCrGrGrG | | | | |
| | rArGrUrCrArG*mG*mU*mG | | | | |
| tg14_ | mC*mA*mU*rGrGrUrGrCrArCrC | 20856 | 14 | 10 | sub |
| hs15 | rUrGrArCrUrCrCrUrGrGrUrUr | | | | 15 |
| | UrUrArGrAmGmCmUmAmGmAmAmA | | | | |
| | mUmAmGmCrArArGrUrUrArArAr | | | | |
| | ArUrArArGrGrCrUrArGrUrCrC | | | | |
| | rGrUrUrArUrCrAmAmCmUmUmGm | | | | |
| | AmAmAmAmAmGmUmGmGmCmAmCmC | | | | |
| | mGmAmGmUmCmGmGmUmGmCrArGr | | | | |
| | ArUrUrUrUrUrCrUrGrCrUrGrG | | | | |
| | rArGrUrCrArG*mG*mU*mG | | | | |
| tg19_ | mC*mA*mU*rGrGrUrGrCrArCrC | 20857 | 17 | 11 | non |
| h | rUrGrArCrUrCrCrUrGrGrUrUr | | | | e |
| | UrUrArGrAmGmCmUmAmGmAmAmA | | | | |
| | mUmAmGmCrArArGrUrUrArArAr | | | | |
| | ArUrArArGrGrCrUrArGrUrCrC | | | | |
| | rGrUrUrArUrCrAmAmCmUmUmGm | | | | |
| | AmAmAmAmAmGmUmGmGmCmAmCmC | | | | |
| | mGmAmGmUmCmGmGmUmGmCrGrGr | | | | |
| | CrArGrArCrUrUrCrUrCrUrGrC | | | | |
| | rArGrGrArGrUrCrArGrG*mU*m | | | | |
| | G*mC | | | | |
| tg19_ | mC*mA*mU*rGrGrUrGrCrArCrC | 20858 | 17 | 11 | sub |
| hs1 | rUrGrArCrUrCrCrUrGrGrUrUr | | | | 1 |
| | UrUrArGrAmGmCmUmAmGmAmAmA | | | | |
| | mUmAmGmCrArArGrUrUrArArAr | | | | |
| | ArUrArArGrGrCrUrArGrUrCrC | | | | |
| | rGrUrUrArUrCrAmAmCmUmUmGm | | | | |
| | AmAmAmAmAmGmUmGmGmCmAmCmC | | | | |
| | mGmAmGmUmCmGmGmUmGmCrGrGr | | | | |
| | CrArGrArCrUrUrCrUrCrUrGrC | | | | |
| | rCrGrGrArGrUrCrArGrG*mU*m | | | | |
| | G*mC | | | | |
| tg19_ | mC*mA*mU*rGrGrUrGrCrArCrC | 20859 | 17 | 11 | sub |
| hs2 | rUrGrArCrUrCrCrUrGrGrUrUr | | | | 2 |
| | UrUrArGrAmGmCmUmAmGmAmAmA | | | | |
| | mUmAmGmCrArArGrUrUrArArAr | | | | |
| | ArUrArArGrGrCrUrArGrUrCrC | | | | |
| | rGrUrUrArUrCrAmAmCmUmUmGm | | | | |
| | AmAmAmAmAmGmUmGmGmCmAmCmC | | | | |
| | mGmAmGmUmCmGmGmUmGmCrGrGr | | | | |
| | CrArGrArCrUrUrCrUrCrUrGrC | | | | |
| | rGrGrGrArGrUrCrArGrG*mU*m | | | | |
| | G*mC | | | | |
| tg19_ | mC*mA*mU*rGrGrUrGrCrArCrC | 20860 | 17 | 11 | sub |
| hs3 | rUrGrArCrUrCrCrUrGrGrUrUr | | | | 3 |
| | UrUrArGrAmGmCmUmAmGmAmAmA | | | | |
| | mUmAmGmCrArArGrUrUrArArAr | | | | |
| | ArUrArArGrGrCrUrArGrUrCrC | | | | |
| | rGrUrUrArUrCrAmAmCmUmUmGm | | | | |
| | AmAmAmAmAmGmUmGmGmCmAmCmC | | | | |
| | mGmAmGmUmCmGmGmUmGmCrGrGr | | | | |
| | CrArGrArCrUrUrCrUrCrUrGrC | | | | |
| | rUrGrGrArGrUrCrArGrG*mU*m | | | | |
| | G*mC | | | | |
| tg19_ | mC*mA*mU*rGrGrUrGrCrArCrC | 20861 | 17 | 11 | sub |
| hs4 | rUrGrArCrUrCrCrUrGrGrUrUr | | | | 4 |
| | UrUrArGrAmGmCmUmAmGmAmAmA | | | | |
| | mUmAmGmCrArArGrUrUrArArAr | | | | |
| | ArUrArArGrGrCrUrArGrUrCrC | | | | |
| | rGrUrUrArUrCrAmAmCmUmUmGm | | | | |
| | AmAmAmAmAmGmUmGmGmCmAmCmC | | | | |
| | mGmAmGmUmCmGmGmUmGmCrGrGr | | | | |
| | CrArGrArUrUrUrCrUrCrUrGrC | | | | |
| | rArGrGrArGrUrCrArGrG*mU*m | | | | |
| | G*mC | | | | |
| tg19_ | mC*mA*mU*rGrGrUrGrCrArCrC | 20862 | 17 | 11 | sub |
| hs5 | rUrGrArCrUrCrCrUrGrGrUrUr | | | | 5 |
| | UrUrArGrAmGmCmUmAmGmAmAmA | | | | |
| | mUmAmGmCrArArGrUrUrArArAr | | | | |
| | ArUrArArGrGrCrUrArGrUrCrC | | | | |
| | rGrUrUrArUrCrAmAmCmUmUmGm | | | | |
| | AmAmAmAmAmGmUmGmGmCmAmCmC | | | | |
| | mGmAmGmUmCmGmGmUmGmCrGrGr | | | | |
| | CrArGrArCrUrUrUrUrCrUrGrC | | | | |
| | rArGrGrArGrUrCrArGrG*mU*m | | | | |
| | G*mC | | | | |
| tg19_ | mC*mA*mU*rGrGrUrGrCrArCrC | 20863 | 17 | 11 | sub |
| hs6 | rUrGrArCrUrCrCrUrGrGrUrUr | | | | 6 |
| | UrUrArGrAmGmCmUmAmGmAmAmA | | | | |
| | mUmAmGmCrArArGrUrUrArArAr | | | | |
| | ArUrArArGrGrCrUrArGrUrCrC | | | | |
| | rGrUrUrArUrCrAmAmCmUmUmGm | | | | |
| | AmAmAmAmAmGmUmGmGmCmAmCmC | | | | |
| | mGmAmGmUmCmGmGmUmGmCrGrGr | | | | |
| | CrArGrArCrUrUrUrUrCrUrGrC | | | | |
| | rCrGrGrArGrUrCrArGrG*mU*m | | | | |
| | G*mC | | | | |
| tg19_ | mC*mA*mU*rGrGrUrGrCrArCrC | 20864 | 17 | 11 | sub |
| hs7 | rUrGrArCrUrCrCrUrGrGrUrUr | | | | 7 |
| | UrUrArGrAmGmCmUmAmGmAmAmA | | | | |
| | mUmAmGmCrArArGrUrUrArArAr | | | | |
| | ArUrArArGrGrCrUrArGrUrCrC | | | | |
| | rGrUrUrArUrCrAmAmCmUmUmGm | | | | |
| | AmAmAmAmAmGmUmGmGmCmAmCmC | | | | |
| | mGmAmGmUmCmGmGmUmGmCrGrGr | | | | |
| | CrArGrArCrUrUrUrUrCrUrGrC | | | | |
| | rGrGrGrArGrUrCrArGrG*mU*m | | | | |
| | G*mC | | | | |
| tg19_ | mC*mA*mU*rGrGrUrGrCrArCrC | 20865 | 17 | 11 | sub |
| hs8 | rUrGrArCrUrCrCrUrGrGrUrUr | | | | 8 |
| | UrUrArGrAmGmCmUmAmGmAmAmA | | | | |
| | mUmAmGmCrArArGrUrUrArArAr | | | | |
| | ArUrArArGrGrCrUrArGrUrCrC | | | | |
| | rGrUrUrArUrCrAmAmCmUmUmGm | | | | |
| | AmAmAmAmAmGmUmGmGmCmAmCmC | | | | |
| | mGmAmGmUmCmGmGmUmGmCrGrGr | | | | |
| | CrArGrArCrUrUrUrUrCrUrGrC | | | | |
| | rUrGrGrArGrUrCrArGrG*mU*m | | | | |
| | G*mC | | | | |
| tg19_ | mC*mA*mU*rGrGrUrGrCrArCrC | 20866 | 17 | 11 | sub |
| hs9 | rUrGrArCrUrCrCrUrGrGrUrUr | | | | 9 |
| | UrUrArGrAmGmCmUmAmGmAmAmA | | | | |
| | mUmAmGmCrArArGrUrUrArArAr | | | | |
| | ArUrArArGrGrCrUrArGrUrCrC | | | | |
| | rGrUrUrArUrCrAmAmCmUmUmGm | | | | |
| | AmAmAmAmAmGmUmGmGmCmAmCmC | | | | |
| | mGmAmGmUmCmGmGmUmGmCrGrGr | | | | |
| | CrArGrArUrUrUrCrUrCrUrGrC | | | | |
| | rCrGrGrArGrUrCrArGrG*mU*m | | | | |
| | G*mC | | | | |
| tg19_ | mC*mA*mU*rGrGrUrGrCrArCrC | 20867 | 17 | 11 | sub |
| hs10 | rUrGrArCrUrCrCrUrGrGrUrUr | | | | 10 |
| | UrUrArGrAmGmCmUmAmGmAmAmA | | | | |
| | mUmAmGmCrArArGrUrUrArArAr | | | | |
| | ArUrArArGrGrCrUrArGrUrCrC | | | | |
| | rGrUrUrArUrCrAmAmCmUmUmGm | | | | |
| | AmAmAmAmAmGmUmGmGmCmAmCmC | | | | |
| | mGmAmGmUmCmGmGmUmGmCrGrGr | | | | |
| | CrArGrArUrUrUrCrUrCrUrGrC | | | | |
| | rGrGrGrArGrUrCrArGrG*mU*m | | | | |
| | G*mC | | | | |
| tg19_ | mC*mA*mU*rGrGrUrGrCrArCrC | 20868 | 17 | 11 | sub |
| hs11 | rUrGrArCrUrCrCrUrGrGrUrUr | | | | 11 |
| | UrUrArGrAmGmCmUmAmGmAmAmA | | | | |
| | mUmAmGmCrArArGrUrUrArArAr | | | | |
| | ArUrArArGrGrCrUrArGrUrCrC | | | | |
| | rGrUrUrArUrCrAmAmCmUmUmGm | | | | |
| | AmAmAmAmAmGmUmGmGmCmAmCmC | | | | |
| | mGmAmGmUmCmGmGmUmGmCrGrGr | | | | |
| | CrArGrArUrUrUrCrUrCrUrGrC | | | | |
| | rUrGrGrArGrUrCrArGrG*mU*m | | | | |
| | G*mC | | | | |
| tg19_ | mC*mA*mU*rGrGrUrGrCrArCrC | 20869 | 17 | 11 | sub |
| hs12 | rUrGrArCrUrCrCrUrGrGrUrUr | | | | 12 |
| | UrUrArGrAmGmCmUmAmGmAmAmA | | | | |
| | mUmAmGmCrArArGrUrUrArArAr | | | | |
| | ArUrArArGrGrCrUrArGrUrCrC | | | | |
| | rGrUrUrArUrCrAmAmCmUmUmGm | | | | |
| | AmAmAmAmAmGmUmGmGmCmAmCmC | | | | |
| | mGmAmGmUmCmGmGmUmGmCrGrGr | | | | |
| | CrArGrArUrUrUrUrUrCrUrGrC | | | | |
| | rArGrGrArGrUrCrArGrG*mU*m | | | | |
| | G*mC | | | | |
| tg19_ | mC*mA*mU*rGrGrUrGrCrArCrC | 20870 | 17 | 11 | sub |
| hs13 | rUrGrArCrUrCrCrUrGrGrUrUr | | | | 13 |
| | UrUrArGrAmGmCmUmAmGmAmAmA | | | | |
| | mUmAmGmCrArArGrUrUrArArAr | | | | |
| | ArUrArArGrGrCrUrArGrUrCrC | | | | |
| | rGrUrUrArUrCrAmAmCmUmUmGm | | | | |
| | AmAmAmAmAmGmUmGmGmCmAmCmC | | | | |
| | mGmAmGmUmCmGmGmUmGmCrGrGr | | | | |
| | CrArGrArUrUrUrUrUrCrUrGrC | | | | |
| | rCrGrGrArGrUrCrArGrG*mU*m | | | | |
| | G*mC | | | | |
| tg19_ | mC*mA*mU*rGrGrUrGrCrArCrC | 20871 | 17 | 11 | sub |
| hs14 | rUrGrArCrUrCrCrUrGrGrUrUr | | | | 14 |
| | UrUrArGrAmGmCmUmAmGmAmAmA | | | | |
| | mUmAmGmCrArArGrUrUrArArAr | | | | |
| | ArUrArArGrGrCrUrArGrUrCrC | | | | |
| | rGrUrUrArUrCrAmAmCmUmUmGm | | | | |
| | AmAmAmAmAmGmUmGmGmCmAmCmC | | | | |
| | mGmAmGmUmCmGmGmUmGmCrGrGr | | | | |
| | CrArGrArUrUrUrUrUrCrUrGrC | | | | |
| | rGrGrGrArGrUrCrArGrG*mU*m | | | | |
| | G*mC | | | | |
| tg19_ | mC*mA*mU*rGrGrUrGrCrArCrC | 20872 | 17 | 11 | sub |
| hs15 | rUrGrArCrUrCrCrUrGrGrUrUr | | | | 15 |
| | UrUrArGrAmGmCmUmAmGmAmAmA | | | | |
| | mUmAmGmCrArArGrUrUrArArAr | | | | |
| | ArUrArArGrGrCrUrArGrUrCrC | | | | |
| | rGrUrUrArUrCrAmAmCmUmUmGm | | | | |
| | AmAmAmAmAmGmUmGmGmCmAmCmC | | | | |
| | mGmAmGmUmCmGmGmUmGmCrGrGr | | | | |
| | CrArGrArUrUrUrUrUrCrUrGrC | | | | |
| | rUrGrGrArGrUrCrArGrG*mU*m | | | | |
| | G*mC | | | | |
| tg41_ | mC*mA*mU*rGrGrUrGrCrArCrC | 20873 | 19 | 11 | non |
| h | rUrGrArCrUrCrCrUrGrGrUrUr | | | | e |
| | UrUrArGrAmGmCmUmAmGmAmAmA | | | | |
| | mUmAmGmCrArArGrUrUrArArAr | | | | |
| | ArUrArArGrGrCrUrArGrUrCrC | | | | |
| | rGrUrUrArUrCrAmAmCmUmUmGm | | | | |
| | AmAmAmAmAmGmUmGmGmCmAmCmC | | | | |
| | mGmAmGmUmCmGmGmUmGmCrArCr | | | | |
| | GrGrCrArGrArCrUrUrCrUrCrU | | | | |
| | rGrCrArGrGrArGrUrCrArGrG* | | | | |
| | mU*mG*mC | | | | |
| tg41_ | mC* mA*mU*rGrGrUrGrCrArCr | 20874 | 19 | 11 | sub |
| hs1 | CrUrGrArCrUrCrCrUrGrGrUrU | | | | 1 |
| | rUrUrArGrAmGmCmUmAmGmAmAm | | | | |
| | AmUmAmGmCrArArGrUrUrArArA | | | | |
| | rArUrArArGrGrCrUrArGrUrCr | | | | |
| | CrGrUrUrArUrCrAmAmCmUmUmG | | | | |
| | mAmAmAmAmAmGmUmGmGmCmAmCm | | | | |
| | CmGmAmGmUmCmGmGmUmGmCrArC | | | | |
| | rGrGrCrArGrArCrUrUrCrUrCr | | | | |
| | UrGrCrCrGrGrArGrUrCrArGrG | | | | |
| | *mU*mG*mC | | | | |
| tg41_ | mC*mA*mU*rGrGrUrGrCrArCrC | 20875 | 19 | 11 | sub |
| hs2 | rUrGrArCrUrCrCrUrGrGrUrUr | | | | 2 |
| | UrUrArGrAmGmCmUmAmGmAmAmA | | | | |
| | mUmAmGmCrArArGrUrUrArArAr | | | | |
| | ArUrArArGrGrCrUrArGrUrCrC | | | | |
| | rGrUrUrArUrCrAmAmCmUmUmGm | | | | |
| | AmAmAmAmAmGmUmGmGmCmAmCmC | | | | |
| | mGmAmGmUmCmGmGmUmGmCrArCr | | | | |
| | GrGrCrArGrArCrUrUrCrUrCrU | | | | |
| | rGrCrGrGrGrArGrUrCrArGrG* | | | | |
| | mU*mG*mC | | | | |
| tg41_ | mC*mA*mU*rGrGrUrGrCrArCrC | 20876 | 19 | 11 | sub |
| hs3 | rUrGrArCrUrCrCrUrGrGrUrUr | | | | 3 |
| | UrUrArGrAmGmCmUmAmGmAmAmA | | | | |
| | mUmAmGmCrArArGrUrUrArArAr | | | | |
| | ArUrArArGrGrCrUrArGrUrCrC | | | | |
| | rGrUrUrArUrCrAmAmCmUmUmGm | | | | |
| | AmAmAmAmAmGmUmGmGmCmAmCmC | | | | |
| | mGmAmGmUmCmGmGmUmGmCrArCr | | | | |
| | GrGrCrArGrArCrUrUrCrUrCrU | | | | |
| | rGrCrUrGrGrArGrUrCrArGrG* | | | | |
| | mU*mG*mC | | | | |
| tg41_ | mC*mA*mU*rGrGrUrGrCrArCrC | 20877 | 19 | 11 | sub |
| hs4 | rUrGrArCrUrCrCrUrGrGrUrUr | | | | 4 |
| | UrUrArGrAmGmCmUmAmGmAmAmA | | | | |
| | mUmAmGmCrArArGrUrUrArArAr | | | | |
| | ArUrArArGrGrCrUrArGrUrCrC | | | | |
| | rGrUrUrArUrCrAmAmCmUmUmGm | | | | |
| | AmAmAmAmAmGmUmGmGmCmAmCmC | | | | |
| | mGmAmGmUmCmGmGmUmGmCrArCr | | | | |
| | GrGrCrArGrArUrUrUrCrUrCrU | | | | |
| | rGrCrArGrGrArGrUrCrArGrG* | | | | |
| | mU*mG*mC | | | | |
| tg41_ | mC*mA*mU*rGrGrUrGrCrArCrC | 20878 | 19 | 11 | sub |
| hs5 | rUrGrArCrUrCrCrUrGrGrUrUr | | | | 5 |
| | UrUrArGrAmGmCmUmAmGmAmAmA | | | | |
| | mUmAmGmCrArArGrUrUrArArAr | | | | |
| | ArUrArArGrGrCrUrArGrUrCrC | | | | |
| | rGrUrUrArUrCrAmAmCmUmUmGm | | | | |
| | AmAmAmAmAmGmUmGmGmCmAmCmC | | | | |
| | mGmAmGmUmCmGmGmUmGmCrArCr | | | | |
| | GrGrCrArGrArCrUrUrUrUrCrU | | | | |
| | rGrCrArGrGrArGrUrCrArGrG* | | | | |
| | mU*mG*mC | | | | |
| tg41_ | mC*mA*mU*rGrGrUrGrCrArCrC | 20879 | 19 | 11 | sub |
| hs6 | rUrGrArCrUrCrCrUrGrGrUrUr | | | | 6 |
| | UrUrArGrAmGmCmUmAmGmAmAmA | | | | |
| | mUmAmGmCrArArGrUrUrArArAr | | | | |
| | ArUrArArGrGrCrUrArGrUrCrC | | | | |
| | rGrUrUrArUrCrAmAmCmUmUmGm | | | | |
| | AmAmAmAmAmGmUmGmGmCmAmCmC | | | | |
| | mGmAmGmUmCmGmGmUmGmCrArCr | | | | |
| | GrGrCrArGrArCrUrUrUrUrCrU | | | | |
| | rGrCrCrGrGrArGrUrCrArGrG* | | | | |
| | mU*mG*mC | | | | |
| tg41_ | mC*mA*mU*rGrGrUrGrCrArCrC | 20880 | 19 | 11 | sub |
| hs7 | rUrGrArCrUrCrCrUrGrGrUrUr | | | | 7 |
| | UrUrArGrAmGmCmUmAmGmAmAmA | | | | |
| | mUmAmGmCrArArGrUrUrArArAr | | | | |
| | ArUrArArGrGrCrUrArGrUrCrC | | | | |
| | rGrUrUrArUrCrAmAmCmUmUmGm | | | | |
| | AmAmAmAmAmGmUmGmGmCmAmCmC | | | | |
| | mGmAmGmUmCmGmGmUmGmCrArCr | | | | |
| | GrGrCrArGrArCrUrUrUrUrCrU | | | | |
| | rGrCrGrGrGrArGrUrCrArGrG* | | | | |
| | mU*mG*mC | | | | |
| tg41_ | mC*mA*mU*rGrGrUrGrCrArCrC | 20881 | 19 | 11 | sub |
| hs8 | rUrGrArCrUrCrCrUrGrGrUrUr | | | | 8 |
| | UrUrArGrAmGmCmUmAmGmAmAmA | | | | |
| | mUmAmGmCrArArGrUrUrArArAr | | | | |
| | ArUrArArGrGrCrUrArGrUrCrC | | | | |
| | rGrUrUrArUrCrAmAmCmUmUmGm | | | | |
| | AmAmAmAmAmGmUmGmGmCmAmCmC | | | | |
| | mGmAmGmUmCmGmGmUmGmCrArCr | | | | |
| | GrGrCrArGrArCrUrUrUrUrCrU | | | | |
| | rGrCrUrGrGrArGrUrCrArGrG* | | | | |
| | mU*mG*mC | | | | |
| tg41_ | mC*mA*mU*rGrGrUrGrCrArCrC | 20882 | 19 | 11 | sub |
| hs9 | rUrGrArCrUrCrCrUrGrGrUrUr | | | | 9 |
| | UrUrArGrAmGmCmUmAmGmAmAmA | | | | |
| | mUmAmGmCrArArGrUrUrArArAr | | | | |
| | ArUrArArGrGrCrUrArGrUrCrC | | | | |
| | rGrUrUrArUrCrAmAmCmUmUmGm | | | | |
| | AmAmAmAmAmGmUmGmGmCmAmCmC | | | | |
| | mGmAmGmUmCmGmGmUmGmCrArCr | | | | |
| | GrGrCrArGrArUrUrUrCrUrCrU | | | | |
| | rGrCrCrGrGrArGrUrCrArGrG* | | | | |
| | mU*mG*mC | | | | |
| tg41_ | mC*mA*mU*rGrGrUrGrCrArCrC | 20883 | 19 | 11 | sub |
| hs10 | rUrGrArCrUrCrCrUrGrGrUrUr | | | | 10 |
| | UrUrArGrAmGmCmUmAmGmAmAmA | | | | |
| | mUmAmGmCrArArGrUrUrArArAr | | | | |
| | ArUrArArGrGrCrUrArGrUrCrC | | | | |
| | rGrUrUrArUrCrAmAmCmUmUmGm | | | | |
| | AmAmAmAmAmGmUmGmGmCmAmCmC | | | | |
| | mGmAmGmUmCmGmGmUmGmCrArCr | | | | |
| | GrGrCrArGrArUrUrUrCrUrCrU | | | | |
| | rGrCrGrGrGrArGrUrCrArGrG* | | | | |
| | mU*mG*mC | | | | |
| tg41_ | mC*mA*mU*rGrGrUrGrCrArCrC | 20884 | 19 | 11 | sub |
| hs11 | rUrGrArCrUrCrCrUrGrGrUrUr | | | | 11 |
| | UrUrArGrAmGmCmUmAmGmAmAmA | | | | |
| | mUmAmGmCrArArGrUrUrArArAr | | | | |
| | ArUrArArGrGrCrUrArGrUrCrC | | | | |
| | rGrUrUrArUrCrAmAmCmUmUmGm | | | | |
| | AmAmAmAmAmGmUmGmGmCmAmCmC | | | | |
| | mGmAmGmUmCmGmGmUmGmCrArCr | | | | |
| | GrGrCrArGrArUrUrUrCrUrCrU | | | | |
| | rGrCrUrGrGrArGrUrCrArGrG* | | | | |
| | mU*mG*mC | | | | |
| tg41_ | mC*mA*mU*rGrGrUrGrCrArCrC | 20885 | 19 | 11 | sub |
| hs12 | rUrGrArCrUrCrCrUrGrGrUrUr | | | | 12 |
| | UrUrArGrAmGmCmUmAmGmAmAmA | | | | |
| | mUmAmGmCrArArGrUrUrArArAr | | | | |
| | ArUrArArGrGrCrUrArGrUrCrC | | | | |
| | rGrUrUrArUrCrAmAmCmUmUmGm | | | | |
| | AmAmAmAmAmGmUmGmGmCmAmCmC | | | | |
| | mGmAmGmUmCmGmGmUmGmCrArCr | | | | |
| | GrGrCrArGrArUrUrUrUrUrCrU | | | | |
| | rGrCrArGrGrArGrUrCrArGrG* | | | | |
| | mU*mG*mC | | | | |
| tg41_ | mC*mA*mU*rGrGrUrGrCrArCrC | 20886 | 19 | 11 | sub |
| hs13 | rUrGrArCrUrCrCrUrGrGrUrUr | | | | 13 |
| | UrUrArGrAmGmCmUmAmGmAmAmA | | | | |
| | mUmAmGmCrArArGrUrUrArArAr | | | | |
| | ArUrArArGrGrCrUrArGrUrCrC | | | | |
| | rGrUrUrArUrCrAmAmCmUmUmGm | | | | |
| | AmAmAmAmAmGmUmGmGmCmAmCmC | | | | |
| | mGmAmGmUmCmGmGmUmGmCrArCr | | | | |
| | GrGrCrArGrArUrUrUrUrUrCrU | | | | |
| | rGrCrCrGrGrArGrUrCrArGrG* | | | | |
| | mU*mG*mC | | | | |
| tg41_ | mC*mA*mU*rGrGrUrGrCrArCrC | 20887 | 19 | 11 | sub |
| hs14 | rUrGrArCrUrCrCrUrGrGrUrUr | | | | 14 |
| | UrUrArGrAmGmCmUmAmGmAmAmA | | | | |
| | mUmAmGmCrArArGrUrUrArArAr | | | | |
| | ArUrArArGrGrCrUrArGrUrCrC | | | | |
| | rGrUrUrArUrCrAmAmCmUmUmGm | | | | |
| | AmAmAmAmAmGmUmGmGmCmAmCmC | | | | |
| | mGmAmGmUmCmGmGmUmGmCrArCr | | | | |
| | GrGrCrArGrArUrUrUrUrUrCrU | | | | |
| | rGrCrGrGrGrArGrUrCrArGrG* | | | | |
| | mU*mG*mC | | | | |
| tg41_ | mC*mA*mU*rGrGrUrGrCrArCrC | 20888 | 19 | 11 | sub |
| hs15 | rUrGrArCrUrCrCrUrGrGrUrUr | | | | 15 |
| | UrUrArGrAmGmCmUmAmGmAmAmA | | | | |
| | mUmAmGmCrArArGrUrUrArArAr | | | | |
| | ArUrArArGrGrCrUrArGrUrCrC | | | | |
| | rGrUrUrArUrCrAmAmCmUmUmGm | | | | |
| | AmAmAmAmAmGmUmGmGmCmAmCmC | | | | |
| | mGmAmGmUmCmGmGmUmGmCrArCr | | | | |
| | GrGrCrArGrArUrUrUrUrUrCrU | | | | |
| | rGrCrUrGrGrArGrUrCrArGrG* | | | | |
| | mU*mG*mC | | | | |
| tg42_ | mC*mA*mU*rGrGrUrGrCrArCrC | 20889 | 21 | 11 | non |
| h | rUrGrArCrUrCrCrUrGrGrUrUr | | | | e |
| | UrUrArGrAmGmCmUmAmGmAmAmA | | | | |
| | mUmAmGmCrArArGrUrUrArArAr | | | | |
| | ArUrArArGrGrCrUrArGrUrCrC | | | | |
| | rGrUrUrArUrCrAmAmCmUmUmGm | | | | |
| | AmAmAmAmAmGmUmGmGmCmAmCmC | | | | |
| | mGmAmGmUmCmGmGmUmGmCrUrAr | | | | |
| | ArCrGrGrCrArGrArCrUrUrCrU | | | | |
| | rCrUrGrCrArGrGrArGrUrCrAr | | | | |
| | GrG*mU*mG*mC | | | | |
| tg42_ | mC*mA*mU*rGrGrUrGrCrArCrC | 20890 | 21 | 11 | sub |
| hs1 | rUrGrArCrUrCrCrUrGrGrUrUr | | | | 1 |
| | UrUrArGrAmGmCmUmAmGmAmAmA | | | | |
| | mUmAmGmCrArArGrUrUrArArAr | | | | |
| | ArUrArArGrGrCrUrArGrUrCrC | | | | |
| | rGrUrUrArUrCrAmAmCmUmUmGm | | | | |
| | AmAmAmAmAmGmUmGmGmCmAmCmC | | | | |
| | mGmAmGmUmCmGmGmUmGmCrUrAr | | | | |
| | ArCrGrGrCrArGrArCrUrUrCrU | | | | |
| | rCrUrGrCrCrGrGrArGrUrCrAr | | | | |
| | GrG*mU*mG*mC | | | | |
| tg42_ | mC*mA*mU*rGrGrUrGrCrArCrC | 20891 | 21 | 11 | sub |
| hs2 | rUrGrArCrUrCrCrUrGrGrUrUr | | | | 2 |
| | UrUrArGrAmGmCmUmAmGmAmAmA | | | | |
| | mUmAmGmCrArArGrUrUrArArAr | | | | |
| | ArUrArArGrGrCrUrArGrUrCrC | | | | |
| | rGrUrUrArUrCrAmAmCmUmUmGm | | | | |
| | AmAmAmAmAmGmUmGmGmCmAmCmC | | | | |
| | mGmAmGmUmCmGmGmUmGmCrUrAr | | | | |
| | ArCrGrGrCrArGrArCrUrUrCrU | | | | |
| | rCrUrGrCrGrGrGrArGrUrCrAr | | | | |
| | GrG*mU*mG*mC | | | | |
| tg42_ | mC*mA*mU*rGrGrUrGrCrArCrC | 20892 | 21 | 11 | sub |
| hs3 | rUrGrArCrUrCrCrUrGrGrUrUr | | | | 3 |
| | UrUrArGrAmGmCmUmAmGmAmAmA | | | | |
| | mUmAmGmCrArArGrUrUrArArAr | | | | |
| | ArUrArArGrGrCrUrArGrUrCrC | | | | |
| | rGrUrUrArUrCrAmAmCmUmUmGm | | | | |
| | AmAmAmAmAmGmUmGmGmCmAmCmC | | | | |
| | mGmAmGmUmCmGmGmUmGmCrUrAr | | | | |
| | ArCrGrGrCrArGrArCrUrUrCrU | | | | |
| | rCrUrGrCrUrGrGrArGrUrCrAr | | | | |
| | GrG*mU*mG*mC | | | | |
| tg42_ | mC*mA*mU*rGrGrUrGrCrArCrC | 20893 | 21 | 11 | sub |
| hs4 | rUrGrArCrUrCrCrUrGrGrUrUr | | | | 4 |
| | UrUrArGrAmGmCmUmAmGmAmAmA | | | | |
| | mUmAmGmCrArArGrUrUrArArAr | | | | |
| | ArUrArArGrGrCrUrArGrUrCrC | | | | |
| | rGrUrUrArUrCrAmAmCmUmUmGm | | | | |
| | AmAmAmAmA | | | | |
| | mGmUmGmGmCmAmCm | | | | |
| | CmGmAmGmUmCmGmGmUmGmCrUrA | | | | |
| | rArCrGrGrCrArGrArUrUrUrCr | | | | |
| | UrCrUrGrCrArGrGrArGrUrCrA | | | | |
| | rGrG*mU*mG*mC | | | | |
| tg42_ | mC*mA*mU*rGrGrUrGrCrArCrC | 20894 | 21 | 11 | sub |
| hs5 | rUrGrArCrUrCrCrUrGrGrUrUr | | | | 5 |
| | UrUrArGrAmGmCmUmAmGmAmAmA | | | | |
| | mUmAmGmCrArArGrUrUrArArAr | | | | |
| | ArUrArArGrGrCrUrArGrUrCrC | | | | |
| | rGrUrUrArUrCrAmAmCmUmUmGm | | | | |
| | AmAmAmAmAmGmUmGmGmCmAmCmC | | | | |
| | mGmAmGmUmCmGmGmUmGmCrUrAr | | | | |
| | ArCrGrGrCrArGrArCrUrUrUrU | | | | |
| | rCrUrGrCrArGrGrArGrUrCrAr | | | | |
| | GrG*mU*mG*mC | | | | |
| tg42_ | mC*mA*mU*rGrGrUrGrCrArCrC | 20895 | 21 | 11 | sub |
| hs6 | rUrGrArCrUrCrCrUrGrGrUrUr | | | | 6 |
| | UrUrArGrAmGmCmUmAmGmAmAmA | | | | |
| | mUmAmGmCrArArGrUrUrArArAr | | | | |
| | ArUrArArGrGrCrUrArGrUrCrC | | | | |
| | rGrUrUrArUrCrAmAmCmUmUmGm | | | | |
| | AmAmAmAmAmGmUmGmGmCmAmCmC | | | | |
| | mGmAmGmUmCmGmGmUmGmCrUrAr | | | | |
| | ArCrGrGrCrArGrArCrUrUrUrU | | | | |
| | rCrUrGrCrCrGrGrArGrUrCrAr | | | | |
| | GrG*mU*mG*mC | | | | |
| tg42_ | mC*mA*mU*rGrGrUrGrCrArCrC | 20896 | 21 | 11 | sub |
| hs7 | rUrGrArCrUrCrCrUrGrGrUrUr | | | | 7 |
| | UrUrArGrAmGmCmUmAmGmAmAmA | | | | |
| | mUmAmGmCrArArGrUrUrArArAr | | | | |
| | ArUrArArGrGrCrUrArGrUrCrC | | | | |
| | rGrUrUrArUrCrAmAmCmUmUmGm | | | | |
| | AmAmAmAmAmGmUmGmGmCmAmCmC | | | | |
| | mGmAmGmUmCmGmGmUmGmCrUrAr | | | | |
| | ArCrGrGrCrArGrArCrUrUrUrU | | | | |
| | rCrUrGrCrGrGrGrArGrUrCrAr | | | | |
| | GrG*mU*mG*mC | | | | |
| tg42_ | mC*mA*mU*rGrGrUrGrCrArCrC | 20897 | 21 | 11 | sub |
| hs8 | rUrGrArCrUrCrCrUrGrGrUrUr | | | | 8 |
| | UrUrArGrAmGmCmUmAmGmAmAmA | | | | |
| | mUmAmGmCrArArGrUrUrArArAr | | | | |
| | ArUrArArGrGrCrUrArGrUrCrC | | | | |
| | rGrUrUrArUrCrAmAmCmUmUmGm | | | | |
| | AmAmAmAmAmGmUmGmGmCmAmCmC | | | | |
| | mGmAmGmUmCmGmGmUmGmCrUrAr | | | | |
| | ArCrGrGrCrArGrArCrUrUrUrU | | | | |
| | rCrUrGrCrUrGrGrArGrUrCrAr | | | | |
| | GrG*mU*mG*mC | | | | |
| tg42_ | mC*mA*mU*rGrGrUrGrCrArCrC | 20898 | 21 | 11 | sub |
| hs9 | rUrGrArCrUrCrCrUrGrGrUrUr | | | | 9 |
| | UrUrArGrAmGmCmUmAmGmAmAmA | | | | |
| | mUmAmGmCrArArGrUrUrArArAr | | | | |
| | ArUrArArGrGrCrUrArGrUrCrC | | | | |
| | rGrUrUrArUrCrAmAmCmUmUmGm | | | | |
| | AmAmAmAmAmGmUmGmGmCmAmCmC | | | | |
| | mGmAmGmUmCmGmGmUmGmCrUrAr | | | | |
| | ArCrGrGrCrArGrArUrUrUrCrU | | | | |
| | rCrUrGrCrCrGrGrArGrUrCrAr | | | | |
| | GrG*mU*mG*mC | | | | |
| tg42_ | mC*mA*mU*rGrGrUrGrCrArCrC | 20899 | 21 | 11 | sub |
| hs10 | rUrGrArCrUrCrCrUrGrGrUrUr | | | | 10 |
| | UrUrArGrAmGmCmUmAmGmAmAmA | | | | |
| | mUmAmGmCrArArGrUrUrArArAr | | | | |
| | ArUrArArGrGrCrUrArGrUrCrC | | | | |
| | rGrUrUrArUrCrAmAmCmUmUmGm | | | | |
| | AmAmAmAmAmGmUmGmGmCmAmCmC | | | | |
| | mGmAmGmUmCmGmGmUmGmCrUrAr | | | | |
| | ArCrGrGrCrArGrArUrUrUrCrU | | | | |
| | rCrUrGrCrGrGrGrArGrUrCrAr | | | | |
| | GrG*mU*mG*mC | | | | |
| tg42_ | mC*mA*mU*rGrGrUrGrCrArCrC | 20900 | 21 | 11 | sub |
| hs11 | rUrGrArCrUrCrCrUrGrGrUrUr | | | | 11 |
| | UrUrArGrAmGmCmUmAmGmAmAmA | | | | |
| | mUmAmGmCrArArGrUrUrArArAr | | | | |
| | ArUrArArGrGrCrUrArGrUrCrC | | | | |
| | rGrUrUrArUrCrAmAmCmUmUmGm | | | | |
| | AmAmAmAmAmGmUmGmGmCmAmCmC | | | | |
| | mGmAmGmUmCmGmGmUmGmCrUrAr | | | | |
| | ArCrGrGrCrArGrArUrUrUrCrU | | | | |
| | rCrUrGrCrUrGrGrArGrUrCrAr | | | | |
| | GrG*mU*mG*mC | | | | |
| tg42_ | mC*mA*mU*rGrGrUrGrCrArCrC | 20901 | 21 | 11 | sub |
| hs12 | rUrGrArCrUrCrCrUrGrGrUrUr | | | | 12 |
| | UrUrArGrAmGmCmUmAmGmAmAmA | | | | |
| | mUmAmGmCrArArGrUrUrArArAr | | | | |
| | ArUrArArGrGrCrUrArGrUrCrC | | | | |
| | rGrUrUrArUrCrAmAmCmUmUmGm | | | | |
| | AmAmAmAmAmGmUmGmGmCmAmCmC | | | | |
| | mGmAmGmUmCmGmGmUmGmCrUrAr | | | | |
| | ArCrGrGrCrArGrArUrUrUrUrU | | | | |
| | rCrUrGrCrArGrGrArGrUrCrAr | | | | |
| | GrG*mU*mG*mC | | | | |
| tg42_ | mC*mA*mU*rGrGrUrGrCrArCrC | 20902 | 21 | 11 | sub |
| hs13 | rUrGrArCrUrCrCrUrGrGrUrUr | | | | 13 |
| | UrUrArGrAmGmCmUmAmGmAmAmA | | | | |
| | mUmAmGmCrArArGrUrUrArArAr | | | | |
| | ArUrArArGrGrCrUrArGrUrCrC | | | | |
| | rGrUrUrArUrCrAmAmCmUmUmGm | | | | |
| | AmAmAmAmAmGmUmGmGmCmAmCmC | | | | |
| | mGmAmGmUmCmGmGmUmGmCrUrAr | | | | |
| | ArCrGrGrCrArGrArUrUrUrUrU | | | | |
| | rCrUrGrCrCrGrGrArGrUrCrAr | | | | |
| | GrG*mU*mG*mC | | | | |
| tg42_ | mC*mA*mU*rGrGrUrGrCrArCrC | 20903 | 21 | 11 | sub |
| hs14 | rUrGrArCrUrCrCrUrGrGrUrUr | | | | 14 |
| | UrUrArGrAmGmCmUmAmGmAmAmA | | | | |
| | mUmAmGmCrArArGrUrUrArArAr | | | | |
| | ArUrArArGrGrCrUrArGrUrCrC | | | | |
| | rGrUrUrArUrCrAmAmCmUmUmGm | | | | |
| | AmAmAmAmAmGmUmGmGmCmAmCmC | | | | |
| | mGmAmGmUmCmGmGmUmGmCrUrAr | | | | |
| | ArCrGrGrCrArGrArUrUrUrUrU | | | | |
| | rCrUrGrCrGrGrGrArGrUrCrAr | | | | |
| | GrG*mU*mG*mC | | | | |
| tg42_ | mC*mA*mU*rGrGrUrGrCrArCrC | 20904 | 21 | 11 | sub |
| hs15 | rUrGrArCrUrCrCrUrGrGrUrUr | | | | 15 |
| | UrUrArGrAmGmCmUmAmGmAmAmA | | | | |
| | mUmAmGmCrArArGrUrUrArArAr | | | | |
| | ArUrArArGrGrCrUrArGrUrCrC | | | | |
| | rGrUrUrArUrCrAmAmCmUmUmGm | | | | |
| | AmAmAmAmAmGmUmGmGmCmAmCmC | | | | |
| | mGmAmGmUmCmGmGmUmGmCrUrAr | | | | |
| | ArCrGrGrCrArGrArUrUrUrUrU | | | | |
| | rCrUrGrCrUrGrGrArGrUrCrAr | | | | |
| | GrG*mU*mG*mC | | | | |
| tg43_ | mC*mA*mU*rGrGrUrGrCrArCrC | 20905 | 23 | 11 | non |
| h | rUrGrArCrUrCrCrUrGrGrUrUr | | | | e |
| | UrUrArGrAmGmCmUmAmGmAmAmA | | | | |
| | mUmAmGmCrArArGrUrUrArArAr | | | | |
| | ArUrArArGrGrCrUrArGrUrCrC | | | | |
| | rGrUrUrArUrCrAmAmCmUmUmGm | | | | |
| | AmAmAmAmAmGmUmGmGmCmAmCmC | | | | |
| | mGmAmGmUmCmGmGmUmGmCrArGr | | | | |
| | UrArArCrGrGrCrArGrArCrUrU | | | | |
| | rCrUrCrUrGrCrArGrGrArGrUr | | | | |
| | CrArGrG*mU*mG*mC | | | | |
| tg43_ | mC*mA*mU*rGrGrUrGrCrArCrC | 20906 | 23 | 11 | sub |
| hs1 | rUrGrArCrUrCrCrUrGrGrUrUr | | | | 1 |
| | UrUrArGrAmGmCmUmAmGmAmAmA | | | | |
| | mUmAmGmCrArArGrUrUrArArAr | | | | |
| | ArUrArArGrGrCrUrArGrUrCrC | | | | |
| | rGrUrUrArUrCrAmAmCmUmUmGm | | | | |
| | AmAmAmAmAmGmUmGmGmCmAmCmC | | | | |
| | mGmAmGmUmCmGmGmUmGmCrArGr | | | | |
| | UrArArCrGrGrCrArGrArCrUrU | | | | |
| | rCrUrCrUrGrCrCrGrGrArGrUr | | | | |
| | CrArGrG*mU*mG*mC | | | | |
| tg43_ | mC*mA*mU*rGrGrUrGrCrArCrC | 20907 | 23 | 11 | sub |
| hs2 | rUrGrArCrUrCrCrUrGrGrUrUr | | | | 2 |
| | UrUrArGrAmGmCmUmAmGmAmAmA | | | | |
| | mUmAmGmCrArArGrUrUrArArAr | | | | |
| | ArUrArArGrGrCrUrArGrUrCrC | | | | |
| | rGrUrUrArUrCrAmAmCmUmUmGm | | | | |
| | AmAmAmAmAmGmUmGmGmCmAmCmC | | | | |
| | mGmAmGmUmCmGmGmUmGmCrArGr | | | | |
| | UrArArCrGrGrCrArGrArCrUrU | | | | |
| | rCrUrCrUrGrCrGrGrGrArGrUr | | | | |
| | CrArGrG*mU*mG*mC | | | | |
| tg43_ | mC*mA*mU*rGrGrUrGrCrArCrC | 20908 | 23 | 11 | sub |
| hs3 | rUrGrArCrUrCrCrUrGrGrUrUr | | | | 3 |
| | UrUrArGrAmGmCmUmAmGmAmAmA | | | | |
| | mUmAmGmCrArArGrUrUrArArAr | | | | |
| | ArUrArArGrGrCrUrArGrUrCrC | | | | |
| | rGrUrUrArUrCrAmAmCmUmUmGm | | | | |
| | AmAmAmAmAmGmUmGmGmCmAmCmC | | | | |
| | mGmAmGmUmCmGmGmUmGmCrArGr | | | | |
| | UrArArCrGrGrCrArGrArCrUrU | | | | |
| | rCrUrCrUrGrCrUrGrGrArGrUr | | | | |
| | CrArGrG*mU*mG*mC | | | | |
| tg43_ | mC*mA*mU*rGrGrUrGrCrArCrC | 20909 | 23 | 11 | sub |
| hs4 | rUrGrArCrUrCrCrUrGrGrUrUr | | | | 4 |
| | UrUrArGrAmGmCmUmAmGmAmAmA | | | | |
| | mUmAmGmCrArArGrUrUrArArAr | | | | |
| | ArUrArArGrGrCrUrArGrUrCrC | | | | |
| | rGrUrUrArUrCrAmAmCmUmUmGm | | | | |
| | AmAmAmAmAmGmUmGmGmCmAmCmC | | | | |
| | mGmAmGmUmCmGmGmUmGmCrArGr | | | | |
| | UrArArCrGrGrCrArGrArUrUrU | | | | |
| | rCrUrCrUrGrCrArGrGrArGrUr | | | | |
| | CrArGrG*mU*mG*mC | | | | |
| tg43_ | mC*mA*mU*rGrGrUrGrCrArCrC | 20910 | 23 | 11 | sub |
| hs5 | rUrGrArCrUrCrCrUrGrGrUrUr | | | | 5 |
| | UrUrArGrAmGmCmUmAmGmAmAmA | | | | |
| | mUmAmGmCrArArGrUrUrArArAr | | | | |
| | ArUrArArGrGrCrUrArGrUrCrC | | | | |
| | rGrUrUrArUrCrAmAmCmUmUmGm | | | | |
| | AmAmAmAmAmGmUmGmGmCmAmCmC | | | | |
| | mGmAmGmUmCmGmGmUmGmCrArGr | | | | |
| | UrArArCrGrGrCrArGrArCrUrU | | | | |
| | rUrUrCrUrGrCrArGrGrArGrUr | | | | |
| | CrArGrG*mU*mG*mC | | | | |
| tg43_ | mC*mA*mU*rGrGrUrGrCrArCrC | 20911 | 23 | 11 | sub |
| hs6 | rUrGrArCrUrCrCrUrGrGrUrUr | | | | 6 |
| | UrUrArGrAmGmCmUmAmGmAmAmA | | | | |
| | mUmAmGmCrArArGrUrUrArArAr | | | | |
| | ArUrArArGrGrCrUrArGrUrCrC | | | | |
| | rGrUrUrArUrCrAmAmCmUmUmGm | | | | |
| | AmAmAmAmAmGmUmGmGmCmAmCmC | | | | |
| | mGmAmGmUmCmGmGmUmGmCrArGr | | | | |
| | UrArArCrGrGrCrArGrArCrUrU | | | | |
| | rUrUrCrUrGrCrCrGrGrArGrUr | | | | |
| | CrArGrG*mU*mG*mC | | | | |
| tg43_ | mC*mA*mU*rGrGrUrGrCrArCrC | 20912 | 23 | 11 | sub |
| hs7 | rUrGrArCrUrCrCrUrGrGrUrUr | | | | 7 |
| | UrUrArGrAmGmCmUmAmGmAmAmA | | | | |
| | mUmAmGmCrArArGrUrUrArArAr | | | | |
| | ArUrArArGrGrCrUrArGrUrCrC | | | | |
| | rGrUrUrArUrCrAmAmCmUmUmGm | | | | |
| | AmAmAmAmAmGmUmGmGmCmAmCmC | | | | |
| | mGmAmGmUmCmGmGmUmGmCrArGr | | | | |
| | UrArArCrGrGrCrArGrArCrUrU | | | | |
| | rUrUrCrUrGrCrGrGrGrArGrUr | | | | |
| | CrArGrG*mU*mG*mC | | | | |
| tg43_ | mC*mA*mU*rGrGrUrGrCrArCrC | 20913 | 23 | 11 | sub |
| hs8 | rUrGrArCrUrCrCrUrGrGrUrUr | | | | 8 |
| | UrUrArGrAmGmCmUmAmGmAmAmA | | | | |
| | mUmAmGmCrArArGrUrUrArArAr | | | | |
| | ArUrArArGrGrCrUrArGrUrCrC | | | | |
| | rGrUrUrArUrCrAmAmCmUmUmGm | | | | |
| | AmAmAmAmAmGmUmGmGmCmAmCmC | | | | |
| | mGmAmGmUmCmGmGmUmGmCrArGr | | | | |
| | UrArArCrGrGrCrArGrArCrUrU | | | | |
| | rUrUrCrUrGrCrUrGrGrArGrUr | | | | |
| | CrArGrG*mU*mG*mC | | | | |
| tg43_ | mC*mA*mU*rGrGrUrGrCrArCrC | 20914 | 23 | 11 | sub |
| hs9 | rUrGrArCrUrCrCrUrGrGrUrUr | | | | 9 |
| | UrUrArGrAmGmCmUmAmGmAmAmA | | | | |
| | mUmAmGmCrArArGrUrUrArArAr | | | | |
| | ArUrArArGrGrCrUrArGrUrCrC | | | | |
| | rGrUrUrArUrCrAmAmCmUmUmGm | | | | |
| | AmAmAmAmAmGmUmGmGmCmAmCmC | | | | |
| | mGmAmGmUmCmGmGmUmGmCrArGr | | | | |
| | UrArArCrGrGrCrArGrArUrUrU | | | | |
| | rCrUrCrUrGrCrCrGrGrArGrUr | | | | |
| | CrArGrG*mU*mG*mC | | | | |
| tg43_ | mC*mA*mU*rGrGrUrGrCrArCrC | 20915 | 23 | 11 | sub |
| hs10 | rUrGrArCrUrCrCrUrGrGrUrUr | | | | 10 |
| | UrUrArGrAmGmCmUmAmGmAmAmA | | | | |
| | mUmAmGmCrArArGrUrUrArArAr | | | | |
| | ArUrArArGrGrCrUrArGrUrCrC | | | | |
| | rGrUrUrArUrCrAmAmCmUmUmGm | | | | |
| | AmAmAmAmAmGmUmGmGmCmAmCmC | | | | |
| | mGmAmGmUmCmGmGmUmGmCrArGr | | | | |
| | UrArArCrGrGrCrArGrArUrUrU | | | | |
| | rCrUrCrUrGrCrGrGrGrArGrUr | | | | |
| | CrArGrG*mU*mG*mC | | | | |
| tg43_ | mC*mA*mU*rGrGrUrGrCrArCrC | 20916 | 23 | 11 | sub |
| hs11 | rUrGrArCrUrCrCrUrGrGrUrUr | | | | 11 |
| | UrUrArGrAmGmCmUmAmGmAmAmA | | | | |
| | mUmAmGmCrArArGrUrUrArArAr | | | | |
| | ArUrArArGrGrCrUrArGrUrCrC | | | | |
| | rGrUrUrArUrCrAmAmCmUmUmGm | | | | |
| | AmAmAmAmAmGmUmGmGmCmAmCmC | | | | |
| | mGmAmGmUmCmGmGmUmGmCrArGr | | | | |
| | UrArArCrGrGrCrArGrArUrUrU | | | | |
| | rCrUrCrUrGrCrUrGrGrArGrUr | | | | |
| | CrArGrG*mU*mG*mC | | | | |
| tg43_ | mC*mA*mU*rGrGrUrGrCrArCrC | 20917 | 23 | 11 | sub |
| hs12 | rUrGrArCrUrCrCrUrGrGrUrUr | | | | 12 |
| | UrUrArGrAmGmCmUmAmGmAmAmA | | | | |
| | mUmAmGmCrArArGrUrUrArArAr | | | | |
| | ArUrArArGrGrCrUrArGrUrCrC | | | | |
| | rGrUrUrArUrCrAmAmCmUmUmGm | | | | |
| | AmAmAmAmAmGmUmGmGmCmAmCmC | | | | |
| | mGmAmGmUmCmGmGmUmGmCrArGr | | | | |
| | UrArArCrGrGrCrArGrArUrUrU | | | | |
| | rUrUrCrUrGrCrArGrGrArGrUr | | | | |
| | CrArGrG*mU*mG*mC | | | | |
| tg43_ | mC*mA*mU*rGrGrUrGrCrArCrC | 20918 | 23 | 11 | sub |
| hs13 | rUrGrArCrUrCrCrUrGrGrUrUr | | | | 13 |
| | UrUrArGrAmGmCmUmAmGmAmAmA | | | | |
| | mUmAmGmCrArArGrUrUrArArAr | | | | |
| | ArUrArArGrGrCrUrArGrUrCrC | | | | |
| | rGrUrUrArUrCrAmAmCmUmUmGm | | | | |
| | AmAmAmAmAmGmUmGmGmCmAmCmC | | | | |
| | mGmAmGmUmCmGmGmUmGmCrArGr | | | | |
| | UrArArCrGrGrCrArGrArUrUrU | | | | |
| | rUrUrCrUrGrCrCrGrGrArGrUr | | | | |
| | CrArGrG*mU*mG*mC | | | | |
| tg43_ | mC*mA*mU*rGrGrUrGrCrArCrC | 20919 | 23 | 11 | sub |
| hs14 | rUrGrArCrUrCrCrUrGrGrUrUr | | | | 14 |
| | UrUrArGrAmGmCmUmAmGmAmAmA | | | | |
| | mUmAmGmCrArArGrUrUrArArAr | | | | |
| | ArUrArArGrGrCrUrArGrUrCrC | | | | |
| | rGrUrUrArUrCrAmAmCmUmUmGm | | | | |
| | AmAmAmAmAmGmUmGmGmCmAmCmC | | | | |
| | mGmAmGmUmCmGmGmUmGmCrArGr | | | | |
| | UrArArCrGrGrCrArGrArUrUrU | | | | |
| | rUrUrCrUrGrCrGrGrGrArGrUr | | | | |
| | CrArGrG*mU*mG*mC | | | | |
| tg43_ | mC*mA*mU*rGrGrUrGrCrArCrC | 20920 | 23 | 11 | sub |
| hs15 | rUrGrArCrUrCrCrUrGrGrUrUr | | | | 15 |
| | UrUrArGrAmGmCmUmAmGmAmAmA | | | | |
| | mUmAmGmCrArArGrUrUrArArAr | | | | |
| | ArUrArArGrGrCrUrArGrUrCrC | | | | |
| | rGrUrUrArUrCrAmAmCmUmUmGm | | | | |
| | AmAmAmAmAmGmUmGmGmCmAmCmC | | | | |
| | mGmAmGmUmCmGmGmUmGmCrArGr | | | | |
| | UrArArCrGrGrCrArGrArUrUrU | | | | |
| | rUrUrCrUrGrCrUrGrGrArGrUr | | | | |
| | CrArGrG*mU*mG*mC | | | | |
| tg43_ | mC*mA*mU*rGrGrUrGrCrArCrC | 20921 | 23 | 11 | sub |
| hs16 | rUrGrArCrUrCrCrUrGrGrUrUr | | | | 16 |
| | UrUrArGrAmGmCmUmAmGmAmAmA | | | | |
| | mUmAmGmCrArArGrUrUrArArAr | | | | |
| | ArUrArArGrGrCrUrArGrUrCrC | | | | |
| | rGrUrUrArUrCrAmAmCmUmUmGm | | | | |
| | AmAmAmAmAmGmUmGmGmCmAmCmC | | | | |
| | mGmAmGmUmCmGmGmUmGmCrArGr | | | | |
| | UrArArCrGrGrCrUrGrArUrUrU | | | | |
| | rUrUrCrUrGrCrCrGrGrArGrUr | | | | |
| | CrArGrG*mU*mG*mC | | | | |
| tg43_ | mC*mA*mU*rGrGrUrGrCrArCrC | 20922 | 23 | 11 | sub |
| hs17 | rUrGrArCrUrCrCrUrGrGrUrUr | | | | 17 |
| | UrUrArGrAmGmCmUmAmGmAmAmA | | | | |
| | mUmAmGmCrArArGrUrUrArArAr | | | | |
| | ArUrArArGrGrCrUrArGrUrCrC | | | | |
| | rGrUrUrArUrCrAmAmCmUmUmGm | | | | |
| | AmAmAmAmAmGmUmGmGmCmAmCmC | | | | |
| | mGmAmGmUmCmGmGmUmGmCrArGr | | | | |
| | UrArArCrGrGrCrCrGrArUrUrU | | | | |
| | rUrUrCrUrGrCrCrGrGrArGrUr | | | | |
| | CrArGrG*mU*mG*mC | | | | |

[1002] Table X2A shows the sequences of X2 without modifications. In some embodiments, the sequences used in this table can be used without chemical modifications.

TABLE X2A
Table X2 Sequences without Modifications

| | | SEQ |
|---|---|---|
| Name | Sequence | ID NO |
| tg14_ | CAUGGUGCACCUGACUCCUGGUUUU | 21794 |
| h | AGAGCUAGAAAUAGCAAGUUAAAAU | |
| | AAGGCUAGUCCGUUAUCAACUUGAA | |
| | AAAGUGGCACCGAGUCGGUGCAGAC | |
| | UUCUCUGCAGGAGUCAGGUG | |
| tg14_ | CAUGGUGCACCUGACUCCUGGUUUU | 21795 |
| hs1 | AGAGCUAGAAAUAGCAAGUUAAAAU | |
| | AAGGCUAGUCCGUUAUCAACUUGAA | |
| | AAAGUGGCACCGAGUCGGUGCAGAC | |
| | UUCUCUGCCGGAGUCAGGUG | |
| tg14_ | CAUGGUGCACCUGACUCCUGGUUUU | 21796 |
| hs2 | AGAGCUAGAAAUAGCAAGUUAAAAU | |
| | AAGGCUAGUCCGUUAUCAACUUGAA | |
| | AAAGUGGCACCGAGUCGGUGCAGAC | |
| | UUCUCUGCGGGAGUCAGGUG | |
| tg14_ | CAUGGUGCACCUGACUCCUGGUUUU | 21797 |
| hs3 | AGAGCUAGAAAUAGCAAGUUAAAAU | |
| | AAGGCUAGUCCGUUAUCAACUUGAA | |
| | AAAGUGGCACCGAGUCGGUGCAGAC | |
| | UUCUCUGCUGGAGUCAGGUG | |
| tg14_ | CAUGGUGCACCUGACUCCUGGUUUU | 21798 |
| hs4 | AGAGCUAGAAAUAGCAAGUUAAAAU | |
| | AAGGCUAGUCCGUUAUCAACUUGAA | |
| | AAAGUGGCACCGAGUCGGUGCAGAU | |
| | UUCUCUGCAGGAGUCAGGUG | |
| tg14_ | CAUGGUGCACCUGACUCCUGGUUUU | 21799 |
| hs5 | AGAGCUAGAAAUAGCAAGUUAAAAU | |
| | AAGGCUAGUCCGUUAUCAACUUGAA | |
| | AAAGUGGCACCGAGUCGGUGCAGAC | |
| | UUUUCUGCAGGAGUCAGGUG | |
| tg14_ | CAUGGUGCACCUGACUCCUGGUUUU | 21800 |
| hs6 | AGAGCUAGAAAUAGCAAGUUAAAAU | |
| | AAGGCUAGUCCGUUAUCAACUUGAA | |
| | AAAGUGGCACCGAGUCGGUGCAGAC | |
| | UUUUCUGCCGGAGUCAGGUG | |
| tg14_ | CAUGGUGCACCUGACUCCUGGUUUU | 21801 |
| hs7 | AGAGCUAGAAAUAGCAAGUUAAAAU | |
| | AAGGCUAGUCCGUUAUCAACUUGAA | |
| | AAAGUGGCACCGAGUCGGUGCAGAC | |
| | UUUUCUGCGGGAGUCAGGUG | |
| tg14_ | CAUGGUGCACCUGACUCCUGGUUUU | 21802 |
| hs8 | AGAGCUAGAAAUAGCAAGUUAAAAU | |
| | AAGGCUAGUCCGUUAUCAACUUGAA | |
| | AAAGUGGCACCGAGUCGGUGCAGAC | |
| | UUUUCUGCUGGAGUCAGGUG | |
| tg14_ | CAUGGUGCACCUGACUCCUGGUUUU | 21803 |
| hs9 | AGAGCUAGAAAUAGCAAGUUAAAAU | |
| | AAGGCUAGUCCGUUAUCAACUUGAA | |
| | AAAGUGGCACCGAGUCGGUGCAGAU | |
| | UUCUCUGCCGGAGUCAGGUG | |
| tg14_ | CAUGGUGCACCUGACUCCUGGUUUU | 21804 |
| hs10 | AGAGCUAGAAAUAGCAAGUUAAAAU | |
| | AAGGCUAGUCCGUUAUCAACUUGAA | |
| | AAAGUGGCACCGAGUCGGUGCAGAU | |
| | UUCUCUGCGGGAGUCAGGUG | |
| tg14_ | CAUGGUGCACCUGACUCCUGGUUUU | 21805 |
| hs11 | AGAGCUAGAAAUAGCAAGUUAAAAU | |
| | AAGGCUAGUCCGUUAUCAACUUGAA | |
| | AAAGUGGCACCGAGUCGGUGCAGAU | |
| | UUCUCUGCUGGAGUCAGGUG | |
| tg14_ | CAUGGUGCACCUGACUCCUGGUUUU | 21806 |
| hs12 | AGAGCUAGAAAUAGCAAGUUAAAAU | |
| | AAGGCUAGUCCGUUAUCAACUUGAA | |
| | AAAGUGGCACCGAGUCGGUGCAGAU | |
| | UUUUCUGCAGGAGUCAGGUG | |
| tg14_ | CAUGGUGCACCUGACUCCUGGUUUU | 21807 |
| hs13 | AGAGCUAGAAAUAGCAAGUUAAAAU | |
| | AAGGCUAGUCCGUUAUCAACUUGAA | |
| | AAAGUGGCACCGAGUCGGUGCAGAU | |
| | UUUUCUGCCGGAGUCAGGUG | |
| tg14_ | CAUGGUGCACCUGACUCCUGGUUUU | 21808 |
| hs14 | AGAGCUAGAAAUAGCAAGUUAAAAU | |
| | AAGGCUAGUCCGUUAUCAACUUGAA | |
| | AAAGUGGCACCGAGUCGGUGCAGAU | |
| | UUUUCUGCGGGAGUCAGGUG | |
| tg14_ | CAUGGUGCACCUGACUCCUGGUUUU | 21809 |
| hs15 | AGAGCUAGAAAUAGCAAGUUAAAAU | |
| | AAGGCUAGUCCGUUAUCAACUUGAA | |
| | AAAGUGGCACCGAGUCGGUGCAGAU | |
| | UUUUCUGCUGGAGUCAGGUG | |
| tg19_ | CAUGGUGCACCUGACUCCUGGUUUU | 21810 |
| h | AGAGCUAGAAAUAGCAAGUUAAAAU | |
| | AAGGCUAGUCCGUUAUCAACUUGAA | |
| | AAAGUGGCACCGAGUCGGUGCGGCA | |
| | GACUUCUCUGCAGGAGUCAGGUGC | |
| tg19_ | CAUGGUGCACCUGACUCCUGGUUUU | 21811 |
| hs1 | AGAGCUAGAAAUAGCAAGUUAAAAU | |
| | AAGGCUAGUCCGUUAUCAACUUGAA | |
| | AAAGUGGCACCGAGUCGGUGCGGCA | |
| | GACUUCUCUGCCGGAGUCAGGUGC | |
| tg19_ | CAUGGUGCACCUGACUCCUGGUUUU | 21812 |
| hs2 | AGAGCUAGAAAUAGCAAGUUAAAAU | |
| | AAGGCUAGUCCGUUAUCAACUUGAA | |
| | AAAGUGGCACCGAGUCGGUGCGGCA | |
| | GACUUCUCUGCGGGAGUCAGGUGC | |
| tg19_ | CAUGGUGCACCUGACUCCUGGUUUU | 21813 |
| hs3 | AGAGCUAGAAAUAGCAAGUUAAAAU | |
| | AAGGCUAGUCCGUUAUCAACUUGAA | |
| | AAAGUGGCACCGAGUCGGUGCGGCA | |
| | GACUUCUCUGCUGGAGUCAGGUGC | |
| tg19_ | CAUGGUGCACCUGACUCCUGGUUUU | 21814 |
| hs4 | AGAGCUAGAAAUAGCAAGUUAAAAU | |
| | AAGGCUAGUCCGUUAUCAACUUGAA | |
| | AAAGUGGCACCGAGUCGGUGCGGCA | |
| | GAUUUCUCUGCAGGAGUCAGGUGC | |
| tg19_ | CAUGGUGCACCUGACUCCUGGUUUU | 21815 |
| hs5 | AGAGCUAGAAAUAGCAAGUUAAAAU | |
| | AAGGCUAGUCCGUUAUCAACUUGAA | |
| | AAAGUGGCACCGAGUCGGUGCGGCA | |
| | GACUUUUCUGCAGGAGUCAGGUGC | |
| tg19_ | CAUGGUGCACCUGACUCCUGGUUUU | 21816 |
| hs6 | AGAGCUAGAAAUAGCAAGUUAAAAU | |
| | AAGGCUAGUCCGUUAUCAACUUGAA | |
| | AAAGUGGCACCGAGUCGGUGCGGCA | |
| | GACUUUUCUGCCGGAGUCAGGUGC | |
| tg19_ | CAUGGUGCACCUGACUCCUGGUUUU | 21817 |
| hs7 | AGAGCUAGAAAUAGCAAGUUAAAAU | |
| | AAGGCUAGUCCGUUAUCAACUUGAA | |
| | AAAGUGGCACCGAGUCGGUGCGGCA | |
| | GACUUUUCUGCGGGAGUCAGGUGC | |
| tg19_ | CAUGGUGCACCUGACUCCUGGUUUU | 21818 |
| hs8 | AGAGCUAGAAAUAGCAAGUUAAAAU | |
| | AAGGCUAGUCCGUUAUCAACUUGAA | |
| | AAAGUGGCACCGAGUCGGUGCGGCA | |
| | GACUUUUCUGCUGGAGUCAGGUGC | |
| tg19_ | CAUGGUGCACCUGACUCCUGGUUUU | 21819 |
| hs9 | AGAGCUAGAAAUAGCAAGUUAAAAU | |
| | AAGGCUAGUCCGUUAUCAACUUGAA | |
| | AAAGUGGCACCGAGUCGGUGCGGCA | |
| | GAUUUCUCUGCCGGAGUCAGGUGC | |
| tg19_ | CAUGGUGCACCUGACUCCUGGUUUU | 21820 |
| hs10 | AGAGCUAGAAAUAGCAAGUUAAAAU | |
| | AAGGCUAGUCCGUUAUCAACUUGAA | |
| | AAAGUGGCACCGAGUCGGUGCGGCA | |
| | GAUUUCUCUGCGGGAGUCAGGUGC | |
| tg19_ | CAUGGUGCACCUGACUCCUGGUUUU | 21821 |
| hs11 | AGAGCUAGAAAUAGCAAGUUAAAAU | |
| | AAGGCUAGUCCGUUAUCAACUUGAA | |
| | AAAGUGGCACCGAGUCGGUGCGGCA | |
| | GAUUUCUCUGCUGGAGUCAGGUGC | |
| tg19_ | CAUGGUGCACCUGACUCCUGGUUUU | 21822 |
| hs12 | AGAGCUAGAAAUAGCAAGUUAAAAU | |
| | AAGGCUAGUCCGUUAUCAACUUGAA | |
| | AAAGUGGCACCGAGUCGGUGCGGCA | |
| | GAUUUUUCUGCAGGAGUCAGGUGC | |
| tg19_ | CAUGGUGCACCUGACUCCUGGUUUU | 21823 |
| hs13 | AGAGCUAGAAAUAGCAAGUUAAAAU | |
| | AAGGCUAGUCCGUUAUCAACUUGAA | |
| | AAAGUGGCACCGAGUCGGUGCGGCA | |
| | GAUUUUUCUGCCGGAGUCAGGUGC | |
| tg19_ | CAUGGUGCACCUGACUCCUGGUUUU | 21824 |
| hs14 | AGAGCUAGAAAUAGCAAGUUAAAAU | |
| | AAGGCUAGUCCGUUAUCAACUUGAA | |
| | AAAGUGGCACCGAGUCGGUGCGGCA | |
| | GAUUUUUCUGCGGGAGUCAGGUGC | |
| tg19_ | CAUGGUGCACCUGACUCCUGGUUUU | 21825 |
| hs15 | AGAGCUAGAAAUAGCAAGUUAAAAU | |
| | AAGGCUAGUCCGUUAUCAACUUGAA | |
| | AAAGUGGCACCGAGUCGGUGCGGCA | |
| | GAUUUUUCUGCUGGAGUCAGGUGC | |
| tg41_ | CAUGGUGCACCUGACUCCUGGUUUU | 21826 |
| h | AGAGCUAGAAAUAGCAAGUUAAAAU | |
| | AAGGCUAGUCCGUUAUCAACUUGAA | |
| | AAAGUGGCACCGAGUCGGUGCACGG | |
| | CAGACUUCUCUGCAGGAGUCAGGUG | |
| | C | |
| tg41_ | CAUGGUGCACCUGACUCCUGGUUUU | 21827 |
| hs1 | AGAGCUAGAAAUAGCAAGUUAAAAU | |
| | AAGGCUAGUCCGUUAUCAACUUGAA | |
| | AAAGUGGCACCGAGUCGGUGCACGG | |
| | CAGACUUCUCUGCCGGAGUCAGGUG | |
| | C | |
| tg41_ | CAUGGUGCACCUGACUCCUGGUUUU | 21828 |
| hs2 | AGAGCUAGAAAUAGCAAGUUAAAAU | |
| | AAGGCUAGUCCGUUAUCAACUUGAA | |
| | AAAGUGGCACCGAGUCGGUGCACGG | |
| | CAGACUUCUCUGCGGGAGUCAGGUG | |
| | C | |
| tg41_ | CAUGGUGCACCUGACUCCUGGUUUU | 21829 |
| hs3 | AGAGCUAGAAAUAGCAAGUUAAAAU | |
| | AAGGCUAGUCCGUUAUCAACUUGAA | |
| | AAAGUGGCACCGAGUCGGUGCACGG | |
| | CAGACUUCUCUGCUGGAGUCAGGUG | |
| | C | |
| tg41_ | CAUGGUGCACCUGACUCCUGGUUUU | 21830 |
| hs4 | AGAGCUAGAAAUAGCAAGUUAAAAU | |
| | AAGGCUAGUCCGUUAUCAACUUGAA | |
| | AAAGUGGCACCGAGUCGGUGCACGG | |
| | CAGAUUUCUCUGCAGGAGUCAGGUG | |
| | C | |
| tg41_ | CAUGGUGCACCUGACUCCUGGUUUU | 21831 |
| hs5 | AGAGCUAGAAAUAGCAAGUUAAAAU | |
| | AAGGCUAGUCCGUUAUCAACUUGAA | |
| | AAAGUGGCACCGAGUCGGUGCACGG | |
| | CAGACUUUUCUGCAGGAGUCAGGUG | |
| | C | |
| tg41_ | CAUGGUGCACCUGACUCCUGGUUUU | 21832 |
| hs6 | AGAGCUAGAAAUAGCAAGUUAAAAU | |
| | AAGGCUAGUCCGUUAUCAACUUGAA | |
| | AAAGUGGCACCGAGUCGGUGCACGG | |
| | CAGACUUUUCUGCCGGAGUCAGGUG | |
| | C | |
| tg41_ | CAUGGUGCACCUGACUCCUGGUUUU | 21833 |
| hs7 | AGAGCUAGAAAUAGCAAGUUAAAAU | |
| | AAGGCUAGUCCGUUAUCAACUUGAA | |
| | AAAGUGGCACCGAGUCGGUGCACGG | |
| | CAGACUUUUCUGCGGGAGUCAGGUG | |
| | C | |
| tg41_ | CAUGGUGCACCUGACUCCUGGUUUU | 21834 |
| hs8 | AGAGCUAGAAAUAGCAAGUUAAAAU | |
| | AAGGCUAGUCCGUUAUCAACUUGAA | |
| | AAAGUGGCACCGAGUCGGUGCACGG | |
| | CAGACUUUUCUGCUGGAGUCAGGUG | |
| | C | |
| tg41_ | CAUGGUGCACCUGACUCCUGGUUUU | 21835 |
| hs9 | AGAGCUAGAAAUAGCAAGUUAAAAU | |
| | AAGGCUAGUCCGUUAUCAACUUGAA | |
| | AAAGUGGCACCGAGUCGGUGCACGG | |
| | CAGAUUUCUCUGCCGGAGUCAGGUG | |
| | C | |
| tg41_ | CAUGGUGCACCUGACUCCUGGUUUU | 21836 |
| hs10 | AGAGCUAGAAAUAGCAAGUUAAAAU | |
| | AAGGCUAGUCCGUUAUCAACUUGAA | |
| | AAAGUGGCACCGAGUCGGUGCACGG | |
| | CAGAUUUCUCUGCGGGAGUCAGGUG | |
| | C | |
| tg41_ | CAUGGUGCACCUGACUCCUGGUUUU | 21837 |
| hs11 | AGAGCUAGAAAUAGCAAGUUAAAAU | |
| | AAGGCUAGUCCGUUAUCAACUUGAA | |
| | AAAGUGGCACCGAGUCGGUGCACGG | |
| | CAGAUUUCUCUGCUGGAGUCAGGUG | |
| | C | |
| tg41_ | CAUGGUGCACCUGACUCCUGGUUUU | 21838 |
| hs12 | AGAGCUAGAAAUAGCAAGUUAAAAU | |
| | AAGGCUAGUCCGUUAUCAACUUGAA | |
| | AAAGUGGCACCGAGUCGGUGCACGG | |
| | CAGAUUUUUCUGCAGGAGUCAGGUG | |
| | C | |
| tg41_ | CAUGGUGCACCUGACUCCUGGUUUU | 21839 |
| hs13 | AGAGCUAGAAAUAGCAAGUUAAAAU | |
| | AAGGCUAGUCCGUUAUCAACUUGAA | |
| | AAAGUGGCACCGAGUCGGUGCACGG | |
| | CAGAUUUUUCUGCCGGAGUCAGGUG | |
| | C | |
| tg41_ | CAUGGUGCACCUGACUCCUGGUUUU | 21840 |
| hs14 | AGAGCUAGAAAUAGCAAGUUAAAAU | |
| | AAGGCUAGUCCGUUAUCAACUUGAA | |
| | AAAGUGGCACCGAGUCGGUGCACGG | |
| | CAGAUUUUUCUGCGGGAGUCAGGUG | |
| | C | |
| tg41_ | CAUGGUGCACCUGACUCCUGGUUUU | 21841 |
| hs15 | AGAGCUAGAAAUAGCAAGUUAAAAU | |
| | AAGGCUAGUCCGUUAUCAACUUGAA | |
| | AAAGUGGCACCGAGUCGGUGCACGG | |
| | CAGAUUUUUCUGCUGGAGUCAGGUG | |
| | C | |
| tg42_ | CAUGGUGCACCUGACUCCUGGUUUU | 21842 |
| h | AGAGCUAGAAAUAGCAAGUUAAAAU | |
| | AAGGCUAGUCCGUUAUCAACUUGAA | |
| | AAAGUGGCACCGAGUCGGUGCUAAC | |
| | GGCAGACUUCUCUGCAGGAGUCAGG | |
| | UGC | |
| tg42_ | CAUGGUGCACCUGACUCCUGGUUUU | 21843 |
| hs1 | AGAGCUAGAAAUAGCAAGUUAAAAU | |
| | AAGGCUAGUCCGUUAUCAACUUGAA | |
| | AAAGUGGCACCGAGUCGGUGCUAAC | |
| | GGCAGACUUCUCUGCCGGAGUCAGG | |
| | UGC | |
| tg42_ | CAUGGUGCACCUGACUCCUGGUUUU | 21844 |
| hs2 | AGAGCUAGAAAUAGCAAGUUAAAAU | |
| | AAGGCUAGUCCGUUAUCAACUUGAA | |
| | AAAGUGGCACCGAGUCGGUGCUAAC | |
| | GGCAGACUUCUCUGCGGGAGUCAGG | |
| | UGC | |
| tg42_ | CAUGGUGCACCUGACUCCUGGUUUU | 21845 |
| hs3 | AGAGCUAGAAAUAGCAAGUUAAAAU | |
| | AAGGCUAGUCCGUUAUCAACUUGAA | |
| | AAAGUGGCACCGAGUCGGUGCUAAC | |
| | GGCAGACUUCUCUGCUGGAGUCAGG | |
| | UGC | |
| tg42_ | CAUGGUGCACCUGACUCCUGGUUUU | 21846 |
| hs4 | AGAGCUAGAAAUAGCAAGUUAAAAU | |
| | AAGGCUAGUCCGUUAUCAACUUGAA | |
| | AAAGUGGCACCGAGUCGGUGCUAAC | |
| | GGCAGAUUUCUCUGCAGGAGUCAGG | |
| | UGC | |
| tg42_ | CAUGGUGCACCUGACUCCUGGUUUU | 21847 |
| hs5 | AGAGCUAGAAAUAGCAAGUUAAAAU | |
| | AAGGCUAGUCCGUUAUCAACUUGAA | |
| | AAAGUGGCACCGAGUCGGUGCUAAC | |
| | GGCAGACUUUUCUGCAGGAGUCAGG | |
| | UGC | |
| tg42_ | CAUGGUGCACCUGACUCCUGGUUUU | 21848 |
| hs6 | AGAGCUAGAAAUAGCAAGUUAAAAU | |
| | AAGGCUAGUCCGUUAUCAACUUGAA | |
| | AAAGUGGCACCGAGUCGGUGCUAAC | |
| | GGCAGACUUUUCUGCCGGAGUCAGG | |
| | UGC | |
| tg42_ | CAUGGUGCACCUGACUCCUGGUUUU | 21849 |
| hs7 | AGAGCUAGAAAUAGCAAGUUAAAAU | |
| | AAGGCUAGUCCGUUAUCAACUUGAA | |
| | AAAGUGGCACCGAGUCGGUGCUAAC | |
| | GGCAGACUUUUCUGCGGGAGUCAGG | |
| | UGC | |
| tg42_ | CAUGGUGCACCUGACUCCUGGUUUU | 21850 |
| hs8 | AGAGCUAGAAAUAGCAAGUUAAAAU | |
| | AAGGCUAGUCCGUUAUCAACUUGAA | |
| | AAAGUGGCACCGAGUCGGUGCUAAC | |
| | GGCAGACUUUUCUGCUGGAGUCAGG | |
| | UGC | |
| tg42_ | CAUGGUGCACCUGACUCCUGGUUUU | 21851 |
| hs9 | AGAGCUAGAAAUAGCAAGUUAAAAU | |
| | AAGGCUAGUCCGUUAUCAACUUGAA | |
| | AAAGUGGCACCGAGUCGGUGCUAAC | |
| | GGCAGAUUUCUCUGCCGGAGUCAGG | |
| | UGC | |
| tg42_ | CAUGGUGCACCUGACUCCUGGUUUU | 21852 |
| hs10 | AGAGCUAGAAAUAGCAAGUUAAAAU | |
| | AAGGCUAGUCCGUUAUCAACUUGAA | |
| | AAAGUGGCACCGAGUCGGUGCUAAC | |
| | GGCAGAUUUCUCUGCGGGAGUCAGG | |
| | UGC | |
| tg42_ | CAUGGUGCACCUGACUCCUGGUUUU | 21853 |
| hs11 | AGAGCUAGAAAUAGCAAGUUAAAAU | |
| | AAGGCUAGUCCGUUAUCAACUUGAA | |
| | AAAGUGGCACCGAGUCGGUGCUAAC | |
| | GGCAGAUUUCUCUGCUGGAGUCAGG | |
| | UGC | |
| tg42_ | CAUGGUGCACCUGACUCCUGGUUUU | 21854 |
| hs12 | AGAGCUAGAAAUAGCAAGUUAAAAU | |
| | AAGGCUAGUCCGUUAUCAACUUGAA | |
| | AAAGUGGCACCGAGUCGGUGCUAAC | |
| | GGCAGAUUUUUCUGCAGGAGUCAGG | |
| | UGC | |
| tg42_ | CAUGGUGCACCUGACUCCUGGUUUU | 21855 |
| hs13 | AGAGCUAGAAAUAGCAAGUUAAAAU | |
| | AAGGCUAGUCCGUUAUCAACUUGAA | |
| | AAAGUGGCACCGAGUCGGUGCUAAC | |
| | GGCAGAUUUUUCUGCCGGAGUCAGG | |
| | UGC | |
| tg42_ | CAUGGUGCACCUGACUCCUGGUUUU | 21856 |
| hs14 | AGAGCUAGAAAUAGCAAGUUAAAAU | |
| | AAGGCUAGUCCGUUAUCAACUUGAA | |
| | AAAGUGGCACCGAGUCGGUGCUAAC | |
| | GGCAGAUUUUUCUGCGGGAGUCAGG | |
| | UGC | |
| tg42_ | CAUGGUGCACCUGACUCCUGGUUUU | 21857 |
| hs15 | AGAGCUAGAAAUAGCAAGUUAAAAU | |
| | AAGGCUAGUCCGUUAUCAACUUGAA | |
| | AAAGUGGCACCGAGUCGGUGCUAAC | |
| | GGCAGAUUUUUCUGCUGGAGUCAGG | |
| | UGC | |
| tg43_ | CAUGGUGCACCUGACUCCUGGUUUU | 21858 |
| h | AGAGCUAGAAAUAGCAAGUUAAAAU | |
| | AAGGCUAGUCCGUUAUCAACUUGAA | |
| | AAAGUGGCACCGAGUCGGUGCAGUA | |
| | ACGGCAGACUUCUCUGCAGGAGUCA | |
| | GGUGC | |
| tg43_ | CAUGGUGCACCUGACUCCUGGUUUU | 21859 |
| hs1 | AGAGCUAGAAAUAGCAAGUUAAAAU | |
| | AAGGCUAGUCCGUUAUCAACUUGAA | |
| | AAAGUGGCACCGAGUCGGUGCAGUA | |
| | ACGGCAGACUUCUCUGCCGGAGUCA | |
| | GGUGC | |
| tg43_ | CAUGGUGCACCUGACUCCUGGUUUU | 21860 |
| hs2 | AGAGCUAGAAAUAGCAAGUUAAAAU | |
| | AAGGCUAGUCCGUUAUCAACUUGAA | |
| | AAAGUGGCACCGAGUCGGUGCAGUA | |
| | ACGGCAGACUUCUCUGCGGGAGUCA | |
| | GGUGC | |
| tg43_ | CAUGGUGCACCUGACUCCUGGUUUU | 21861 |
| hs3 | AGAGCUAGAAAUAGCAAGUUAAAAU | |
| | AAGGCUAGUCCGUUAUCAACUUGAA | |
| | AAAGUGGCACCGAGUCGGUGCAGUA | |
| | ACGGCAGACUUCUCUGCUGGAGUCA | |
| | GGUGC | |
| tg43_ | CAUGGUGCACCUGACUCCUGGUUUU | 21862 |
| hs4 | AGAGCUAGAAAUAGCAAGUUAAAAU | |
| | AAGGCUAGUCCGUUAUCAACUUGAA | |
| | AAAGUGGCACCGAGUCGGUGCAGUA | |
| | ACGGCAGAUUUCUCUGCAGGAGUCA | |
| | GGUGC | |
| tg43_ | CAUGGUGCACCUGACUCCUGGUUUU | 21863 |
| hs5 | AGAGCUAGAAAUAGCAAGUUAAAAU | |
| | AAGGCUAGUCCGUUAUCAACUUGAA | |
| | AAAGUGGCACCGAGUCGGUGCAGUA | |
| | ACGGCAGACUUUUCUGCAGGAGUCA | |
| | GGUGC | |
| tg43_ | CAUGGUGCACCUGACUCCUGGUUUU | 21864 |
| hs6 | AGAGCUAGAAAUAGCAAGUUAAAAU | |
| | AAGGCUAGUCCGUUAUCAACUUGAA | |
| | AAAGUGGCACCGAGUCGGUGCAGUA | |
| | ACGGCAGACUUUUCUGCCGGAGUCA | |
| | GGUGC | |
| tg43_ | CAUGGUGCACCUGACUCCUGGUUUU | 21865 |
| hs7 | AGAGCUAGAAAUAGCAAGUUAAAAU | |
| | AAGGCUAGUCCGUUAUCAACUUGAA | |
| | AAAGUGGCACCGAGUCGGUGCAGUA | |
| | ACGGCAGACUUUUCUGCGGGAGUCA | |
| | GGUGC | |
| tg43_ | CAUGGUGCACCUGACUCCUGGUUUU | 21866 |
| hs8 | AGAGCUAGAAAUAGCAAGUUAAAAU | |
| | AAGGCUAGUCCGUUAUCAACUUGAA | |
| | AAAGUGGCACCGAGUCGGUGCAGUA | |
| | ACGGCAGACUUUUCUGCUGGAGUCA | |
| | GGUGC | |
| tg43_ | CAUGGUGCACCUGACUCCUGGUUUU | 21867 |
| hs9 | AGAGCUAGAAAUAGCAAGUUAAAAU | |
| | AAGGCUAGUCCGUUAUCAACUUGAA | |
| | AAAGUGGCACCGAGUCGGUGCAGUA | |
| | ACGGCAGAUUUCUCUGCCGGAGUCA | |
| | GGUGC | |
| tg43_ | CAUGGUGCACCUGACUCCUGGUUUU | 21868 |
| hs10 | AGAGCUAGAAAUAGCAAGUUAAAAU | |
| | AAGGCUAGUCCGUUAUCAACUUGAA | |
| | AAAGUGGCACCGAGUCGGUGCAGUA | |
| | ACGGCAGAUUUCUCUGCGGGAGUCA | |
| | GGUGC | |
| tg43_ | CAUGGUGCACCUGACUCCUGGUUUU | 21869 |
| hs11 | AGAGCUAGAAAUAGCAAGUUAAAAU | |
| | AAGGCUAGUCCGUUAUCAACUUGAA | |
| | AAAGUGGCACCGAGUCGGUGCAGUA | |
| | ACGGCAGAUUUCUCUGCUGGAGUCA | |
| | GGUGC | |
| tg43_ | CAUGGUGCACCUGACUCCUGGUUUU | 21870 |
| hs12 | AGAGCUAGAAAUAGCAAGUUAAAAU | |
| | AAGGCUAGUCCGUUAUCAACUUGAA | |
| | AAAGUGGCACCGAGUCGGUGCAGUA | |
| | ACGGCAGAUUUUUCUGCAGGAGUCA | |
| | GGUGC | |
| tg43_ | CAUGGUGCACCUGACUCCUGGUUUU | 21871 |
| hs13 | AGAGCUAGAAAUAGCAAGUUAAAAU | |
| | AAGGCUAGUCCGUUAUCAACUUGAA | |
| | AAAGUGGCACCGAGUCGGUGCAGUA | |
| | ACGGCAGAUUUUUCUGCCGGAGUCA | |
| | GGUGC | |
| tg43_ | CAUGGUGCACCUGACUCCUGGUUUU | 21872 |
| hs14 | AGAGCUAGAAAUAGCAAGUUAAAAU | |
| | AAGGCUAGUCCGUUAUCAACUUGAA | |
| | AAAGUGGCACCGAGUCGGUGCAGUA | |
| | ACGGCAGAUUUUUCUGCGGGAGUCA | |
| | GGUGC | |
| tg43_ | CAUGGUGCACCUGACUCCUGGUUUU | 21873 |
| hs15 | AGAGCUAGAAAUAGCAAGUUAAAAU | |
| | AAGGCUAGUCCGUUAUCAACUUGAA | |
| | AAAGUGGCACCGAGUCGGUGCAGUA | |
| | ACGGCAGAUUUUUCUGCUGGAGUCA | |
| | GGUGC | |
| tg43_ | CAUGGUGCACCUGACUCCUGGUUUU | 21874 |
| hs16 | AGAGCUAGAAAUAGCAAGUUAAAAU | |
| | AAGGCUAGUCCGUUAUCAACUUGAA | |
| | AAAGUGGCACCGAGUCGGUGCAGUA | |
| | ACGGCUGAUUUUUCUGCCGGAGUCA | |
| | GGUGC | |
| tg43_ | CAUGGUGCACCUGACUCCUGGUUUU | 21875 |
| hs17 | AGAGCUAGAAAUAGCAAGUUAAAAU | |
| | AAGGCUAGUCCGUUAUCAACUUGAA | |
| | AAAGUGGCACCGAGUCGGUGCAGUA | |
| | ACGGCCGAUUUUUCUGCCGGAGUCA | |
| | GGUGC | |

[1003] Select corresponding template RNA sequences not comprising silent substitutions are given in Example 5 (e.g., FYF tgRNA14 is a corresponding template RNA sequence to tg14h, FYF tgRNA19 is a corresponding template RNA sequence to tg19h, etc.).

[1004] The gene modifying polypeptide used comprised the sequence set out in Example 8 labeled RNAV209.

[1005] The gene modifying system comprising the gene modifying polypeptides and the template RNA described above was transfected into human HSCs. The gene modifying polypeptide and the template RNA were delivered by nucleofection in RNA format. Specifically, 3000 ng of mRNA encoding the gene modifying polypeptide were combined with 2000 ng template RNA. The RNA mixture was added to 200,000 primary human HSCs in a total of 20 μL of Lonza P3 buffer and HSC were nucleofected in 16-well nucleofection cassettes using program DZ-100. After nucleofection, cells incubated at room temperature for 10 minutes and were transferred to 24-well plates containing 500 μL of StemSpan-XF+SCF at 100 ng/ml, Flt3-L at 100 ng/ml, and TPO at 100 ng/ml in each well and cultured at 37° C., 5% CO₂ for 3 days prior to cell lysis and genomic DNA extraction. To analyze gene editing activity, primers flanking the target insertion site locus were used to amplify across the locus. Amplicons were analyzed via short read sequencing using an Illumina MiSeq. Replacement of the DNA bases adenine and guanine at nucleotide positions 20 and 21 to the bases cytosine and adenine (HBB5 template RNA) plus the inclusion of the expected silent substitutions downstream of the transcriptional start site within the endogenous B-globin locus indicated successful editing.

[1006] As shown in FIG. 19A, average perfect rewrite levels of 0.2%-7.3%, corresponding to replacement of adenine and guanine at nucleotide positions 20 and 21 to the bases cytosine and adenine (respectively) at the SCD codon, were detected in primary human HSCs when the HSCs were treated with exemplary gene modifying systems comprising exemplary HBB5 template RNAs containing various silent substitutions. The results show that in some cases a silent substitution or substitutions can increase editing activity across several different template RNAs, e.g., exemplary silent substitution(s) hs1. In particular, replacement of the codon encoding the 6th amino acid, counting the initial methionine, of the HBB gene (the proline) to either CCC or CCG resulted in increased editing.

[1007] These results demonstrate that introducing silent substitutions within an exemplary template RNA increases editing activity of a gene modifying system comprising said template RNAs up to 5-fold when targeting a clinically relevant codon in the endogenous B-globin locus in primary human HSCs. The results further demonstrate that adjusting the identity or identities of the silent substitution(s) can increase the enhancement to editing activity.

### Example 15: Characterizing Configurations of Template RNAs Including Silent Substitutions for Editing the Endogenous B-Globin Locus in CD34+Primary Human Hematopoietic Stem Cells (HSCs)

[1008] This example demonstrates the use of a gene modifying system containing an exemplary gene modifying polypeptide and various template RNAs comprising different silent substitutions, to convert the glutamic acid codon at amino acid position 7 in the endogenous B-globin locus in primary human HSCs to alanine, thereby demonstrating targeting the sequence position associated with sickle cell disease (SCD) and editing of the sequence to encode a non-pathogenic sequence into position 7. This conversion comprises a change of one base pair for exemplary HBB8 template RNAs (i.e., replacement of the DNA base adenine at nucleotide positions 20 to the base cytosine) plus the inclusion of additional relevant silent substitutions (which alter the nucleic acid sequence of the DNA but not the protein sequence through the usage of different synonymous codons).

[1009] In this example, the template RNA contained:
[1010] (1) a gRNA spacer;
[1011] (2) a gRNA scaffold;
[1012] (3) a heterologous object sequence; and
[1013] (4) a primer binding site (PBS) sequence.

[1014] More specifically, the exemplary template RNAs comprised the following sequences from 5′ to 3′, wherein the first 3, and last 3 bases have 2′-O-methyl phosphorothioate chemical modifications. In the sequences below, m=2′-O-methyl ribonucleotide, r=ribose, and *=phosphorothioate bond. Different combinations of substitutions and RT/PBS length were included (Table X³).

TABLE X3
Exemplary Silent Substitution-Containing Template RNAs

| | | SEQ | | | |
|---|---|---|---|---|---|
| | | ID | RT | PBS | |
| Name | Sequence | NO | length | length | Substitution |
| tg34 | mG*mU*mA*rArCrGrGrCr | 22005 | 14 | 11 | none |
| | ArGrArCrUrUrCrUrCrCr | | | | |
| | UrCrGrUrUrUrUrArGrAm | | | | |
| | GmCmUmAmGmAmAmAmUmAm | | | | |
| | GmCrArArGrUrUrArArAr | | | | |
| | ArUrArArGrGrCrUrArGr | | | | |
| | UrCrCrGrUrUrArUrCrAm | | | | |
| | AmCmUmUmGmAmAmAmAmAm | | | | |
| | GmUmGmGmCmAmCmCmGmAm | | | | |
| | GmUmCmGmGmUmGmCrArCr | | | | |
| | CrUrGrArCrUrCrCrUrGr | | | | |
| | CrGrGrArGrArArGrUrC* | | | | |
| | mU*mG*mC | | | | |
| tg34_ | mG*mU*mA*rArCrGrGrCr | 20924 | 14 | 11 | sub |
| HBB8h | ArGrArCrUrUrCrUrCrCr | | | | |
| S | UrCrGrUrUrUrUrArGrAm | | | | |
| | GmCmUmAmGmAmAmAmUmAm | | | | |
| | GmCrArArGrUrUrArArAr | | | | |
| | ArUrArArGrGrCrUrArGr | | | | |
| | UrCrCrGrUrUrArUrCrAm | | | | |
| | AmCmUmUmGmAmAmAmAmAm | | | | |
| | GmUmGmGmCmAmCmCmGmAm | | | | |
| | GmUmCmGmGmUmGmCrArCr | | | | |
| | CrUrGrArCrUrCrCrGrGr | | | | |
| | CrCrGrArGrArArGrUrC* | | | | |
| | mU*mG*mC | | | | |
| tg34_ | mG*mU*mA*rArCrGrGrCr | 20925 | 14 | 11 | Sub |
| HBB8h | ArGrArCrUrUrCrUrCrCr | | | | 1 |
| s1 | UrCrGrUrUrUrUrArGrAm | | | | |
| | GmCmUmAmGmAmAmAmUmAm | | | | |
| | GmCrArArGrUrUrArArAr | | | | |
| | ArUrArArGrGrCrUrArGr | | | | |
| | UrCrCrGrUrUrArUrCrAm | | | | |
| | AmCmUmUmGmAmAmAmAmAm | | | | |
| | GmUmGmGmCmAmCmCmGmAm | | | | |
| | GmUmCmGmGmUmGmCrArCr | | | | |
| | CrUrGrArCrUrCrCrUrGr | | | | |
| | CrArGrArGrArArGrUrC* | | | | |
| | mU*mG*mC | | | | |
| tg34_ | mG*mU*mA*rArCrGrGrCr | 20926 | 14 | 11 | Sub |
| HBB8h | ArGrArCrUrUrCrUrCrCr | | | | 2 |
| s2 | UrCrGrUrUrUrUrArGrAm | | | | |
| | GmCmUmAmGmAmAmAmUmAm | | | | |
| | GmCrArArGrUrUrArArAr | | | | |
| | ArUrArArGrGrCrUrArGr | | | | |
| | UrCrCrGrUrUrArUrCrAm | | | | |
| | AmCmUmUmGmAmAmAmAmAm | | | | |
| | GmUmGmGmCmAmCmCmGmAm | | | | |
| | GmUmCmGmGmUmGmCrArCr | | | | |
| | CrUrGrArCrUrCrCrUrGr | | | | |
| | CrUrGrArGrArArGrUrC* | | | | |
| | mU*mG*mC | | | | |
| tg34_ | mG*mU*mA*rArCrGrGrCr | 20927 | 14 | 11 | Sub |
| HBB8h | ArGrArCrUrUrCrUrCrCr | | | | 3 |
| s3 | UrCrGrUrUrUrUrArGrAm | | | | |
| | GmCmUmAmGmAmAmAmUmAm | | | | |
| | GmCrArArGrUrUrArArAr | | | | |
| | ArUrArArGrGrCrUrArGr | | | | |
| | UrCrCrGrUrUrArUrCrAm | | | | |
| | AmCmUmUmGmAmAmAmAmAm | | | | |
| | GmUmGmGmCmAmCmCmGmAm | | | | |
| | GmUmCmGmGmUmGmCrArCr | | | | |
| | CrUrGrArCrUrCrCrUrGr | | | | |
| | CrCrGrArGrArArGrUrC* | | | | |
| | mU*mG*mC | | | | |
| tgRNA | mG*mU*mA*rArCrGrGrCr | 20928 | 14 | 11 | Sub |
| 34_HB | ArGrArCrUrUrCrUrCrCr | | | | 4 |
| B8hs4 | UrCrGrUrUrUrUrArGrAm | | | | |
| | GmCmUmAmGmAmAmAmUmAm | | | | |
| | GmCrArArGrUrUrArArAr | | | | |
| | ArUrArArGrGrCrUrArGr | | | | |
| | UrCrCrGrUrUrArUrCrAm | | | | |
| | AmCmUmUmGmAmAmAmAmAm | | | | |
| | GmUmGmGmCmAmCmCmGmAm | | | | |
| | GmUmCmGmGmUmGmCrArCr | | | | |
| | CrUrGrArCrUrCrCrCrGr | | | | |
| | CrArGrArGrArArGrUrC* | | | | |
| | mU*mG*mC | | | | |
| tg34_ | mG*mU*mA*rArCrGrGrCr | 20929 | 14 | 11 | Sub |
| HBB8h | ArGrArCrUrUrCrUrCrCr | | | | 5 |
| s5 | UrCrGrUrUrUrUrArGrAm | | | | |
| | GmCmUmAmGmAmAmAmUmAm | | | | |
| | GmCrArArGrUrUrArArAr | | | | |
| | ArUrArArGrGrCrUrArGr | | | | |
| | UrCrCrGrUrUrArUrCrAm | | | | |
| | AmCmUmUmGmAmAmAmAmAm | | | | |
| | GmUmGmGmCmAmCmCmGmAm | | | | |
| | GmUmCmGmGmUmGmCrArCr | | | | |
| | CrUrGrArCrUrCrCrArGr | | | | |
| | CrArGrArGrArArGrUrC* | | | | |
| | mU*mG*mC | | | | |
| tg34_ | mG*mU*mA*rArCrGrGrCr | 20930 | 14 | 11 | Sub |
| HBB8h | ArGrArCrUrUrCrUrCrCr | | | | 6 |
| s6 | UrCrGrUrUrUrUrArGrAm | | | | |
| | GmCmUmAmGmAmAmAmUmAm | | | | |
| | GmCrArArGrUrUrArArAr | | | | |
| | ArUrArArGrGrCrUrArGr | | | | |
| | UrCrCrGrUrUrArUrCrAm | | | | |
| | AmCmUmUmGmAmAmAmAmAm | | | | |
| | GmUmGmGmCmAmCmCmGmAm | | | | |
| | GmUmCmGmGmUmGmCrArCr | | | | |
| | CrUrGrArCrUrCrCrGrGr | | | | |
| | CrArGrArGrArArGrUrC* | | | | |
| | mU*mG*mC | | | | |
| tg34_ | mG*mU*mA*rArCrGrGrCr | 20931 | 14 | 11 | Sub |
| HBB8h | ArGrArCrUrUrCrUrCrCr | | | | 7 |
| s7 | UrCrGrUrUrUrUrArGrAm | | | | |
| | GmCmUmAmGmAmAmAmUmAm | | | | |
| | GmCrArArGrUrUrArArAr | | | | |
| | ArUrArArGrGrCrUrArGr | | | | |
| | UrCrCrGrUrUrArUrCrAm | | | | |
| | AmCmUmUmGmAmAmAmAmAm | | | | |
| | GmUmGmGmCmAmCmCmGmAm | | | | |
| | GmUmCmGmGmUmGmCrArCr | | | | |
| | CrUrGrArCrUrCrCrCrGr | | | | |
| | CrUrGrArGrArArGrUrC* | | | | |
| | mU*mG*mC | | | | |
| tg34_ | mG*mU*mA*rArCrGrGrCr | 20932 | 14 | 11 | Sub |
| HBB8h | ArGrArCrUrUrCrUrCrCr | | | | 8 |
| s8 | UrCrGrUrUrUrUrArGrAm | | | | |
| | GmCmUmAmGmAmAmAmUmAm | | | | |
| | GmCrArArGrUrUrArArAr | | | | |
| | ArUrArArGrGrCrUrArGr | | | | |
| | UrCrCrGrUrUrArUrCrAm | | | | |
| | AmCmUmUmGmAmAmAmAmAm | | | | |
| | GmUmGmGmCmAmCmCmGmAm | | | | |
| | GmUmCmGmGmUmGmCrArCr | | | | |
| | CrUrGrArCrUrCrCrArGr | | | | |
| | CrUrGrArGrArArGrUrC* | | | | |
| | mU*mG*mC | | | | |
| tg34_ | mG*mU*mA*rArCrGrGrCr | 20933 | 14 | 11 | Sub |
| HBB8h | ArGrArCrUrUrCrUrCrCr | | | | 9 |
| s9 | UrCrGrUrUrUrUrArGrAm | | | | |
| | GmCmUmAmGmAmAmAmUmAm | | | | |
| | GmCrArArGrUrUrArArAr | | | | |
| | ArUrArArGrGrCrUrArGr | | | | |
| | UrCrCrGrUrUrArUrCrAm | | | | |
| | AmCmUmUmGmAmAmAmAmAm | | | | |
| | GmUmGmGmCmAmCmCmGmAm | | | | |
| | GmUmCmGmGmUmGmCrArCr | | | | |
| | CrUrGrArCrUrCrCrGrGr | | | | |
| | CrUrGrArGrArArGrUrC* | | | | |
| | mU*mG*mC | | | | |
| tg34_ | mG*mU*mA*rArCrGrGrCr | 20934 | 14 | 11 | sub |
| HBB8h | ArGrArCrUrUrCrUrCrCr | | | | 10 |
| s10 | UrCrGrUrUrUrUrArGrAm | | | | |
| | GmCmUmAmGmAmAmAmUmAm | | | | |
| | GmCrArArGrUrUrArArAr | | | | |
| | ArUrArArGrGrCrUrArGr | | | | |
| | UrCrCrGrUrUrArUrCrAm | | | | |
| | AmCmUmUmGmAmAmAmAmAm | | | | |
| | GmUmGmGmCmAmCmCmGmAm | | | | |
| | GmUmCmGmGmUmGmCrArCr | | | | |
| | CrUrGrArCrUrCrCrCrGr | | | | |
| | CrCrGrArGrArArGrUrC* | | | | |
| | mU*mG*mC | | | | |
| tg34_ | mG*mU*mA*rArCrGrGrCr | 20935 | 14 | 11 | sub |
| HBB8h | ArGrArCrUrUrCrUrCrCr | | | | 11 |
| s11 | UrCrGrUrUrUrUrArGrAm | | | | |
| | GmCmUmAmGmAmAmAmUmAm | | | | |
| | GmCrArArGrUrUrArArAr | | | | |
| | ArUrArArGrGrCrUrArGr | | | | |
| | UrCrCrGrUrUrArUrCrAm | | | | |
| | AmCmUmUmGmAmAmAmAmAm | | | | |
| | GmUmGmGmCmAmCmCmGmAm | | | | |
| | GmUmCmGmGmUmGmCrArCr | | | | |
| | CrUrGrArCrUrCrCrArGr | | | | |
| | CrCrGrArGrArArGrUrC* | | | | |
| | mU*mG*mC | | | | |
| tg34_ | mG*mU*mA*rArCrGrGrCr | 20936 | 14 | 11 | sub |
| HBB8h | ArGrArCrUrUrCrUrCrCr | | | | 12 |
| s12 | UrCrGrUrUrUrUrArGrAm | | | | |
| | GmCmUmAmGmAmAmAmUmAm | | | | |
| | GmCrArArGrUrUrArArAr | | | | |
| | ArUrArArGrGrCrUrArGr | | | | |
| | UrCrCrGrUrUrArUrCrAm | | | | |
| | AmCmUmUmGmAmAmAmAmAm | | | | |
| | GmUmGmGmCmAmCmCmGmAm | | | | |
| | GmUmCmGmGmUmGmCrArCr | | | | |
| | CrUrGrArCrUrCrCrGrGr | | | | |
| | CrGrGrArGrArArGrUrC* | | | | |
| | mU*mG*mC | | | | |
| tg34_ | mG*mU*mA*rArCrGrGrCr | 20937 | 14 | 11 | sub |
| HBB8h | ArGrArCrUrUrCrUrCrCr | | | | 13 |
| s13 | UrCrGrUrUrUrUrArGrAm | | | | |
| | GmCmUmAmGmAmAmAmUmAm | | | | |
| | GmCrArArGrUrUrArArAr | | | | |
| | ArUrArArGrGrCrUrArGr | | | | |
| | UrCrCrGrUrUrArUrCrAm | | | | |
| | AmCmUmUmGmAmAmAmAmAm | | | | |
| | GmUmGmGmCmAmCmCmGmAm | | | | |
| | GmUmCmGmGmUmGmCrArCr | | | | |
| | CrUrGrArCrUrCrCrCrGr | | | | |
| | CrGrGrArGrArArGrUrC* | | | | |
| | mU*mG*mC | | | | |
| tg34_ | mG*mU*mA*rArCrGrGrCr | 20938 | 14 | 11 | sub |
| HBB8h | ArGrArCrUrUrCrUrCrCr | | | | 14 |
| s14 | UrCrGrUrUrUrUrArGrAm | | | | |
| | GmCmUmAmGmAmAmAmUmAm | | | | |
| | GmCrArArGrUrUrArArAr | | | | |
| | ArUrArArGrGrCrUrArGr | | | | |
| | UrCrCrGrUrUrArUrCrAm | | | | |
| | AmCmUmUmGmAmAmAmAmAm | | | | |
| | GmUmGmGmCmAmCmCmGmAm | | | | |
| | GmUmCmGmGmUmGmCrArCr | | | | |
| | CrUrGrArCrUrCrCrArGr | | | | |
| | CrGrGrArGrArArGrUrC* | | | | |
| | mU*mG*mC | | | | |

[1015] Table X³A shows the sequences of X³ without modifications. In some embodiments, the sequences used in this table can be used without chemical modifications.

TABLE X3A
Table X3 Sequences without Modifications

| | | SEQ ID |
|---|---|---|
| Name | Sequence | NO |
| tg34 | GUAACGGCAGACUUCUCCUCGUUUU | 21876 |
| | AGAGCUAGAAAUAGCAAGUUAAAAU | |
| | AAGGCUAGUCCGUUAUCAACUUGAA | |
| | AAAGUGGCACCGAGUCGGUGCACCU | |
| | GACUCCUGCGGAGAAGUCUGC | |
| tg34_ | GUAACGGCAGACUUCUCCUCGUUUU | 21877 |
| HBB8hs | AGAGCUAGAAAUAGCAAGUUAAAAU | |
| | AAGGCUAGUCCGUUAUCAACUUGAA | |
| | AAAGUGGCACCGAGUCGGUGCACCU | |
| | GACUCCGGCCGAGAAGUCUGC | |
| tg34_ | GUAACGGCAGACUUCUCCUCGUUUU | 21878 |
| HBB8hs1 | AGAGCUAGAAAUAGCAAGUUAAAAU | |
| | AAGGCUAGUCCGUUAUCAACUUGAA | |
| | AAAGUGGCACCGAGUCGGUGCACCU | |
| | GACUCCUGCAGAGAAGUCUGC | |
| tg34_ | GUAACGGCAGACUUCUCCUCGUUUU | 21879 |
| HBB8hs2 | AGAGCUAGAAAUAGCAAGUUAAAAU | |
| | AAGGCUAGUCCGUUAUCAACUUGAA | |
| | AAAGUGGCACCGAGUCGGUGCACCU | |
| | GACUCCUGCUGAGAAGUCUGC | |
| tg34_ | GUAACGGCAGACUUCUCCUCGUUUU | 21880 |
| HBB8hs3 | AGAGCUAGAAAUAGCAAGUUAAAAU | |
| | AAGGCUAGUCCGUUAUCAACUUGAA | |
| | AAAGUGGCACCGAGUCGGUGCACCU | |
| | GACUCCUGCCGAGAAGUCUGC | |
| tgRNA34_ | GUAACGGCAGACUUCUCCUCGUUUU | 21881 |
| HBB8hs4 | AGAGCUAGAAAUAGCAAGUUAAAAU | |
| | AAGGCUAGUCCGUUAUCAACUUGAA | |
| | AAAGUGGCACCGAGUCGGUGCACCU | |
| | GACUCCCGCAGAGAAGUCUGC | |
| tg34_ | GUAACGGCAGACUUCUCCUCGUUUU | 21882 |
| HBB8hs5 | AGAGCUAGAAAUAGCAAGUUAAAAU | |
| | AAGGCUAGUCCGUUAUCAACUUGAA | |
| | AAAGUGGCACCGAGUCGGUGCACCU | |
| | GACUCCAGCAGAGAAGUCUGC | |
| tg34_ | GUAACGGCAGACUUCUCCUCGUUUU | 21883 |
| HBB8hs6 | AGAGCUAGAAAUAGCAAGUUAAAAU | |
| | AAGGCUAGUCCGUUAUCAACUUGAA | |
| | AAAGUGGCACCGAGUCGGUGCACCU | |
| | GACUCCGGCAGAGAAGUCUGC | |
| tg34_ | GUAACGGCAGACUUCUCCUCGUUUU | 21884 |
| HBB8hs7 | AGAGCUAGAAAUAGCAAGUUAAAAU | |
| | AAGGCUAGUCCGUUAUCAACUUGAA | |
| | AAAGUGGCACCGAGUCGGUGCACCU | |
| | GACUCCCGCUGAGAAGUCUGC | |
| tg34_ | GUAACGGCAGACUUCUCCUCGUUUU | 21885 |
| HBB8hs8 | AGAGCUAGAAAUAGCAAGUUAAAAU | |
| | AAGGCUAGUCCGUUAUCAACUUGAA | |
| | AAAGUGGCACCGAGUCGGUGCACCU | |
| | GACUCCAGCUGAGAAGUCUGC | |
| tg34_ | GUAACGGCAGACUUCUCCUCGUUUU | 21886 |
| HBB8hs9 | AGAGCUAGAAAUAGCAAGUUAAAAU | |
| | AAGGCUAGUCCGUUAUCAACUUGAA | |
| | AAAGUGGCACCGAGUCGGUGCACCU | |
| | GACUCCGGCUGAGAAGUCUGC | |
| tg34_ | GUAACGGCAGACUUCUCCUCGUUUU | 21887 |
| HBB8hs10 | AGAGCUAGAAAUAGCAAGUUAAAAU | |
| | AAGGCUAGUCCGUUAUCAACUUGAA | |
| | AAAGUGGCACCGAGUCGGUGCACCU | |
| | GACUCCCGCCGAGAAGUCUGC | |
| tg34_ | GUAACGGCAGACUUCUCCUCGUUUU | 21888 |
| HBB8hs11 | AGAGCUAGAAAUAGCAAGUUAAAAU | |
| | AAGGCUAGUCCGUUAUCAACUUGAA | |
| | AAAGUGGCACCGAGUCGGUGCACCU | |
| | GACUCCAGCCGAGAAGUCUGC | |
| tg34_ | GUAACGGCAGACUUCUCCUCGUUUU | 21889 |
| HBB8hs12 | AGAGCUAGAAAUAGCAAGUUAAAAU | |
| | AAGGCUAGUCCGUUAUCAACUUGAA | |
| | AAAGUGGCACCGAGUCGGUGCACCU | |
| | GACUCCGGCGGAGAAGUCUGC | |
| tg34_ | GUAACGGCAGACUUCUCCUCGUUUU | 21890 |
| HBB8hs13 | AGAGCUAGAAAUAGCAAGUUAAAAU | |
| | AAGGCUAGUCCGUUAUCAACUUGAA | |
| | AAAGUGGCACCGAGUCGGUGCACCU | |
| | GACUCCCGCGGAGAAGUCUGC | |
| tg34_ | GUAACGGCAGACUUCUCCUCGUUUU | 21891 |
| HBB8hs14 | AGAGCUAGAAAUAGCAAGUUAAAAU | |
| | AAGGCUAGUCCGUUAUCAACUUGAA | |
| | AAAGUGGCACCGAGUCGGUGCACCU | |
| | GACUCCAGCGGAGAAGUCUGC | |

[1016] The gene modifying polypeptides used comprised the sequence set out in Example 8 labeled RNAV209.

[1017] The gene modifying system comprising the gene modifying polypeptides and the template RNA described above was transfected into human HSCs. The gene modifying polypeptide and the template RNA were delivered by nucleofection in RNA format. Specifically, 3000 ng of mRNA encoding the gene modifying polypeptide were combined with 3000 ng template RNA. The RNA mixture was added to 200,000 primary human HSCs in a total of 20 μL of Lonza P3 buffer and HSC were nucleofected in 16-well nucleofection cassettes using program DZ-100. After nucleofection, cells incubated at room temperature for 10 minutes and were transferred to 24-well plates containing 500 μL of StemSpan-XF+SCF at 100 ng/ml, Flt3-L at 100 ng/ml, and TPO at 100 ng/ml in each well and cultured at 37° C., 5% CO₂ for 3 days prior to cell lysis and genomic DNA extraction. To analyze gene editing activity, primers flanking the target insertion site locus were used to amplify across the locus. Amplicons were analyzed via short read sequencing using an Illumina MiSeq. Replacement of the DNA bases adenine at nucleotide positions 20 to the base cytosine (HBB8 template RNA) plus the inclusion of the expected silent substitutions downstream of the transcriptional start site within the endogenous B-globin locus indicated successful editing.

[1018] As shown in FIG. 19B, average perfect rewrite levels of 0.1%-13.1%, corresponding to replacement of adenine and guanine at nucleotide positions 20 and 21 to the bases cytosine and adenine (respectively) at the SCD codon, were detected in primary human HSCs when the HSCs were treated with exemplary gene modifying systems comprising exemplary HBB8 template RNAs containing various silent substitutions. These results further demonstrate that introducing silent substitutions within an exemplary template gRNA increases editing activity of a gene modifying system comprising said template RNAs more than 9-fold when targeting a clinically relevant codon in the endogenous B-globin locus in primary human HSCs. The results further demonstrate that adjusting the identity or identities of the silent substitution(s) can increase the enhancement to editing activity.

### Example 16: Evaluating the Effect of Second Strand-Targeting gRNA and Silent Substitution on Activity of a Gene Modifying Polypeptide and Template RNA for Editing the Endogenous B-Globin Locus Achieved in CD34+Primary Human Hematopoietic Stem Cells (HSCs)

[1019] This example demonstrates the use of a gene modifying system containing or not containing a variety of second strand-targeting gRNAs, an exemplary gene modifying polypeptide, and a template RNA, to convert the glutamic acid codon at amino acid position 7 in the endogenous B-globin locus in primary human HSCs to alanine, thereby rewriting a non-pathogenic sequence into position 7. This conversion comprises a change of 2 base pairs for exemplary HBB5 template RNAs (i.e., replacement of the DNA bases thymidine, adenine and guanine at nucleotide positions 18, 20 and 21 to the bases guanine, cytosine and adenine). For exemplary HBB8 template RNAs, the conversion comprises the change of the DNA bases thymidine and adenine at nucleotide positions 18 and 20 to the bases cytosine and cytosine (e.g., using template RNA tg34_HBB8_hs13) or replacement of DNA bases thymidine, adenine and guanine at nucleotide positions 18, 20, 21 to the bases cytosine, cytosine and cytosine, respectively (e.g., using tg34_HBB8_hs10). This Example demonstrates the editing using systems comprising a variety of second strand-targeting gRNAs with: an exemplary HBB5 template RNA comprising a silent substitution (FIG. 20A), or either of two exemplary HBB8 template RNAs each comprising a different silent substitution (FIG. 20B).

[1020] In this example, the template RNA contained:
[1021] (1) a gRNA spacer;
[1022] (2) a gRNA scaffold;
[1023] (3) a heterologous object sequence; and
[1024] (4) a primer binding site (PBS) sequence.

[1025] More specifically, the template RNAs comprised the sequences set out in Example 14 labeled tg14_hs1 or Example 15 labeled tg34_HBB8hs10 and tg34_HBB8hs13.

[1026] The system further comprised a second strand-targeting gRNA comprising a sequence in Table X¹.

[1027] The gene modifying polypeptides tested comprised the sequence set out in Example 8 labeled RNAV209.

[1028] The gene modifying system comprising the gene modifying polypeptides and the template RNA described above was transfected into human HSCs. The gene modifying polypeptide and the template RNA were delivered by nucleofection in RNA format. Specifically, 3000 ng of mRNA encoding the gene modifying polypeptide were combined with 3000 ng template RNA with or without 2000 ng of second strand-targeting gRNA. The RNA mixture was added to 200,000 primary human HSCs in a total of 20 μL of Lonza P3 buffer and HSC were nucleofected in 16-well nucleofection cassettes using program DZ-100. After nucleofection, cells incubated at room temperature for 10 minutes and were transferred to 24-well plates containing 500 μL of StemSpan-XF+SCF at 100 ng/mL, Flt3-L at 100 ng/mL, and TPO at 100 ng/ml in each well and cultured at 37° ° C., 5% CO₂ for 3 days prior to cell lysis and genomic DNA extraction. To analyze gene editing activity, primers flanking the target insertion site locus were used to amplify across the locus. Amplicons were analyzed via short read sequencing using an Illumina MiSeq. Replacement of the DNA bases thymidine, adenine and guanine at nucleotide positions 18, 20 and 21 to the bases guanine, cytosine and adenine indicates successful editing for HBB5 spacer. Replacement thymidine and adenine at nucleotide positions 18 and 20 to the bases cytosine and cytosine (tg34_HBB8_hs13) or replacement of DNA bases thymidine, adenine and guanine at nucleotide positions 18, 20, 21 to the bases cytosine, cytosine and cytosine, respectively (tg34_HBB8_hs10) indicated successful editing for HBB8 spacer.

[1029] FIG. 20A shows a graph of editing % in HSCs treated with gene modifying systems comprising the exemplary HBB5 template RNA tg14_hs1 (comprising an exemplary silent substitution) with or without various second strand-targeting gRNAs. The results demonstrate the additive effect of second strand-targeting gRNAs with template gRNAs for HBB5 template RNAs containing silent substitutions for rewriting of a non-pathogenic sequence into a clinically relevant codon in the endogenous B-globin locus.

[1030] FIG. 20B shows a graph of editing % in HSCs treated with gene modifying systems comprising either of two exemplary HBB8 template RNAs, tg34_hs13 or tg34_hs10 (each comprising a different exemplary silent substitution) with or without various second strand-targeting gRNAs. The results further demonstrate the additive effect of second strand-targeting gRNAs with template gRNAs for HBB8 template RNAs containing silent substitutions for rewriting of a non-pathogenic sequence into a clinically relevant codon in the endogenous B-globin locus.

### Example 17: Evaluating the Effect of Second Strand-Targeting gRNA and Silent Substitution on Activity of a Gene Modifying Polypeptide and Template RNA for Editing the Endogenous B-Globin Locus Achieved in CD34+Primary Human Hematopoietic Stem Cells (HSCs)

[1031] This example demonstrates the use of a gene modifying system containing or not containing a second strand-targeting gRNA, an exemplary gene modifying polypeptide and various template RNAs (some comprising a silent substitution), to convert the glutamic acid codon at amino acid position 7 in the endogenous B-globin locus in primary human HSCs to alanine, thereby demonstrating targeting the sequence position associated with sickle cell disease (SCD) and editing of the sequence to encode a non-pathogenic sequence into position 7. This conversion comprises a change of 2 base pairs for exemplary HBB5 template RNAs (i.e., replacement of the DNA bases adenine and guanine at nucleotide positions 20 and 21 to the bases cytosine and adenine) plus or minus the additional replacement of thymidine to guanine at nucleotide position 18 (silent substitution).

[1032] In this example, the template RNA contained:
[1033] (1) a gRNA spacer;
[1034] (2) a gRNA scaffold;
[1035] (3) a heterologous object sequence; and
[1036] (4) a primer binding site (PBS) sequence.

[1037] More specifically, the template RNAs comprised the sequences the sequence set out in Example 14 labeled tg14h, tg14_hs1, tg19h or tg19_hs1.

[1038] The system further comprised a gRNA sequence designed to produce a second nick, wherein the gRNA has the sequence labeled HBB5_g37 in Table X¹.

[1039] The gene modifying polypeptides tested comprised the sequence set out in Example 8 labeled RNAV209.

[1040] The gene modifying system comprising the gene modifying polypeptides and the template RNA described above was transfected into human HSCs. The gene modifying polypeptide and the template RNA were delivered by nucleofection in RNA format. Specifically, 3000 ng of mRNA encoding the gene modifying polypeptide were combined with 2000 ng template RNA with or without 2000 ng of second strand-targeting gRNA. The RNA mixture was added to 200,000 primary human HSCs in a total of 20 μL of Lonza P3 buffer and cells were nucleofected in 16-well nucleofection cassettes using program DZ-100. After nucleofection, cells incubated at room temperature for 10 minutes and were transferred to 24-well plates containing 500 μL of StemSpan-XF+SCF at 100 ng/ml, Flt3-L at 100 ng/ml, and TPO at 100 ng/ml and cultured at 37° ° C., 5% CO₂ for 3 days prior to cell lysis and genomic DNA extraction. To analyze gene editing activity, primers flanking the target insertion site locus were used to amplify across the locus. Amplicons were analyzed via short read sequencing using an Illumina MiSeq. Replacement of the DNA bases adenine and guanine at nucleotide positions 20 and 21 to the bases cytosine and adenine (tg14h or tg19h) or replacement of DNA bases thymidine, adenine and guanine at nucleotide positions 18, 20, 21 to the bases guanine, cytosine, adenine, respectively (tg14_hs1 or tg19_hs1), downstream of the transcriptional start site within the endogenous B-globin locus indicated successful editing.

[1041] As shown in FIG. 20C, average perfect rewrite levels of 1.8% and 3.4%, corresponding to replacement of adenine and guanine at nucleotide positions 20 and 21 to the bases cytosine and adenine (respectively) at the SCD codon, were detected in human HSCs when the HSCs were treated with exemplary gene modifying systems comprising exemplary HBB5 template RNAs tg14h or tg19h and no second strand-targeting gRNA was added. Inclusion of the hs1 silent substitution in the template gRNA (tg14_hs1 or tg19_hs1) increased perfect rewriting to 9.1% and 6.3%.

[1042] Addition of a second strand-targeting gRNA increased average perfect rewriting to 17.1% for tg14h and 30.2% for tg14_hs1. Similarly, addition of a second strand-targeting gRNA resulted in average perfect rewriting to 20.2% for tg19h and 32.2% for tg19_hs1.

[1043] These results demonstrate that silent substitutions and second strand-targeting gRNAs can individually increase editing activity of gene modifying systems, and further show the additive effect of the second strand-targeting gRNA and silent substitutions within an exemplary HBB5 template RNA. The results show a cumulative increase in editing activity of more than 20-fold when using both a silent substitution and second strand-targeting gRNA in primary human HSCs to write a non-pathogenic sequence into a clinically relevant codon in the endogenous B-globin locus.

### Example 18: Evaluating Impact of a Gene Modifying Systems Editing the Endogenous B-Globin Locus on Stemness Markers in CD34+Primary Human Hematopoietic Stem Cells (HSCs)

[1044] This example demonstrates that editing using a gene modifying system containing an exemplary gene modifying polypeptide and a template RNA with or without a second strand-targeting gRNA to convert the glutamic acid codon at amino acid position 7 in the endogenous B-globin locus in primary human HSCs to alanine does not significantly affect the levels of stem cell markers and proportions of cell marker-characterized sub-populations.

[1045] In this example, the template RNA contained:
[1046] (1) a gRNA spacer;
[1047] (2) a gRNA scaffold;
[1048] (3) a heterologous object sequence; and
[1049] (4) a primer binding site (PBS) sequence.

[1050] More specifically, the template RNA comprised the nucleic acid sequences set out in Example 5 labeled FYF tgRNA14.

[1051] The system further comprised a second strand-targeting gRNA sequence designed to produce a second nick, wherein the gRNA has the sequence labeled HBB5 g37 in Table X¹.

[1052] The gene modifying polypeptides tested comprised the amino acid sequence set out in Example 8 labeled RNAV209.

[1053] The gene modifying system comprising the gene modifying polypeptides and the template RNA described above was transfected into human HSCs. The gene modifying polypeptide and the template RNA were delivered by nucleofection in RNA format. Specifically, 3000 ng of mRNA encoding the gene modifying polypeptide were combined with 2000 ng template RNA with or without 2000 ng of second strand-targeting gRNA. The RNA mixture was added to 200,000 primary human HSCs in a total of 20 μL of Lonza P3 buffer and cells were nucleofected in 16-well nucleofection cassettes using program DZ-100. After nucleofection, cells incubated at room temperature for 10 minutes and were transferred to 24-well plates containing 500 μL of StemSpan-XF+SCF at 100 ng/mL, Flt3-L at 100 ng/ml, and TPO at 100 ng/ml and cultured at 37° C., 5% CO₂ for 3 days prior to cell lysis and genomic DNA extraction. To analyze gene editing activity, primers flanking the target insertion site locus were used to amplify across the locus. Amplicons were analyzed via short read sequencing using an Illumina MiSeq. Replacement of the DNA bases adenine and guanine at nucleotide positions 20 and 21 to the bases cytosine and adenine, respectively, downstream of the transcriptional start site within the endogenous B-globin locus indicated successful editing. To analyze cell surface markers representative of different HSCs subpopulations, cells were stained with fluorescently labeled anti human CD90, CD133, CD34 antibodies and analyzed by flow cytometry 3 days after nucleofection.

[1054] As shown in FIG. 21A, editing activity levels of 6.3% and 34.4%, corresponding to replacement of adenine and guanine at nucleotide positions 20 and 21 to the bases cytosine and adenine (respectively) at the SCD codon, were detected in the human HSCs when the HSCs were treated with exemplary gene editing polypeptide combined with template guide RNA tg14 without or with a second strand-targeting gRNA, respectively. Analysis of the distribution of hematopoietic subpopulations (CD34+CD133+CD90+, a combination of markers enriched in HSC with long term reconstitution potential; CD34+CD133+CD90-, a combination of markers enriched in early progenitors; CD34+CD133-, a combination of markers enriched in committed progenitors; CD34-, the absence of which is enriched in differentiated cells) revealed no skewing of subpopulation proportions when comparing samples treated with exemplary gene modifying systems (with or without the addition of a second strand-targeting gRNA) to a mock treated control (FIG. 21B).

[1055] These results demonstrate that editing that introduces a non-pathogenic sequence into a clinically relevant codon in the endogenous B-globin locus does not affect the phenotype of primary human HSC, and specifically does not affect markers indicative of differentiation potential in HSCs.

### Example 19: Evaluating Editing of Long-Term Reconstitution Capable HSC Subpopulations Using a Gene Modifying Polypeptide and Template RNA for Editing the Endogenous B-Globin Locus Achieved

[1056] This example demonstrates that editing using a gene modifying system containing an exemplary gene modifying polypeptide and a template RNA and a second strand-targeting gRNA to convert the glutamic acid codon (GAG) at amino acid position 7 in the endogenous B-globin locus in primary human HSCs to alanine (GCA or GCG) effectively targets HSC subpopulations associated with long term reconstitution as well as other subpopulations, thereby rewriting a non-pathogenic sequence into position 7 into stem cells having longevity and differentiation potential. This conversion comprises a change of two base pairs for exemplary HBB5 template RNAs (i.e., replacement of the DNA bases adenine and guanine at nucleotide positions 20 and 21 to the bases cytosine and adenine, respectively) and the change of one base pair for exemplary HBB8 template RNAs (i.e., replacement of the DNA bases adenine at nucleotide positions 20 to the base cytosine).

[1057] In this example, the template RNA contained:
[1058] (1) a gRNA spacer;
[1059] (2) a gRNA scaffold;
[1060] (3) a heterologous object sequence; and
[1061] (4) a primer binding site (PBS) sequence.

[1062] The template RNAs comprised the sequence set out in Example 5 labeled FYF tgRNA14 for HBB5 template RNA or tgRNA34 for HBB8 template RNA, respectively.

[1063] The gene modifying polypeptides tested comprised the sequence set out in Example 8 labeled RNAV209.

[1064] The system further comprised a second strand-targeting gRNA comprising the sequence listed in Table X¹ as HBB5_g37 and HBB8_256 fw.

[1065] The gene modifying system comprising the gene modifying polypeptides and the template RNA described above was transfected into human HSCs. The gene modifying polypeptide and the template RNA were delivered by nucleofection in RNA format. Specifically, 3000 ng of mRNA encoding the gene modifying polypeptide were combined with 2000 ng template RNA with or without 2000 ng of second strand-targeting gRNA. The RNA mixture was added to 200,000 primary human HSCs in a total of 20 μL of Lonza P3 buffer and cells were nucleofected in 16-well nucleofection cassettes using program DZ-100. After nucleofection, cells incubated at room temperature for 10 minutes and were transferred to 24-well plates containing 500 μL of StemSpan-XF+SCF at 100 ng/ml, Flt3-L at 100 ng/mL, and TPO at 100 ng/ml and cultured at 37° C., 5% CO₂. 3 days after nucleofection, cells were stained with fluorescently labeled anti human CD90, CD133, CD34 antibodies and CD34+CD133+CD90+ and CD34+CD133+CD90− fraction were FACS-sorted and subjected to cell lysis and genomic DNA extraction. To analyze gene editing activity, primers flanking the target insertion site locus were used to amplify across the locus. Amplicons were analyzed via short read sequencing using an Illumina MiSeq. Replacement of the DNA bases adenine and guanine at nucleotide positions 20 and 21 to the bases cytosine and adenine (HBB5 template RNA) or replacement of the DNA bases adenine at nucleotide positions 20 to the base cytosine (HBB8 template RNA) downstream of the transcriptional start site within the endogenous B-globin locus indicated successful editing.

[1066] As shown in FIG. 22A, editing activity levels of 19.3% and 29.8% were detected in the CD34+CD133+CD90+HSC subpopulation after treatment with gene modifying systems comprising HBB5 template RNA or HBB8 template RNA, respectively. CD34+CD133+CD90+ cells are enriched in HSCs with long term reconstitution potential. Editing activity levels of 23.73% and 31.5% were detected in all the rest of the HSC population (not CD34+CD133+CD90+) treated with the same exemplary gene modifying systems comprising HBB5 template RNAs and HBB8 template RNAs, respectively. The experiment was repeated using the exemplary HBB5 template RNA tg14_hs1 (Table X¹) and a second strand-targeting gRNA (FIG. 22B), and the results showed editing activity of 56% in the CD34+CD133+90+HSC-enriched fraction and 52.9% in the CD34+90− progenitors enriched fraction. This result showed that the addition of silent substitutions to a template RNA (compare tg14_hs1 in FIG. 22B to FYF tgRNA14 in FIG. 22A) significantly increases the editing activity of a gene modifying system when used in long-term primary human HSCs.

[1067] These results demonstrate that the editing activity of exemplary gene modifying systems can write a non-pathogenic sequence into a clinically relevant codon in the endogenous B-globin locus in phenotypically long-term primary human HSCs. The results further demonstrate that the editing activity levels in the phenotypically long-term primary human HSCs were comparable to the levels achieved in the rest of the HSC population. The results further demonstrate a high level of editing (greater than 50%) in long-term and progenitor HSCs.

### Example 20: Evaluating the Impact on Differentiation Ability of Using a Gene Editing Polypeptide and Template RNA for Rewriting the Endogenous B-Globin Locus of CD34+Primary Human Hematopoietic Stem Cells (HSCs)

[1068] This example demonstrates that editing using a gene modifying system containing an exemplary gene modifying polypeptide and a template RNA with or without a second strand-targeting gRNA to convert the glutamic acid codon (GAG) at amino acid position 7 in the endogenous B-globin locus in primary human HSCs to alanine (GCA or GCG) (thereby rewriting a non-pathogenic sequence into position 7) does not significantly alter the differentiation ability of human HSCs. This conversion comprises a change of two base pairs for exemplary HBB5 template RNA (i.e., replacement of the DNA bases adenine and guanine at nucleotide positions 20 and 21 to the bases cytosine and adenine, respectively).

[1069] In this example, the template RNA contained:
[1070] (1) a gRNA spacer;
[1071] (2) a gRNA scaffold;
[1072] (3) a heterologous object sequence; and
[1073] (4) a primer binding site (PBS) sequence.

[1074] The template RNAs comprised the sequence set out in Example 5 labeled FYF tgRNA14 for HBB5 template RNA.

[1075] The gene modifying polypeptides tested comprised the sequence set out in Example 8 labeled RNAV209.

[1076] The system further comprised a second strand-targeting gRNA comprising the sequence listed in Table X¹ as HBB5_g27.

[1077] The gene modifying system comprising the gene modifying polypeptides and the template RNA described above was transfected into human HSCs. The gene modifying polypeptide and the template RNA were delivered by nucleofection in RNA format. Specifically, 3000 ng of mRNA encoding the gene modifying polypeptide RNA were combined with 2000 ng template RNA with or without 2000 ng of second strand-targeting gRNA. The RNA mixture was added to 200,000 primary human HSCs in a total of 20 μL of Lonza P3 buffer and cells were nucleofected in 16-well nucleofection cassettes using program DZ-100. After nucleofection, cells incubated at room temperature for 10 minutes and were transferred to 24-well plates containing 500 μL of StemSpan-XF+SCF at 100 ng/mL, Flt3-L at 100 ng/ml, and TPO at 100 ng/ml and cultured at 37° C., 5% CO₂. 2 days after nucleofection, cells were cultured in semi-solid Methcult media for colony forming assay.

[1078] To analyze gene editing activity, primers flanking the target insertion site locus were used to amplify across the locus. Amplicons were analyzed via short read sequencing using an Illumina MiSeq. Replacement of the DNA bases adenine and guanine at nucleotide positions 20 and 21 to the bases cytosine and adenine (HBB5 template RNA) downstream of the transcriptional start site within the endogenous B-globin locus indicated successful editing.

[1079] As shown in FIG. 23A, total colony CFU numbers after treating HSCs obtained from 3 different donors with exemplary gene modifying system with or without second strand-targeting gRNA were comparable to total colony CFU numbers when the HSCs received mock treatment. These results demonstrate that treatment with the exemplary gene modifying systems did not significantly decrease the viability of treated HSCs. As shown in FIG. 23B, the numbers of CFU-E, BFU-E, CFU-M, CFU-GM, and CFU-G produced from CD34+ cells transfected with exemplary gene modifying systems after 14 days of clonal growth in methylcellulose were comparable to the corresponding CFU numbers when the CD34+ cells that received mock treatment. FIG. 23C shows a graph of the percent enucleated CD235+ cells after HSCs treated with exemplary gene modifying systems began in vitro differentiation. The results show that HSCs treated with exemplary gene modifying systems produced similar percentages of red blood cell-like cells at a similar rate as mock treated HSCs.

[1080] These results show that editing a non-pathogenic sequence into a clinically relevant codon in the endogenous B-globin locus using exemplary gene modifying systems described herein does not have a significant effect on the differentiation ability of human HSCs.

### Example 21: Screening Configurations of Template RNAs that Correct the SCD Mutation in Human CD34+ Cell with SCD Mutation

[1081] This example describes the use of an exemplary gene modifying system containing a gene modifying polypeptide and template RNAs comprising varied lengths of heterologous object sequences and PBS sequences to identify favorable configurations for correction of the SCD mutation. In this example, a template RNA contains:
[1082] (1) a gRNA spacer;
[1083] (2) a gRNA scaffold;
[1084] (3) a heterologous object sequence; and
[1085] (4) a primer binding site (PBS) sequence.

[1086] The template RNAs were designed to contain 8-17 nucleotide PBS sequences and 9-20 nucleotide heterologous object sequences (Table X4). Template RNAs with two different gRNA exemplary spacer sequences, HBB5 and HBB8, were used to target SCD mutation in CD34+SCD human cells. The heterologous object sequences and PBS sequences were designed to correct the SCD mutation by replacing a “T” nucleotide with an “A” nucleotide (Wildtype) or with a “C” (Makassar installation) at the mutation site using a gene modifying system described herein. Template RNAs were also designed to produce either or both of 1) PAM-kill mutations or 2) one or more silent substitutions.

TABLE X4
Exemplary Template RNAs Designed to ConvertSCD mutation to
Wildtype or Makassar.

| | | SEQ | | | |
|---|---|---|---|---|---|
| | | ID | RT | PBS | WT/ |
| Name | Sequence | NO | length | length | Makassar |
| tg14 | mC*mA*mU*rGrGrUrGrCr | 20939 | 14 | 10 | Makassar |
| _hs1 | ArCrCrUrGrArCrUrCrCr | | | | |
| | UrGrGrUrUrUrUrArGrAm | | | | |
| | GmCmUmAmGmAmAmAmUmAm | | | | |
| | GmCrArArGrUrUrArArAr | | | | |
| | ArUrArArGrGrCrUrArGr | | | | |
| | UrCrCrGrUrUrArUrCrAm | | | | |
| | AmCmUmUmGmAmAmAmAmAm | | | | |
| | GmUmGmGmCmAmCmCmGmAm | | | | |
| | GmUmCmGmGmUmGmCrArGr | | | | |
| | ArCrUrUrCrUrCrUrGrCr | | | | |
| | CrGrGrArGrUrCrArG*mG | | | | |
| | *mU*mG | | | | |
| tg14 | mC*mA*mU*rGrGrUrGrCr | 20940 | 14 | 10 | WT |
| _hs1- | ArCrCrUrGrArCrUrCrCr | | | | |
| SCD- | UrGrGrUrUrUrUrArGrAm | | | | |
| wt | GmCmUmAmGmAmAmAmUmAm | | | | |
| | GmCrArArGrUrUrArArAr | | | | |
| | ArUrArArGrGrCrUrArGr | | | | |
| | UrCrCrGrUrUrArUrCrAm | | | | |
| | AmCmUmUmGmAmAmAmAmAm | | | | |
| | GmUmGmGmCmAmCmCmGmAm | | | | |
| | GmUmCmGmGmUmGmCrArGr | | | | |
| | ArCrUrUrCrUrCrUrUrCr | | | | |
| | CrGrGrArGrUrCrArG*mG | | | | |
| | *mU*mG | | | | |
| tgRN | mG*mU*mA*rArCrGrGrCr | 20941 | 14 | 11 | Makassar |
| A34_ | ArGrArCrUrUrCrUrCrCr | | | | |
| HBB | ArCrGrUrUrUrUrArGrAm | | | | |
| 8h- | GmCmUmAmGmAmAmAmUmAm | | | | |
| SCD- | GmCrArArGrUrUrArArAr | | | | |
| M | ArUrArArGrGrCrUrArGr | | | | |
| | UrCrCrGrUrUrArUrCrAm | | | | |
| | AmCmUmUmGmAmAmAmAmAm | | | | |
| | GmUmGmGmCmAmCmCmGmAm | | | | |
| | GmUmCmGmGmUmGmCrArCr | | | | |
| | CrUrGrArCrUrCrCrUrGr | | | | |
| | CrGrGrArGrArArGrUrC* | | | | |
| | mU*mG*mC | | | | |
| tgRN | mG*mU*mA*rArCrGrGrCr | 20942 | 14 | 11 | WT |
| A34 | ArGrArCrUrUrCrUrCrCr | | | | |
| _HBB | ArCrGrUrUrUrUrArGrAm | | | | |
| 8h- | GmCmUmAmGmAmAmAmUmAm | | | | |
| SCD- | GmCrArArGrUrUrArArAr | | | | |
| wt | ArUrArArGrGrCrUrArGr | | | | |
| | UrCrCrGrUrUrArUrCrAm | | | | |
| | AmCmUmUmGmAmAmAmAmAm | | | | |
| | GmUmGmGmCmAmCmCmGmAm | | | | |
| | GmUmCmGmGmUmGmCrArCr | | | | |
| | CrUrGrArCrUrCrCrUrGr | | | | |
| | ArGrGrArGrArArGrUrC* | | | | |
| | mU*mG*mC | | | | |
| tgRN | mG*mU*mA*rArCrGrGrCr | 20943 | 14 | 11 | Makassar |
| A34 | ArGrArCrUrUrCrUrCrCr | | | | |
| _HBB | ArCrGrUrUrUrUrArGrAm | | | | |
| 8hs4- | GmCmUmAmGmAmAmAmUmAm | | | | |
| MK | GmCrArArGrUrUrArArAr | | | | |
| | ArUrArArGrGrCrUrArGr | | | | |
| | UrCrCrGrUrUrArUrCrAm | | | | |
| | AmCmUmUmGmAmAmAmAmAm | | | | |
| | GmUmGmGmCmAmCmCmGmAm | | | | |
| | GmUmCmGmGmUmGmCrArCr | | | | |
| | CrUrGrArCrUrCrCrCrGr | | | | |
| | CrArGrArGrArArGrUrC* | | | | |
| | mU*mG*mC | | | | |
| tgRN | mG*mU*mA*rArCrGrGrCr | 20944 | 14 | 11 | WT |
| A34 | ArGrArCrUrUrCrUrCrCr | | | | |
| _HBB | ArCrGrUrUrUrUrArGrAm | | | | |
| 8hs4- | GmCmUmAmGmAmAmAmUmAm | | | | |
| WT | GmCrArArGrUrUrArArAr | | | | |
| | ArUrArArGrGrCrUrArGr | | | | |
| | UrCrCrGrUrUrArUrCrAm | | | | |
| | AmCmUmUmGmAmAmAmAmAm | | | | |
| | GmUmGmGmCmAmCmCmGmAm | | | | |
| | GmUmCmGmGmUmGmCrArCr | | | | |
| | CrUrGrArCrUrCrCrCrGr | | | | |
| | ArArGrArGrArArGrUrC* | | | | |
| | mU*mG*mC | | | | |
| tgRN | mG*mU*mA*rArCrGrGrCr | 20945 | 14 | 11 | Makassar |
| A34 | ArGrArCrUrUrCrUrCrCr | | | | |
| _HBB | ArCrGrUrUrUrUrArGrAm | | | | |
| 8hs7- | GmCmUmAmGmAmAmAmUmAm | | | | |
| MK | GmCrArArGrUrUrArArAr | | | | |
| | ArUrArArGrGrCrUrArGr | | | | |
| | UrCrCrGrUrUrArUrCrAm | | | | |
| | AmCmUmUmGmAmAmAmAmAm | | | | |
| | GmUmGmGmCmAmCmCmGmAm | | | | |
| | GmUmCmGmGmUmGmCrArCr | | | | |
| | CrUrGrArCrUrCrCrCrGr | | | | |
| | CrUrGrArGrArArGrUrC* | | | | |
| | mU*mG*mC | | | | |
| tgRN | mG*mU*mA*rArCrGrGrCr | 20946 | 14 | 11 | WT |
| A34 | ArGrArCrUrUrCrUrCrCr | | | | |
| _HBB | ArCrGrUrUrUrUrArGrAm | | | | |
| 8hs7- | GmCmUmAmGmAmAmAmUmAm | | | | |
| WT | GmCrArArGrUrUrArArAr | | | | |
| | ArUrArArGrGrCrUrArGr | | | | |
| | UrCrCrGrUrUrArUrCrAm | | | | |
| | AmCmUmUmGmAmAmAmAmAm | | | | |
| | GmUmGmGmCmAmCmCmGmAm | | | | |
| | GmUmCmGmGmUmGmCrArCr | | | | |
| | CrUrGrArCrUrCrCrCrGr | | | | |
| | ArUrGrArGrArArGrUrC* | | | | |
| | mU*mG*mC | | | | |
| tgRN | mG*mU*mA*rArCrGrGrCr | 20947 | 14 | 11 | Makassar |
| A34 | ArGrArCrUrUrCrUrCrCr | | | | |
| _HBB | ArCrGrUrUrUrUrArGrAm | | | | |
| 8hs10 | GmCmUmAmGmAmAmAmUmAm | | | | |
| -MK | GmCrArArGrUrUrArArAr | | | | |
| | ArUrArArGrGrCrUrArGr | | | | |
| | UrCrCrGrUrUrArUrCrAm | | | | |
| | AmCmUmUmGmAmAmAmAmAm | | | | |
| | GmUmGmGmCmAmCmCmGmAm | | | | |
| | GmUmCmGmGmUmGmCrArCr | | | | |
| | CrUrGrArCrUrCrCrCrGr | | | | |
| | CrCrGrArGrArArGrUrC* | | | | |
| | mU*mG*mC | | | | |
| tgRN | mG*mU*mA*rArCrGrGrCr | 20948 | 14 | 11 | WT |
| A34 | ArGrArCrUrUrCrUrCrCr | | | | |
| _HBB | ArCrGrUrUrUUrArGrAmG | | | | |
| 8hs10 | mCmUmAmGmAmAmAmUmAmG | | | | |
| -WT | mCrArArGrUrUrArArArA | | | | |
| | rUrArArGrGrCrUrArGrU | | | | |
| | rCrCrGrUrUrArUrCrAmA | | | | |
| | mCmUmUmGmAmAmAmAmAmG | | | | |
| | mUmGmGmCmAmCmCmGmAmG | | | | |
| | mUmCmGmGmUmGmCrArCrC | | | | |
| | rUrGrArCrUrCrCrCrGrA | | | | |
| | rCrGrArGrArArGrUrC*m | | | | |
| | U*mG*mC | | | | |
| tgRN | mG*mU*mA*rArCrGrGrCr | 20949 | 14 | 11 | Makassar |
| A34 | ArGrArCrUrUrCrUrCrCr | | | | |
| _HBB | ArCrGrUrUrUrUrArGrAm | | | | |
| 8hs13 | GmCmUmAmGmAmAmAmUmAm | | | | |
| -MK | GmCrArArGrUrUrArArAr | | | | |
| | ArUrArArGrGrCrUrArGr | | | | |
| | UrCrCrGrUrUrArUrCrAm | | | | |
| | AmCmUmUmGmAmAmAmAmAm | | | | |
| | GmUmGmGmCmAmCmCmGmAm | | | | |
| | GmUmCmGmGmUmGmCrArCr | | | | |
| | CrUrGrArCrUrCrCrCrGr | | | | |
| | CrGrGrArGrArArGrUrC* | | | | |
| | mU*mG*mC | | | | |
| tgRN | mG*mU*mA*rArCrGrGrCr | 20950 | 14 | 11 | WT |
| A34 | ArGrArCrUrUrCrUrCrCr | | | | |
| _HBB | ArCrGrUrUrUrUrArGrAm | | | | |
| 8hs13 | GmCmUmAmGmAmAmAmUmAm | | | | |
| -WT | GmCrArArGrUrUrArArAr | | | | |
| | ArUrArArGrGrCrUrArGr | | | | |
| | UrCrCrGrUrUrArUrCrAm | | | | |
| | AmCmUmUmGmAmAmAmAmAm | | | | |
| | GmUmGmGmCmAmCmCmGmAm | | | | |
| | GmUmCmGmGmUmGmCrArCr | | | | |
| | CrUrGrArCrUrCrCrCrGr | | | | |
| | ArGrGrArGrArArGrUrC* | | | | |
| | mU*mG*mC | | | | |
| tg14_ | mC*mA*mU*rGrGrUrGrCr | 20951 | 14 | 10 | WT |
| PAM | ArCrCrUrGrArCrUrCrCr | | | | |
| T_hs | UrGrGrUrUrUrUrArGrAm | | | | |
| 1- | GmCmUmAmGmAmAmAmUmAm | | | | |
| SCD- | GmCrArArGrUrUrArArAr | | | | |
| wt | ArUrArArGrGrCrUrArGr | | | | |
| | UrCrCrGrUrUrArUrCrAm | | | | |
| | AmCmUmUmGmAmAmAmAmAm | | | | |
| | GmUmGmGmCmAmCmCmGmAm | | | | |
| | GmUmCmGmGmUmGmCrArGr | | | | |
| | ArCrUrUrCrUrCrArGrCr | | | | |
| | CrGrGrArGrUrCrArG*mG | | | | |
| | *mU*mG | | | | |
| tg14 | mC*mA*mU*rGrGrUrGrCr | 20952 | 14 | 10 | WT |
| PAM | ArCrCrUrGrArCrUrCrCr | | | | |
| C_hs | UrGrGrUrUrUrUrArGrAm | | | | |
| 1- | GmCmUmAmGmAmAmAmUmAm | | | | |
| SCD- | GmCrArArGrUrUrArArAr | | | | |
| wt | ArUrArArGrGrCrUrArGr | | | | |
| | UrCrCrGrUrUrArUrCrAm | | | | |
| | AmCmUmUmGmAmAmAmAmAm | | | | |
| | GmUmGmGmCmAmCmCmGmAm | | | | |
| | GmUmCmGmGmUmGmCrArGr | | | | |
| | ArCrUrUrCrUrCrGrGrCr | | | | |
| | CrGrGrArGrUrCrArG*mG | | | | |
| | *mU*mG | | | | |

[1087] Table X4A shows the sequences of X4 without modifications. In some embodiments, the sequences used in this table can be used without chemical modifications.

TABLE X4A
Table X4 Sequences without Modifications

| | | SEQ |
|---|---|---|
| Name | Sequence | ID NO |
| tg14_hs1 | CAUGGUGCACCUGACUCCUG | 21892 |
| | GUUUUAGAGCUAGAAAUAGC | |
| | AAGUUAAAAUAAGGCUAGUC | |
| | CGUUAUCAACUUGAAAAAGU | |
| | GGCACCGAGUCGGUGCAGAC | |
| | UUCUCUGCCGGAGUCAGGUG | |
| tg14_hs1- | CAUGGUGCACCUGACUCCUG | 21893 |
| SCD-wt | GUUUUAGAGCUAGAAAUAGC | |
| | AAGUUAAAAUAAGGCUAGUC | |
| | CGUUAUCAACUUGAAAAAGU | |
| | GGCACCGAGUCGGUGCAGAC | |
| | UUCUCUUCCGGAGUCAGGUG | |
| tgRNA34_H | GUAACGGCAGACUUCUCCAC | 21894 |
| BB8h-SCD- | GUUUUAGAGCUAGAAAUAGC | |
| M | AAGUUAAAAUAAGGCUAGUC | |
| | CGUUAUCAACUUGAAAAAGU | |
| | GGCACCGAGUCGGUGCACCU | |
| | GACUCCUGCGGAGAAGUCUG | |
| | C | |
| tgRNA34_H | GUAACGGCAGACUUCUCCAC | 21895 |
| BB8h-SCD- | GUUUUAGAGCUAGAAAUAGC | |
| wt | AAGUUAAAAUAAGGCUAGUC | |
| | CGUUAUCAACUUGAAAAAGU | |
| | GGCACCGAGUCGGUGCACCU | |
| | GACUCCUGAGGAGAAGUCUG | |
| | C | |
| tgRNA34_H | GUAACGGCAGACUUCUCCAC | 21896 |
| BB8hs4-MK | GUUUUAGAGCUAGAAAUAGC | |
| | AAGUUAAAAUAAGGCUAGUC | |
| | CGUUAUCAACUUGAAAAAGU | |
| | GGCACCGAGUCGGUGCACCU | |
| | GACUCCCGCAGAGAAGUCUG | |
| | C | |
| tgRNA34_H | GUAACGGCAGACUUCUCCAC | 21897 |
| BB8hs4-WT | GUUUUAGAGCUAGAAAUAGC | |
| | AAGUUAAAAUAAGGCUAGUC | |
| | CGUUAUCAACUUGAAAAAGU | |
| | GGCACCGAGUCGGUGCACCU | |
| | GACUCCCGAAGAGAAGUCUG | |
| | C | |
| tgRNA34_H | GUAACGGCAGACUUCUCCAC | 21898 |
| BB8hs7-MK | GUUUUAGAGCUAGAAAUAGC | |
| | AAGUUAAAAUAAGGCUAGUC | |
| | CGUUAUCAACUUGAAAAAGU | |
| | GGCACCGAGUCGGUGCACCU | |
| | GACUCCCGCUGAGAAGUCUG | |
| | C | |
| tgRNA34_H | GUAACGGCAGACUUCUCCAC | 21899 |
| BB8hs7-WT | GUUUUAGAGCUAGAAAUAGC | |
| | AAGUUAAAAUAAGGCUAGUC | |
| | CGUUAUCAACUUGAAAAAGU | |
| | GGCACCGAGUCGGUGCACCU | |
| | GACUCCCGAUGAGAAGUCUG | |
| | C | |
| tgRNA34_H | GUAACGGCAGACUUCUCCAC | 21900 |
| BB8hs10- | GUUUUAGAGCUAGAAAUAGC | |
| MK | AAGUUAAAAUAAGGCUAGUC | |
| | CGUUAUCAACUUGAAAAAGU | |
| | GGCACCGAGUCGGUGCACCU | |
| | GACUCCCGCCGAGAAGUCUG | |
| | C | |
| tgRNA34_H | GUAACGGCAGACUUCUCCAC | 21901 |
| BB8hs10- | GUUUUAGAGCUAGAAAUAGC | |
| WT | AAGUUAAAAUAAGGCUAGUC | |
| | CGUUAUCAACUUGAAAAAGU | |
| | GGCACCGAGUCGGUGCACCU | |
| | GACUCCCGACGAGAAGUCUG | |
| | C | |
| tgRNA34_H | GUAACGGCAGACUUCUCCAC | 21902 |
| BB8hs13- | GUUUUAGAGCUAGAAAUAGC | |
| MK | AAGUUAAAAUAAGGCUAGUC | |
| | CGUUAUCAACUUGAAAAAGU | |
| | GGCACCGAGUCGGUGCACCU | |
| | GACUCCCGCGGAGAAGUCUG | |
| | C | |
| tgRNA34_H | GUAACGGCAGACUUCUCCAC | 21903 |
| BB8hs13- | GUUUUAGAGCUAGAAAUAGC | |
| WT | AAGUUAAAAUAAGGCUAGUC | |
| | CGUUAUCAACUUGAAAAAGU | |
| | GGCACCGAGUCGGUGCACCU | |
| | GACUCCCGAGGAGAAGUCUG | |
| | C | |
| tg14_PAMT | CAUGGUGCACCUGACUCCUG | 21904 |
| hs1-SCD- | GUUUUAGAGCUAGAAAUAGC | |
| wt | AAGUUAAAAUAAGGCUAGUC | |
| | CGUUAUCAACUUGAAAAAGU | |
| | GGCACCGAGUCGGUGCAGAC | |
| | UUCUCAGCCGGAGUCAGGUG | |
| tg14_PAMC | CAUGGUGCACCUGACUCCUG | 21905 |
| hs1-SCD- | GUUUUAGAGCUAGAAAUAGC | |
| wt | AAGUUAAAAUAAGGCUAGUC | |
| | CGUUAUCAACUUGAAAAAGU | |
| | GGCACCGAGUCGGUGCAGAC | |
| | UUCUCGGCCGGAGUCAGGUG | |

[1088] Exemplary gene modifying systems comprising mRNA encoding the gene modifying polypeptide and a template RNA from Table X4 with or without second strand-targeting gRNA (e.g., from Table X1) are used to transfect human HSCs harboring the SCD mutation. The gene modifying system is used to correct the SCD mutation by replacing a “T” nucleotide with an “A” (wildtype) or “C” (Makassar) nucleotide at the mutation site in the endogenous B-globin locus in primary human HSCs. Amplicon sequencing will be used to show editing at the mutation site in the endogenous B-globin locus in primary human HSCs.

[1089] The results will show that exemplary gene modifying systems have editing activity when correcting the SCD mutation in the endogenous B-globin locus in primary human HSCs.

[1090] Herein, when an RNA sequence (e.g., a template RNA sequence) is said to comprise a particular sequence (e.g., a sequence of Table A or Table B or a portion thereof) that comprises thymine (T), it is of course understood that the RNA sequence may (and frequently does) comprise uracil (U) in place of T. For instance, the RNA sequence may comprise U at every position shown as T in the sequence in Table A or B. More specifically, the present disclosure provides an RNA sequence according to every template sequence shown in Table A and B, wherein the RNA sequence has a U in place of each T in the sequence of Table A and B.

[1091] It should be understood that for all numerical bounds describing some parameter in this application, such as “about,” “at least,” “less than,” and “more than,” the description also necessarily encompasses any range bounded by the recited values. Accordingly, for example, the description “at least 1, 2, 3, 4, or 5” also describes, inter alia, the ranges 1-2, 1-3, 1-4, 1-5, 2-3, 2-4, 2-5, 3-4, 3-5, and 4-5, et cetera.

[1092] For all patents, applications, or other reference cited herein, such as non-patent literature and reference sequence information, it should be understood that they are incorporated by reference in their entirety for all purposes as well as for the proposition that is recited. Where any conflict exists between a document incorporated by reference and the present application, this application will control. All information associated with reference gene sequences disclosed in this application, such as GeneIDs or accession numbers (typically referencing NCBI accession numbers), including, for example, genomic loci, genomic sequences, functional annotations, allelic variants, and reference mRNA (including, e.g., exon boundaries or response elements) and protein sequences (such as conserved domain structures), as well as chemical references (e.g., PubChem compound, PubChem substance, or PubChem Bioassay entries, including the annotations therein, such as structures and assays, et cetera), are hereby incorporated by reference in their entirety.

[1093] Headings used in this application are for convenience only and do not affect the interpretation of this application.

LENGTHY TABLES
The patent application contains a lengthy table section. A copy of the table is available in electronic form from the USPTO web site (https://seqdata.uspto.gov/?pageRequest=docDetail&DocID=US20240252682A1). An electronic copy of the table will also be available from the USPTO upon request and payment of the fee set forth in 37 CFR 1.19(b)(3).

The application's sequence listing, which the Patent Office published only in electronic form, follows.

SEQUENCE LISTING (22005 sequences)

SEQ ID NO: 1 - protein, 2133 aa, synthetic construct
MPAAKRVKLDGGDKKYSIGLDIGTNSVGWAVITDEYKVPSKKFKVLGNTDRHSIKKNLIGALLFDSGETAEATRLKRTARRRYTRRKNRICYLQEIFSNEMAKVDDSFFHRLEESFLVEEDKKHERHPIFGNIVDEVAYHEKYPTIYHLRKKLVDSTDKADLRLIYLALAHMIKFRGHFLIEGDLNPDNSDVDKLFIQLVQTYNQLFEENPINASGVDAKAILSARLSKSRRLENLIAQLPGEKKNGLFGNLIALSLGLTPNFKSNFDLAEDAKLQLSKDTYDDDLDNLLAQIGDQYADLFLAAKNLSDAILLSDILRVNTEITKAPLSASMIKRYDEHHQDLTLLKALVRQQLPEKYKEIFFDQSKNGYAGYIDGGASQEEFYKFIKPILEKMDGTEELLVKLNREDLLRKQRTFDNGSIPHQIHLGELHAILRRQEDFYPFLKDNREKIEKILTFRIPYYVGPLARGNSRFAWMTRKSEETITPWNFEEVVDKGASAQSFIERMTNFDKNLPNEKVLPKHSLLYEYFTVYNELTKVKYVTEGMRKPAFLSGEQKKAIVDLLFKTNRKVTVKQLKEDYFKKIECFDSVEISGVEDRFNASLGTYHDLLKIIKDKDFLDNEENEDILEDIVLTLTLFEDREMIEERLKTYAHLFDDKVMKQLKRRRYTGWGRLSRKLINGIRDKQSGKTILDFLKSDGFANRNFMQLIHDDSLTFKEDIQKAQVSGQGDSLHEHIANLAGSPAIKKGILQTVKVVDELVKVMGRHKPENIVIEMARENQTTQKGQKNSRERMKRIEEGIKELGSQILKEHPVENTQLQNEKLYLYYLQNGRDMYVDQELDINRLSDYDVDHIVPQSFLKDDSIDNKVLTRSDKARGKSDNVPSEEVVKKMKNYWRQLLNAKLITQRKFDNLTKAERGGLSELDKAGFIKRQLVETRQITKHVAQILDSRMNTKYDENDKLIREVKVITLKSKLVSDFRKDFQFYKVREINNYHHAHDAYLNAVVGTALIKKYPKLESEFVYGDYKVYDVRKMIAKSEQEIGKATAKYFFYSNIMNFFKTEITLANGEIRKRPLIETNGETGEIVWDKGRDFATVRKVLSMPQVNIVKKTEVQTGGFSKESILPKRNSDKLIARKKDWDPKKYGGFDSPTVAYSVLVVAKVEKGKSKKLKSVKELLGITIMERSSFEKNPIDFLEAKGYKEVKKDLIIKLPKYSLFELENGRKRMLASAGELQKGNELALPSKYVNFLYLASHYEKLKGSPEDNEQKQLFVEQHKHYLDEIIEQISEFSKRVILADANLDKVLSAYNKHRDKPIREQAENIIHLFTLTNLGAPAAFKYFDTTIDRKRYTSTKEVLDATLIHQSITGLYETRIDLSQLGGDGGAEAAAKEAAAKEAAAKEAAAKALEAEAAAKEAAAKEAAAKEAAAKAGGTAPLEEEYRLFLEAPIQNVTLLEQWKREIPKVWAEINPPGLASTQAPIHVQLLSTALPVRVRQYPITLEAKRSLRETIRKFRAAGILRPVHSPWNTPLLPVRKSGTSEYRMVQDLREVNKRVETIHPTVPNPYTLLSLLPPDRIWYSVLDLKDAFFCIPLAPESQLIFAFEWADAEEGESGQLTWTRLPQGFKNSPTLFDEALNRDLQGFRLDHPSVSLLQYVDDLLIAADTQAACLSATRDLLMTLAELGYRVSGKKAQLCQEEVTYLGFKIHKGSRSLSNSRTQAILQIPVPKTKRQVREFLGTIGYCRLWIPGFAELAQPLYAATRGGNDPLVWGEKEEEAFQSLKLALTQPPALALPSLDKPFQLFVEETSGAAKGVLTQALGPWKRPVAYLSKRLDPVAAGWPRCLRAIAAAALLTREASKLTFGQDIEITSSHNLESLLRSPPDKWLTNARITQYQVLLLDPPRVRFKQTAALNPATLLPETDDTLPIHHCLDTLDSLTSTRPDLTDQPLAQAEATLFTDGSSYIRDGKRYAGAAVVTLDSVIWAEPLPIGTSAQKAELIALTKALEWSKDKSVNIYTDSRYAFATLHVHGMIYRERGLLTAGGKAIKNAPEILALLTAVWLPKRVAVMHCKGHQKDDAPTSTGNRRADEVAREVAIRPLSTQATISAGKRTADGSEFEKRTADGSEFESPKKKAKVE

SEQ ID NO: 2 - protein, 2112 aa, synthetic construct
MPAAKRVKLDGGDKKYSIGLDIGTNSVGWAVITDEYKVPSKKFKVLGNTDRHSIKKNLIGALLFDSGETAEATRLKRTARRRYTRRKNRICYLQEIFSNEMAKVDDSFFHRLEESFLVEEDKKHERHPIFGNIVDEVAYHEKYPTIYHLRKKLVDSTDKADLRLIYLALAHMIKFRGHFLIEGDLNPDNSDVDKLFIQLVQTYNQLFEENPINASGVDAKAILSARLSKSRRLENLIAQLPGEKKNGLFGNLIALSLGLTPNFKSNFDLAEDAKLQLSKDTYDDDLDNLLAQIGDQYADLFLAAKNLSDAILLSDILRVNTEITKAPLSASMIKRYDEHHQDLTLLKALVRQQLPEKYKEIFFDQSKNGYAGYIDGGASQEEFYKFIKPILEKMDGTEELLVKLNREDLLRKQRTFDNGSIPHQIHLGELHAILRRQEDFYPFLKDNREKIEKILTFRIPYYVGPLARGNSRFAWMTRKSEETITPWNFEEVVDKGASAQSFIERMTNFDKNLPNEKVLPKHSLLYEYFTVYNELTKVKYVTEGMRKPAFLSGEQKKAIVDLLFKTNRKVTVKQLKEDYFKKIECFDSVEISGVEDRFNASLGTYHDLLKIIKDKDFLDNEENEDILEDIVLTLTLFEDREMIEERLKTYAHLFDDKVMKQLKRRRYTGWGRLSRKLINGIRDKQSGKTILDFLKSDGFANRNFMQLIHDDSLTFKEDIQKAQVSGQGDSLHEHIANLAGSPAIKKGILQTVKVVDELVKVMGRHKPENIVIEMARENQTTQKGQKNSRERMKRIEEGIKELGSQILKEHPVENTQLQNEKLYLYYLQNGRDMYVDQELDINRLSDYDVDHIVPQSFLKDDSIDNKVLTRSDKARGKSDNVPSEEVVKKMKNYWRQLLNAKLITQRKFDNLTKAERGGLSELDKAGFIKRQLVETRQITKHVAQILDSRMNTKYDENDKLIREVKVITLKSKLVSDFRKDFQFYKVREINNYHHAHDAYLNAVVGTALIKKYPKLESEFVYGDYKVYDVRKMIAKSEQEIGKATAKYFFYSNIMNFFKTEITLANGEIRKRPLIETNGETGEIVWDKGRDFATVRKVLSMPQVNIVKKTEVQTGGFSKESILPKRNSDKLIARKKDWDPKKYGGFDSPTVAYSVLVVAKVEKGKSKKLKSVKELLGITIMERSSFEKNPIDFLEAKGYKEVKKDLIIKLPKYSLFELENGRKRMLASAGELQKGNELALPSKYVNFLYLASHYEKLKGSPEDNEQKQLFVEQHKHYLDEIIEQISEFSKRVILADANLDKVLSAYNKHRDKPIREQAENIIHLFTLTNLGAPAAFKYFDTTIDRKRYTSTKEVLDATLIHQSITGLYETRIDLSQLGGDGGGGGGSGGGGSGGGGSGGGGSGGGGSGGTAPLEEEYRLFLEAPIQNVTLLEQWKREIPKVWAEINPPGLASTQAPIHVQLLSTALPVRVRQYPITLEAKRSLRETIRKFRAAGILRPVHSPWNTPLLPVRKSGTSEYRMVQDLREVNKRVETIHPTVPNPYTLLSLLPPDRIWYSVLDLKDAFFCIPLAPESQLIFAFEWADAEEGESGQLTWTRLPQGFKNSPTLFDEALNRDLQGFRLDHPSVSLLQYVDDLLIAADTQAACLSATRDLLMTLAELGYRVSGKKAQLCQEEVTYLGFKIHKGSRSLSNSRTQAILQIPVPKTKRQVREFLGTIGYCRLWIPGFAELAQPLYAATRGGNDPLVWGEKEEEAFQSLKLALTQPPALALPSLDKPFQLFVEETSGAAKGVLTQALGPWKRPVAYLSKRLDPVAAGWPRCLRAIAAAALLTREASKLTFGQDIEITSSHNLESLLRSPPDKWLTNARITQYQVLLLDPPRVRFKQTAALNPATLLPETDDTLPIHHCLDTLDSLTSTRPDLTDQPLAQAEATLFTDGSSYIRDGKRYAGAAVVTLDSVIWAEPLPIGTSAQKAELIALTKALEWSKDKSVNIYTDSRYAFATLHVHGMIYRERGLLTAGGKAIKNAPEILALLTAVWLPKRVAVMHCKGHQKDDAPTSTGNRRADEVAREVAIRPLSTQATISAGKRTADGSEFEKRTADGSEFESPKKKAKVE

SEQ ID NO: 3 - protein, 2098 aa, synthetic construct
MPAAKRVKLDGGDKKYSIGLDIGTNSVGWAVITDEYKVPSKKFKVLGNTDRHSIKKNLIGALLFDSGETAEATRLKRTARRRYTRRKNRICYLQEIFSNEMAKVDDSFFHRLEESFLVEEDKKHERHPIFGNIVDEVAYHEKYPTIYHLRKKLVDSTDKADLRLIYLALAHMIKFRGHFLIEGDLNPDNSDVDKLFIQLVQTYNQLFEENPINASGVDAKAILSARLSKSRRLENLIAQLPGEKKNGLFGNLIALSLGLTPNFKSNFDLAEDAKLQLSKDTYDDDLDNLLAQIGDQYADLFLAAKNLSDAILLSDILRVNTEITKAPLSASMIKRYDEHHQDLTLLKALVRQQLPEKYKEIFFDQSKNGYAGYIDGGASQEEFYKFIKPILEKMDGTEELLVKLNREDLLRKQRTFDNGSIPHQIHLGELHAILRRQEDFYPFLKDNREKIEKILTFRIPYYVGPLARGNSRFAWMTRKSEETITPWNFEEVVDKGASAQSFIERMTNFDKNLPNEKVLPKHSLLYEYFTVYNELTKVKYVTEGMRKPAFLSGEQKKAIVDLLFKTNRKVTVKQLKEDYFKKIECFDSVEISGVEDRFNASLGTYHDLLKIIKDKDFLDNEENEDILEDIVLTLTLFEDREMIEERLKTYAHLFDDKVMKQLKRRRYTGWGRLSRKLINGIRDKQSGKTILDFLKSDGFANRNFMQLIHDDSLTFKEDIQKAQVSGQGDSLHEHIANLAGSPAIKKGILQTVKVVDELVKVMGRHKPENIVIEMARENQTTQKGQKNSRERMKRIEEGIKELGSQILKEHPVENTQLQNEKLYLYYLQNGRDMYVDQELDINRLSDYDVDHIVPQSFLKDDSIDNKVLTRSDKARGKSDNVPSEEVVKKMKNYWRQLLNAKLITQRKFDNLTKAERGGLSELDKAGFIKRQLVETRQITKHVAQILDSRMNTKYDENDKLIREVKVITLKSKLVSDFRKDFQFYKVREINNYHHAHDAYLNAVVGTALIKKYPKLESEFVYGDYKVYDVRKMIAKSEQEIGKATAKYFFYSNIMNFFKTEITLANGEIRKRPLIETNGETGEIVWDKGRDFATVRKVLSMPQVNIVKKTEVQTGGFSKESILPKRNSDKLIARKKDWDPKKYGGFDSPTVAYSVLVVAKVEKGKSKKLKSVKELLGITIMERSSFEKNPIDFLEAKGYKEVKKDLIIKLPKYSLFELENGRKRMLASAGELQKGNELALPSKYVNFLYLASHYEKLKGSPEDNEQKQLFVEQHKHYLDEIIEQISEFSKRVILADANLDKVLSAYNKHRDKPIREQAENIIHLFTLTNLGAPAAFKYFDTTIDRKRYTSTKEVLDATLIHQSITGLYETRIDLSQLGGDGGPAPEAAAKGGGGGTAPLEEEYRLFLEAPIQNVTLLEQWKREIPKVWAEINPPGLASTQAPIHVQLLSTALPVRVRQYPITLEAKRSLRETIRKFRAAGILRPVHSPWNTPLLPVRKSGTSEYRMVQDLREVNKRVETIHPTVPNPYTLLSLLPPDRIWYSVLDLKDAFFCIPLAPESQLIFAFEWADAEEGESGQLTWTRLPQGFKNSPTLFDEALNRDLQGFRLDHPSVSLLQYVDDLLIAADTQAACLSATRDLLMTLAELGYRVSGKKAQLCQEEVTYLGFKIHKGSRSLSNSRTQAILQIPVPKTKRQVREFLGTIGYCRLWIPGFAELAQPLYAATRGGNDPLVWGEKEEEAFQSLKLALTQPPALALPSLDKPFQLFVEETSGAAKGVLTQALGPWKRPVAYLSKRLDPVAAGWPRCLRAIAAAALLTREASKLTFGQDIEITSSHNLESLLRSPPDKWLTNARITQYQVLLLDPPRVRFKQTAALNPATLLPETDDTLPIHHCLDTLDSLTSTRPDLTDQPLAQAEATLFTDGSSYIRDGKRYAGAAVVTLDSVIWAEPLPIGTSAQKAELIALTKALEWSKDKSVNIYTDSRYAFATLHVHGMIYRERGLLTAGGKAIKNAPEILALLTAVWLPKRVAVMHCKGHQKDDAPTSTGNRRADEVAREVAIRPLSTQATISAGKRTADGSEFEKRTADGSEFESPKKKAKVE

SEQ ID NO: 4 - protein, 2090 aa, synthetic construct
MPAAKRVKLDGGDKKYSIGLDIGTNSVGWAVITDEYKVPSKKFKVLGNTDRHSIKKNLIGALLFDSGETAEATRLKRTARRRYTRRKNRICYLQEIFSNEMAKVDDSFFHRLEESFLVEEDKKHERHPIFGNIVDEVAYHEKYPTIYHLRKKLVDSTDKADLRLIYLALAHMIKFRGHFLIEGDLNPDNSDVDKLFIQLVQTYNQLFEENPINASGVDAKAILSARLSKSRRLENLIAQLPGEKKNGLFGNLIALSLGLTPNFKSNFDLAEDAKLQLSKDTYDDDLDNLLAQIGDQYADLFLAAKNLSDAILLSDILRVNTEITKAPLSASMIKRYDEHHQDLTLLKALVRQQLPEKYKEIFFDQSKNGYAGYIDGGASQEEFYKFIKPILEKMDGTEELLVKLNREDLLRKQRTFDNGSIPHQIHLGELHAILRRQEDFYPFLKDNREKIEKILTFRIPYYVGPLARGNSRFAWMTRKSEETITPWNFEEVVDKGASAQSFIERMTNFDKNLPNEKVLPKHSLLYEYFTVYNELTKVKYVTEGMRKPAFLSGEQKKAIVDLLFKTNRKVTVKQLKEDYFKKIECFDSVEISGVEDRFNASLGTYHDLLKIIKDKDFLDNEENEDILEDIVLTLTLFEDREMIEERLKTYAHLFDDKVMKQLKRRRYTGWGRLSRKLINGIRDKQSGKTILDFLKSDGFANRNFMQLIHDDSLTFKEDIQKAQVSGQGDSLHEHIANLAGSPAIKKGILQTVKVVDELVKVMGRHKPENIVIEMARENQTTQKGQKNSRERMKRIEEGIKELGSQILKEHPVENTQLQNEKLYLYYLQNGRDMYVDQELDINRLSDYDVDHIVPQSFLKDDSIDNKVLTRSDKARGKSDNVPSEEVVKKMKNYWRQLLNAKLITQRKFDNLTKAERGGLSELDKAGFIKRQLVETRQITKHVAQILDSRMNTKYDENDKLIREVKVITLKSKLVSDFRKDFQFYKVREINNYHHAHDAYLNAVVGTALIKKYPKLESEFVYGDYKVYDVRKMIAKSEQEIGKATAKYFFYSNIMNFFKTEITLANGEIRKRPLIETNGETGEIVWDKGRDFATVRKVLSMPQVNIVKKTEVQTGGFSKESILPKRNSDKLIARKKDWDPKKYGGFDSPTVAYSVLVVAKVEKGKSKKLKSVKELLGITIMERSSFEKNPIDFLEAKGYKEVKKDLIIKLPKYSLFELENGRKRMLASAGELQKGNELALPSKYVNFLYLASHYEKLKGSPEDNEQKQLFVEQHKHYLDEIIEQISEFSKRVILADANLDKVLSAYNKHRDKPIREQAENIIHLFTLTNLGAPAAFKYFDTTIDRKRYTSTKEVLDATLIHQSITGLYETRIDLSQLGGDGGGGGGGTAPLEEEYRLFLEAPIQNVTLLEQWKREIPKVWAEINPPGLASTQAPIHVQLLSTALPVRVRQYPITLEAKRSLRETIRKFRAAGILRPVHSPWNTPLLPVRKSGTSEYRMVQDLREVNKRVETIHPTVPNPYTLLSLLPPDRIWYSVLDLKDAFFCIPLAPESQLIFAFEWADAEEGESGQLTWTRLPQGFKNSPTLFDEALNRDLQGFRLDHPSVSLLQYVDDLLIAADTQAACLSATRDLLMTLAELGYRVSGKKAQLCQEEVTYLGFKIHKGSRSLSNSRTQAILQIPVPKTKRQVREFLGTIGYCRLWIPGFAELAQPLYAATRGGNDPLVWGEKEEEAFQSLKLALTQPPALALPSLDKPFQLFVEETSGAAKGVLTQALGPWKRPVAYLSKRLDPVAAGWPRCLRAIAAAALLTREASKLTFGQDIEITSSHNLESLLRSPPDKWLTNARITQYQVLLLDPPRVRFKQTAALNPATLLPETDDTLPIHHCLDTLDSLTSTRPDLTDQPLAQAEATLFTDGSSYIRDGKRYAGAAVVTLDSVIWAEPLPIGTSAQKAELIALTKALEWSKDKSVNIYTDSRYAFATLHVHGMIYRERGLLTAGGKAIKNAPEILALLTAVWLPKRVAVMHCKGHQKDDAPTSTGNRRADEVAREVAIRPLSTQATISAGKRTADGSEFEKRTADGSEFESPKKKAKVE

SEQ ID NO: 5 - protein, 2098 aa, synthetic construct
MPAAKRVKLDGGDKKYSIGLDIGTNSVGWAVITDEYKVPSKKFKVLGNTDRHSIKKNLIGALLFDSGETAEATRLKRTARRRYTRRKNRICYLQEIFSNEMAKVDDSFFHRLEESFLVEEDKKHERHPIFGNIVDEVAYHEKYPTIYHLRKKLVDSTDKADLRLIYLALAHMIKFRGHFLIEGDLNPDNSDVDKLFIQLVQTYNQLFEENPINASGVDAKAILSARLSKSRRLENLIAQLPGEKKNGLFGNLIALSLGLTPNFKSNFDLAEDAKLQLSKDTYDDDLDNLLAQIGDQYADLFLAAKNLSDAILLSDILRVNTEITKAPLSASMIKRYDEHHQDLTLLKALVRQQLPEKYKEIFFDQSKNGYAGYIDGGASQEEFYKFIKPILEKMDGTEELLVKLNREDLLRKQRTFDNGSIPHQIHLGELHAILRRQEDFYPFLKDNREKIEKILTFRIPYYVGPLARGNSRFAWMTRKSEETITPWNFEEVVDKGASAQSFIERMTNFDKNLPNEKVLPKHSLLYEYFTVYNELTKVKYVTEGMRKPAFLSGEQKKAIVDLLFKTNRKVTVKQLKEDYFKKIECFDSVEISGVEDRFNASLGTYHDLLKIIKDKDFLDNEENEDILEDIVLTLTLFEDREMIEERLKTYAHLFDDKVMKQLKRRRYTGWGRLSRKLINGIRDKQSGKTILDFLKSDGFANRNFMQLIHDDSLTFKEDIQKAQVSGQGDSLHEHIANLAGSPAIKKGILQTVKVVDELVKVMGRHKPENIVIEMARENQTTQKGQKNSRERMKRIEEGIKELGSQILKEHPVENTQLQNEKLYLYYLQNGRDMYVDQELDINRLSDYDVDHIVPQSFLKDDSIDNKVLTRSDKARGKSDNVPSEEVVKKMKNYWRQLLNAKLITQRKFDNLTKAERGGLSELDKAGFIKRQLVETRQITKHVAQILDSRMNTKYDENDKLIREVKVITLKSKLVSDFRKDFQFYKVREINNYHHAHDAYLNAVVGTALIKKYPKLESEFVYGDYKVYDVRKMIAKSEQEIGKATAKYFFYSNIMNFFKTEITLANGEIRKRPLIETNGETGEIVWDKGRDFATVRKVLSMPQVNIVKKTEVQTGGFSKESILPKRNSDKLIARKKDWDPKKYGGFDSPTVAYSVLVVAKVEKGKSKKLKSVKELLGITIMERSSFEKNPIDFLEAKGYKEVKKDLIIKLPKYSLFELENGRKRMLASAGELQKGNELALPSKYVNFLYLASHYEKLKGSPEDNEQKQLFVEQHKHYLDEIIEQISEFSKRVILADANLDKVLSAYNKHRDKPIREQAENIIHLFTLTNLGAPAAFKYFDTTIDRKRYTSTKEVLDATLIHQSITGLYETRIDLSQLGGDGGGGGGSSEAAAKGGTAPLEEEYRLFLEAPIQNVTLLEQWKREIPKVWAEINPPGLASTQAPIHVQLLSTALPVRVRQYPITLEAKRSLRETIRKFRAAGILRPVHSPWNTPLLPVRKSGTSEYRMVQDLREVNKRVETIHPTVPNPYTLLSLLPPDRIWYSVLDLKDAFFCIPLAPESQLIFAFEWADAEEGESGQLTWTRLPQGFKNSPTLFDEALNRDLQGFRLDHPSVSLLQYVDDLLIAADTQAACLSATRDLLMTLAELGYRVSGKKAQLCQEEVTYLGFKIHKGSRSLSNSRTQAILQIPVPKTKRQVREFLGTIGYCRLWIPGFAELAQPLYAATRGGNDPLVWGEKEEEAFQSLKLALTQPPALALPSLDKPFQLFVEETSGAAKGVLTQALGPWKRPVAYLSKRLDPVAAGWPRCLRAIAAAALLTREASKLTFGQDIEITSSHNLESLLRSPPDKWLTNARITQYQVLLLDPPRVRFKQTAALNPATLLPETDDTLPIHHCLDTLDSLTSTRPDLTDQPLAQAEATLFTDGSSYIRDGKRYAGAAVVTLDSVIWAEPLPIGTSAQKAELIALTKALEWSKDKSVNIYTDSRYAFATLHVHGMIYRERGLLTAGGKAIKNAPEILALLTAVWLPKRVAVMHCKGHQKDDAPTSTGNRRADEVAREVAIRPLSTQATISAGKRTADGSEFEKRTADGSEFESPKKKAKVE

SEQ ID NO: 6 - protein, 2098 aa, synthetic construct
MPAAKRVKLDGGDKKYSIGLDIGTNSVGWAVITDEYKVPSKKFKVLGNTDRHSIKKNLIGALLFDSGETAEATRLKRTARRRYTRRKNRICYLQEIFSNEMAKVDDSFFHRLEESFLVEEDKKHERHPIFGNIVDEVAYHEKYPTIYHLRKKLVDSTDKADLRLIYLALAHMIKFRGHFLIEGDLNPDNSDVDKLFIQLVQTYNQLFEENPINASGVDAKAILSARLSKSRRLENLIAQLPGEKKNGLFGNLIALSLGLTPNFKSNFDLAEDAKLQLSKDTYDDDLDNLLAQIGDQYADLFLAAKNLSDAILLSDILRVNTEITKAPLSASMIKRYDEHHQDLTLLKALVRQQLPEKYKEIFFDQSKNGYAGYIDGGASQEEFYKFIKPILEKMDGTEELLVKLNREDLLRKQRTFDNGSIPHQIHLGELHAILRRQEDFYPFLKDNREKIEKILTFRIPYYVGPLARGNSRFAWMTRKSEETITPWNFEEVVDKGASAQSFIERMTNFDKNLPNEKVLPKHSLLYEYFTVYNELTKVKYVTEGMRKPAFLSGEQKKAIVDLLFKTNRKVTVKQLKEDYFKKIECFDSVEISGVEDRFNASLGTYHDLLKIIKDKDFLDNEENEDILEDIVLTLTLFEDREMIEERLKTYAHLFDDKVMKQLKRRRYTGWGRLSRKLINGIRDKQSGKTILDFLKSDGFANRNFMQLIHDDSLTFKEDIQKAQVSGQGDSLHEHIANLAGSPAIKKGILQTVKVVDELVKVMGRHKPENIVIEMARENQTTQKGQKNSRERMKRIEEGIKELGSQILKEHPVENTQLQNEKLYLYYLQNGRDMYVDQELDINRLSDYDVDHIVPQSFLKDDSIDNKVLTRSDKARGKSDNVPSEEVVKKMKNYWRQLLNAKLITQRKFDNLTKAERGGLSELDKAGFIKRQLVETRQITKHVAQILDSRMNTKYDENDKLIREVKVITLKSKLVSDFRKDFQFYKVREINNYHHAHDAYLNAVVGTALIKKYPKLESEFVYGDYKVYDVRKMIAKSEQEIGKATAKYFFYSNIMNFFKTEITLANGEIRKRPLIETNGETGEIVWDKGRDFATVRKVLSMPQVNIVKKTEVQTGGFSKESILPKRNSDKLIARKKDWDPKKYGGFDSPTVAYSVLVVAKVEKGKSKKLKSVKELLGITIMERSSFEKNPIDFLEAKGYKEVKKDLIIKLPKYSLFELENGRKRMLASAGELQKGNELALPSKYVNFLYLASHYEKLKGSPEDNEQKQLFVEQHKHYLDEIIEQISEFSKRVILADANLDKVLSAYNKHRDKPIREQAENIIHLFTLTNLGAPAAFKYFDTTIDRKRYTSTKEVLDATLIHQSITGLYETRIDLSQLGGDGGGGSEAAAKGGGGGTAPLEEEYRLFLEAPIQNVTLLEQWKREIPKVWAEINPPGLASTQAPIHVQLLSTALPVRVRQYPITLEAKRSLRETIRKFRAAGILRPVHSPWNTPLLPVRKSGTSEYRMVQDLREVNKRVETIHPTVPNPYTLLSLLPPDRIWYSVLDLKDAFFCIPLAPESQLIFAFEWADAEEGESGQLTWTRLPQGFKNSPTLFDEALNRDLQGFRLDHPSVSLLQYVDDLLIAADTQAACLSATRDLLMTLAELGYRVSGKKAQLCQEEVTYLGFKIHKGSRSLSNSRTQAILQIPVPKTKRQVREFLGTIGYCRLWIPGFAELAQPLYAATRGGNDPLVWGEKEEEAFQSLKLALTQPPALALPSLDKPFQLFVEETSGAAKGVLTQALGPWKRPVAYLSKRLDPVAAGWPRCLRAIAAAALLTREASKLTFGQDIEITSSHNLESLLRSPPDKWLTNARITQYQVLLLDPPRVRFKQTAALNPATLLPETDDTLPIHHCLDTLDSLTSTRPDLTDQPLAQAEATLFTDGSSYIRDGKRYAGAAVVTLDSVIWAEPLPIGTSAQKAELIALTKALEWSKDKSVNIYTDSRYAFATLHVHGMIYRERGLLTAGGKAIKNAPEILALLTAVWLPKRVAVMHCKGHQKDDAPTSTGNRRADEVAREVAIRPLSTQATISAGKRTADGSEFEKRTADGSEFESPKKKAKVE

SEQ ID NO: 7 - protein, 2093 aa, synthetic construct
MPAAKRVKLDGGDKKYSIGLDIGTNSVGWAVITDEYKVPSKKFKVLGNTDRHSIKKNLIGALLFDSGETAEATRLKRTARRRYTRRKNRICYLQEIFSNEMAKVDDSFFHRLEESFLVEEDKKHERHPIFGNIVDEVAYHEKYPTIYHLRKKLVDSTDKADLRLIYLALAHMIKFRGHFLIEGDLNPDNSDVDKLFIQLVQTYNQLFEENPINASGVDAKAILSARLSKSRRLENLIAQLPGEKKNGLFGNLIALSLGLTPNFKSNFDLAEDAKLQLSKDTYDDDLDNLLAQIGDQYADLFLAAKNLSDAILLSDILRVNTEITKAPLSASMIKRYDEHHQDLTLLKALVRQQLPEKYKEIFFDQSKNGYAGYIDGGASQEEFYKFIKPILEKMDGTEELLVKLNREDLLRKQRTFDNGSIPHQIHLGELHAILRRQEDFYPFLKDNREKIEKILTFRIPYYVGPLARGNSRFAWMTRKSEETITPWNFEEVVDKGASAQSFIERMTNFDKNLPNEKVLPKHSLLYEYFTVYNELTKVKYVTEGMRKPAFLSGEQKKAIVDLLFKTNRKVTVKQLKEDYFKKIECFDSVEISGVEDRFNASLGTYHDLLKIIKDKDFLDNEENEDILEDIVLTLTLFEDREMIEERLKTYAHLFDDKVMKQLKRRRYTGWGRLSRKLINGIRDKQSGKTILDFLKSDGFANRNFMQLIHDDSLTFKEDIQKAQVSGQGDSLHEHIANLAGSPAIKKGILQTVKVVDELVKVMGRHKPENIVIEMARENQTTQKGQKNSRERMKRIEEGIKELGSQILKEHPVENTQLQNEKLYLYYLQNGRDMYVDQELDINRLSDYDVDHIVPQSFLKDDSIDNKVLTRSDKARGKSDNVPSEEVVKKMKNYWRQLLNAKLITQRKFDNLTKAERGGLSELDKAGFIKRQLVETRQITKHVAQILDSRMNTKYDENDKLIREVKVITLKSKLVSDFRKDFQFYKVREINNYHHAHDAYLNAVVGTALIKKYPKLESEFVYGDYKVYDVRKMIAKSEQEIGKATAKYFFYSNIMNFFKTEITLANGEIRKRPLIETNGETGEIVWDKGRDFATVRKVLSMPQVNIVKKTEVQTGGFSKESILPKRNSDKLIARKKDWDPKKYGGFDSPTVAYSVLVVAKVEKGKSKKLKSVKELLGITIMERSSFEKNPIDFLEAKGYKEVKKDLIIKLPKYSLFELENGRKRMLASAGELQKGNELALPSKYVNFLYLASHYEKLKGSPEDNEQKQLFVEQHKHYLDEIIEQISEFSKRVILADANLDKVLSAYNKHRDKPIREQAENIIHLFTLTNLGAPAAFKYFDTTIDRKRYTSTKEVLDATLIHQSITGLYETRIDLSQLGGDGGGGSGSSGGTAPLEEEYRLFLEAPIQNVTLLEQWKREIPKVWAEINPPGLASTQAPIHVQLLSTALPVRVRQYPITLEAKRSLRETIRKFRAAGILRPVHSPWNTPLLPVRKSGTSEYRMVQDLREVNKRVETIHPTVPNPYTLLSLLPPDRIWYSVLDLKDAFFCIPLAPESQLIFAFEWADAEEGESGQLTWTRLPQGFKNSPTLFDEALNRDLQGFRLDHPSVSLLQYVDDLLIAADTQAACLSATRDLLMTLAELGYRVSGKKAQLCQEEVTYLGFKIHKGSRSLSNSRTQAILQIPVPKTKRQVREFLGTIGYCRLWIPGFAELAQPLYAATRGGNDPLVWGEKEEEAFQSLKLALTQPPALALPSLDKPFQLFVEETSGAAKGVLTQALGPWKRPVAYLSKRLDPVAAGWPRCLRAIAAAALLTREASKLTFGQDIEITSSHNLESLLRSPPDKWLTNARITQYQVLLLDPPRVRFKQTAALNPATLLPETDDTLPIHHCLDTLDSLTSTRPDLTDQPLAQAEATLFTDGSSYIRDGKRYAGAAVVTLDSVIWAEPLPIGTSAQKAELIALTKALEWSKDKSVNIYTDSRYAFATLHVHGMIYRERGLLTAGGKAIKNAPEILALLTAVWLPKRVAVMHCKGHQKDDAPTSTGNRRADEVAREVAIRPLSTQATISAGKRTADGSEFEKRTADGSEFESPKKKAKVE

SEQ ID NO: 8 - protein, 2093 aa, synthetic construct
MPAAKRVKLDGGDKKYSIGLDIGTNSVGWAVITDEYKVPSKKFKVLGNTDRHSIKKNLIGALLFDSGETAEATRLKRTARRRYTRRKNRICYLQEIFSNEMAKVDDSFFHRLEESFLVEEDKKHERHPIFGNIVDEVAYHEKYPTIYHLRKKLVDSTDKADLRLIYLALAHMIKFRGHFLIEGDLNPDNSDVDKLFIQLVQTYNQLFEENPINASGVDAKAILSARLSKSRRLENLIAQLPGEKKNGLFGNLIALSLGLTPNFKSNFDLAEDAKLQLSKDTYDDDLDNLLAQIGDQYADLFLAAKNLSDAILLSDILRVNTEITKAPLSASMIKRYDEHHQDLTLLKALVRQQLPEKYKEIFFDQSKNGYAGYIDGGASQEEFYKFIKPILEKMDGTEELLVKLNREDLLRKQRTFDNGSIPHQIHLGELHAILRRQEDFYPFLKDNREKIEKILTFRIPYYVGPLARGNSRFAWMTRKSEETITPWNFEEVVDKGASAQSFIERMTNFDKNLPNEKVLPKHSLLYEYFTVYNELTKVKYVTEGMRKPAFLSGEQKKAIVDLLFKTNRKVTVKQLKEDYFKKIECFDSVEISGVEDRFNASLGTYHDLLKIIKDKDFLDNEENEDILEDIVLTLTLFEDREMIEERLKTYAHLFDDKVMKQLKRRRYTGWGRLSRKLINGIRDKQSGKTILDFLKSDGFANRNFMQLIHDDSLTFKEDIQKAQVSGQGDSLHEHIANLAGSPAIKKGILQTVKVVDELVKVMGRHKPENIVIEMARENQTTQKGQKNSRERMKRIEEGIKELGSQILKEHPVENTQLQNEKLYLYYLQNGRDMYVDQELDINRLSDYDVDHIVPQSFLKDDSIDNKVLTRSDKARGKSDNVPSEEVVKKMKNYWRQLLNAKLITQRKFDNLTKAERGGLSELDKAGFIKRQLVETRQITKHVAQILDSRMNTKYDENDKLIREVKVITLKSKLVSDFRKDFQFYKVREINNYHHAHDAYLNAVVGTALIKKYPKLESEFVYGDYKVYDVRKMIAKSEQEIGKATAKYFFYSNIMNFFKTEITLANGEIRKRPLIETNGETGEIVWDKGRDFATVRKVLSMPQVNIVKKTEVQTGGFSKESILPKRNSDKLIARKKDWDPKKYGGFDSPTVAYSVLVVAKVEKGKSKKLKSVKELLGITIMERSSFEKNPIDFLEAKGYKEVKKDLIIKLPKYSLFELENGRKRMLASAGELQKGNELALPSKYVNFLYLASHYEKLKGSPEDNEQKQLFVEQHKHYLDEIIEQISEFSKRVILADANLDKVLSAYNKHRDKPIREQAENIIHLFTLTNLGAPAAFKYFDTTIDRKRYTSTKEVLDATLIHQSITGLYETRIDLSQLGGDGGGGSPAPGGTAPLEEEYRLFLEAPIQNVTLLEQWKREIPKVWAEINPPGLASTQAPIHVQLLSTALPVRVRQYPITLEAKRSLRETIRKFRAAGILRPVHSPWNTPLLPVRKSGTSEYRMVQDLREVNKRVETIHPTVPNPYTLLSLLPPDRIWYSVLDLKDAFFCIPLAPESQLIFAFEWADAEEGESGQLTWTRLPQGFKNSPTLFDEALNRDLQGFRLDHPSVSLLQYVDDLLIAADTQAACLSATRDLLMTLAELGYRVSGKKAQLCQEEVTYLGFKIHKGSRSLSNSRTQAILQIPVPKTKRQVREFLGTIGYCRLWIPGFAELAQPLYAATRGGNDPLVWGEKEEEAFQSLKLALTQPPALALPSLDKPFQLFVEETSGAAKGVLTQALGPWKRPVAYLSKRLDPVAAGWPRCLRAIAAAALLTREASKLTFGQDIEITSSHNLESLLRSPPDKWLTNARITQYQVLLLDPPRVRFKQTAALNPATLLPETDDTLPIHHCLDTLDSLTSTRPDLTDQPLAQAEATLFTDGSSYIRDGKRYAGAAVVTLDSVIWAEPLPIGTSAQKAELIALTKALEWSKDKSVNIYTDSRYAFATLHVHGMIYRERGLLTAGGKAIKNAPEILALLTAVWLPKRVAVMHCKGHQKDDAPTSTGNRRADEVAREVAIRPLSTQATISAGKRTADGSEFEKRTADGSEFESPKKKAKVE

SEQ ID NO: 9 - protein, 2097 aa, synthetic construct
MPAAKRVKLDGGDKKYSIGLDIGTNSVGWAVITDEYKVPSKKFKVLGNTDRHSIKKNLIGALLFDSGETAEATRLKRTARRRYTRRKNRICYLQEIFSNEMAKVDDSFFHRLEESFLVEEDKKHERHPIFGNIVDEVAYHEKYPTIYHLRKKLVDSTDKADLRLIYLALAHMIKFRGHFLIEGDLNPDNSDVDKLFIQLVQTYNQLFEENPINASGVDAKAILSARLSKSRRLENLIAQLPGEKKNGLFGNLIALSLGLTPNFKSNFDLAEDAKLQLSKDTYDDDLDNLLAQIGDQYADLFLAAKNLSDAILLSDILRVNTEITKAPLSASMIKRYDEHHQDLTLLKALVRQQLPEKYKEIFFDQSKNGYAGYIDGGASQEEFYKFIKPILEKMDGTEELLVKLNREDLLRKQRTFDNGSIPHQIHLGELHAILRRQEDFYPFLKDNREKIEKILTFRIPYYVGPLARGNSRFAWMTRKSEETITPWNFEEVVDKGASAQSFIERMTNFDKNLPNEKVLPKHSLLYEYFTVYNELTKVKYVTEGMRKPAFLSGEQKKAIVDLLFKTNRKVTVKQLKEDYFKKIECFDSVEISGVEDRFNASLGTYHDLLKIIKDKDFLDNEENEDILEDIVLTLTLFEDREMIEERLKTYAHLFDDKVMKQLKRRRYTGWGRLSRKLINGIRDKQSGKTILDFLKSDGFANRNFMQLIHDDSLTFKEDIQKAQVSGQGDSLHEHIANLAGSPAIKKGILQTVKVVDELVKVMGRHKPENIVIEMARENQTTQKGQKNSRERMKRIEEGIKELGSQILKEHPVENTQLQNEKLYLYYLQNGRDMYVDQELDINRLSDYDVDHIVPQSFLKDDSIDNKVLTRSDKARGKSDNVPSEEVVKKMKNYWRQLLNAKLITQRKFDNLTKAERGGLSELDKAGFIKRQLVETRQITKHVAQILDSRMNTKYDENDKLIREVKVITLKSKLVSDFRKDFQFYKVREINNYHHAHDAYLNAVVGTALIKKYPKLESEFVYGDYKVYDVRKMIAKSEQEIGKATAKYFFYSNIMNFFKTEITLANGEIRKRPLIETNGETGEIVWDKGRDFATVRKVLSMPQVNIVKKTEVQTGGFSKESILPKRNSDKLIARKKDWDPKKYGGFDSPTVAYSVLVVAKVEKGKSKKLKSVKELLGITIMERSSFEKNPIDFLEAKGYKEVKKDLIIKLPKYSLFELENGRKRMLASAGELQKGNELALPSKYVNFLYLASHYEKLKGSPEDNEQKQLFVEQHKHYLDEIIEQISEFSKRVILADANLDKVLSAYNKHRDKPIREQAENIIHLFTLTNLGAPAAFKYFDTTIDRKRYTSTKEVLDATLIHQSITGLYETRIDLSQLGGDGGGGGGSGGGGSGGTAPLEEEYRLFLEAPIQNVTLLEQWKREIPKVWAEINPPGLASTQAPIHVQLLSTALPVRVRQYPITLEAKRSLRETIRKFRAAGILRPVHSPWNTPLLPVRKSGTSEYRMVQDLREVNKRVETIHPTVPNPYTLLSLLPPDRIWYSVLDLKDAFFCIPLAPESQLIFAFEWADAEEGESGQLTWTRLPQGFKNSPTLFDEALNRDLQGFRLDHPSVSLLQYVDDLLIAADTQAACLSATRDLLMTLAELGYRVSGKKAQLCQEEVTYLGFKIHKGSRSLSNSRTQAILQIPVPKTKRQVREFLGTIGYCRLWIPGFAELAQPLYAATRGGNDPLVWGEKEEEAFQSLKLALTQPPALALPSLDKPFQLFVEETSGAAKGVLTQALGPWKRPVAYLSKRLDPVAAGWPRCLRAIAAAALLTREASKLTFGQDIEITSSHNLESLLRSPPDKWLTNARITQYQVLLLDPPRVRFKQTAALNPATLLPETDDTLPIHHCLDTLDSLTSTRPDLTDQPLAQAEATLFTDGSSYIRDGKRYAGAAVVTLDSVIWAEPLPIGTSAQKAELIALTKALEWSKDKSVNIYTDSRYAFATLHVHGMIYRERGLLTAGGKAIKNAPEILALLTAVWLPKRVAVMHCKGHQKDDAPTSTGNRRADEVAREVAIRPLSTQATISAGKRTADGSEFEKRTADGSEFESPKKKAKVE

SEQ ID NO: 10 - protein, 2097 aa, synthetic construct
MPAAKRVKLDGGDKKYSIGLDIGTNSVGWAVITDEYKVPSKKFKVLGNTDRHSIKKNLIGALLFDSGETAEATRLKRTARRRYTRRKNRICYLQEIFSNEMAKVDDSFFHRLEESFLVEEDKKHERHPIFGNIVDEVAYHEKYPTIYHLRKKLVDSTDKADLRLIYLALAHMIKFRGHFLIEGDLNPDNSDVDKLFIQLVQTYNQLFEENPINASGVDAKAILSARLSKSRRLENLIAQLPGEKKNGLFGNLIALSLGLTPNFKSNFDLAEDAKLQLSKDTYDDDLDNLLAQIGDQYADLFLAAKNLSDAILLSDILRVNTEITKAPLSASMIKRYDEHHQDLTLLKALVRQQLPEKYKEIFFDQSKNGYAGYIDGGASQEEFYKFIKPILEKMDGTEELLVKLNREDLLRKQRTFDNGSIPHQIHLGELHAILRRQEDFYPFLKDNREKIEKILTFRIPYYVGPLARGNSRFAWMTRKSEETITPWNFEEVVDKGASAQSFIERMTNFDKNLPNEKVLPKHSLLYEYFTVYNELTKVKYVTEGMRKPAFLSGEQKKAIVDLLFKTNRKVTVKQLKEDYFKKIECFDSVEISGVEDRFNASLGTYHDLLKIIKDKDFLDNEENEDILEDIVLTLTLFEDREMIEERLKTYAHLFDDKVMKQLKRRRYTGWGRLSRKLINGIRDKQSGKTILDFLKSDGFANRNFMQLIHDDSLTFKEDIQKAQVSGQGDSLHEHIANLAGSPAIKKGILQTVKVVDELVKVMGRHKPENIVIEMARENQTTQKGQKNSRERMKRIEEGIKELGSQILKEHPVENTQLQNEKLYLYYLQNGRDMYVDQELDINRLSDYDVDHIVPQSFLKDDSIDNKVLTRSDKARGKSDNVPSEEVVKKMKNYWRQLLNAKLITQRKFDNLTKAERGGLSELDKAGFIKRQLVETRQITKHVAQILDSRMNTKYDENDKLIREVKVITLKSKLVSDFRKDFQFYKVREINNYHHAHDAYLNAVVGTALIKKYPKLESEFVYGDYKVYDVRKMIAKSEQEIGKATAKYFFYSNIMNFFKTEITLANGEIRKRPLIETNGETGEIVWDKGRDFATVRKVLSMPQVNIVKKTEVQTGGFSKESILPKRNSDKLIARKKDWDPKKYGGFDSPTVAYSVLVVAKVEKGKSKKLKSVKELLGITIMERSSFEKNPIDFLEAKGYKEVKKDLIIKLPKYSLFELENGRKRMLASAGELQKGNELALPSKYVNFLYLASHYEKLKGSPEDNEQKQLFVEQHKHYLDEIIEQISEFSKRVILADANLDKVLSAYNKHRDKPIREQAENIIHLFTLTNLGAPAAFKYFDTTIDRKRYTSTKEVLDATLIHQSITGLYETRIDLSQLGGDGGEAAAKEAAAKGGTAPLEEEYRLFLEAPIQNVTLLEQWKREIPKVWAEINPPGLASTQAPIHVQLLSTALPVRVRQYPITLEAKRSLRETIRKFRAAGILRPVHSPWNTPLLPVRKSGTSEYRMVQDLREVNKRVETIHPTVPNPYTLLSLLPPDRIWYSVLDLKDAFFCIPLAPESQLIFAFEWADAEEGESGQLTWTRLPQGFKNSPTLFDEALNRDLQGFRLDHPSVSLLQYVDDLLIAADTQAACLSATRDLLMTLAELGYRVSGKKAQLCQEEVTYLGFKIHKGSRSLSNSRTQAILQIPVPKTKRQVREFLGTIGYCRLWIPGFAELAQPLYAATRGGNDPLVWGEKEEEAFQSLKLALTQPPALALPSLDKPFQLFVEETSGAAKGVLTQALGPWKRPVAYLSKRLDPVAAGWPRCLRAIAAAALLTREASKLTFGQDIEITSSHNLESLLRSPPDKWLTNARITQYQVLLLDPPRVRFKQTAALNPATLLPETDDTLPIHHCLDTLDSLTSTRPDLTDQPLAQAEATLFTDGSSYIRDGKRYAGAAVVTLDSVIWAEPLPIGTSAQKAELIALTKALEWSKDKSVNIYTDSRYAFATLHVHGMIYRERGLLTAGGKAIKNAPEILALLTAVWLPKRVAVMHCKGHQKDDAPTSTGNRRADEVAREVAIRPLSTQATISAGKRTADGSEFEKRTADGSEFESPKKKAKVE

SEQ ID NO: 11 - protein, 2098 aa, synthetic construct
MPAAKRVKLDGGDKKYSIGLDIGTNSVGWAVITDEYKVPSKKFKVLGNTDRHSIKKNLIGALLFDSGETAEATRLKRTARRRYTRRKNRICYLQEIFSNEMAKVDDSFFHRLEESFLVEEDKKHERHPIFGNIVDEVAYHEKYPTIYHLRKKLVDSTDKADLRLIYLALAHMIKFRGHFLIEGDLNPDNSDVDKLFIQLVQTYNQLFEENPINASGVDAKAILSARLSKSRRLENLIAQLPGEKKNGLFGNLIALSLGLTPNFKSNFDLAEDAKLQLSKDTYDDDLDNLLAQIGDQYADLFLAAKNLSDAILLSDILRVNTEITKAPLSASMIKRYDEHHQDLTLLKALVRQQLPEKYKEIFFDQSKNGYAGYIDGGASQEEFYKFIKPILEKMDGTEELLVKLNREDLLRKQRTFDNGSIPHQIHLGELHAILRRQEDFYPFLKDNREKIEKILTFRIPYYVGPLARGNSRFAWMTRKSEETITPWNFEEVVDKGASAQSFIERMTNFDKNLPNEKVLPKHSLLYEYFTVYNELTKVKYVTEGMRKPAFLSGEQKKAIVDLLFKTNRKVTVKQLKEDYFKKIECFDSVEISGVEDRFNASLGTYHDLLKIIKDKDFLDNEENEDILEDIVLTLTLFEDREMIEERLKTYAHLFDDKVMKQLKRRRYTGWGRLSRKLINGIRDKQSGKTILDFLKSDGFANRNFMQLIHDDSLTFKEDIQKAQVSGQGDSLHEHIANLAGSPAIKKGILQTVKVVDELVKVMGRHKPENIVIEMARENQTTQKGQKNSRERMKRIEEGIKELGSQILKEHPVENTQLQNEKLYLYYLQNGRDMYVDQELDINRLSDYDVDHIVPQSFLKDDSIDNKVLTRSDKARGKSDNVPSEEVVKKMKNYWRQLLNAKLITQRKFDNLTKAERGGLSELDKAGFIKRQLVETRQITKHVAQILDSRMNTKYDENDKLIREVKVITLKSKLVSDFRKDFQFYKVREINNYHHAHDAYLNAVVGTALIKKYPKLESEFVYGDYKVYDVRKMIAKSEQEIGKATAKYFFYSNIMNFFKTEITLANGEIRKRPLIETNGETGEIVWDKGRDFATVRKVLSMPQVNIVKKTEVQTGGFSKESILPKRNSDKLIARKKDWDPKKYGGFDSPTVAYSVLVVAKVEKGKSKKLKSVKELLGITIMERSSFEKNPIDFLEAKGYKEVKKDLIIKLPKYSLFELENGRKRMLASAGELQKGNELALPSKYVNFLYLASHYEKLKGSPEDNEQKQLFVEQHKHYLDEIIEQISEFSKRVILADANLDKVLSAYNKHRDKPIREQAENIIHLFTLTNLGAPAAFKYFDTTIDRKRYTSTKEVLDATLIHQSITGLYETRIDLSQLGGDGGGGSEAAAKPAPGGTAPLEEEYRLFLEAPIQNVTLLEQWKREIPKVWAEINPPGLASTQAPIHVQLLSTALPVRVRQYPITLEAKRSLRETIRKFRAAGILRPVHSPWNTPLLPVRKSGTSEYRMVQDLREVNKRVETIHPTVPNPYTLLSLLPPDRIWYSVLDLKDAFFCIPLAPESQLIFAFEWADAEEGESGQLTWTRLPQGFKNSPTLFDEALNRDLQGFRLDHPSVSLLQYVDDLLIAADTQAACLSATRDLLMTLAELGYRVSGKKAQLCQEEVTYLGFKIHKGSRSLSNSRTQAILQIPVPKTKRQVREFLGTIGYCRLWIPGFAELAQPLYAATRGGNDPLVWGEKEEEAFQSLKLALTQPPALALPSLDKPFQLFVEETSGAAKGVLTQALGPWKRPVAYLSKRLDPVAAGWPRCLRAIAAAALLTREASKLTFGQDIEITSSHNLESLLRSPPDKWLTNARITQYQVLLLDPPRVRFKQTAALNPATLLPETDDTLPIHHCLDTLDSLTSTRPDLTDQPLAQAEATLFTDGSSYIRDGKRYAGAAVVTLDSVIWAEPLPIGTSAQKAELIALTKALEWSKDKSVNIYTDSRYAFATLHVHGMIYRERGLLTAGGKAIKNAPEILALLTAVWLPKRVAVMHCKGHQKDDAPTSTGNRRADEVAREVAIRPLSTQATISAGKRTADGSEFEKRTADGSEFESPKKKAKVE

SEQ ID NO: 12 - protein, 2093 aa, synthetic construct
MPAAKRVKLDGGDKKYSIGLDIGTNSVGWAVITDEYKVPSKKFKVLGNTDRHSIKKNLIGALLFDSGETAEATRLKRTARRRYTRRKNRICYLQEIFSNEMAKVDDSFFHRLEESFLVEEDKKHERHPIFGNIVDEVAYHEKYPTIYHLRKKLVDSTDKADLRLIYLALAHMIKFRGHFLIEGDLNPDNSDVDKLFIQLVQTYNQLFEENPINASGVDAKAILSARLSKSRRLENLIAQLPGEKKNGLFGNLIALSLGLTPNFKSNFDLAEDAKLQLSKDTYDDDLDNLLAQIGDQYADLFLAAKNLSDAILLSDILRVNTEITKAPLSASMIKRYDEHHQDLTLLKALVRQQLPEKYKEIFFDQSKNGYAGYIDGGASQEEFYKFIKPILEKMDGTEELLVKLNREDLLRKQRTFDNGSIPHQIHLGELHAILRRQEDFYPFLKDNREKIEKILTFRIPYYVGPLARGNSRFAWMTRKSEETITPWNFEEVVDKGASAQSFIERMTNFDKNLPNEKVLPKHSLLYEYFTVYNELTKVKYVTEGMRKPAFLSGEQKKAIVDLLFKTNRKVTVKQLKEDYFKKIECFDSVEISGVEDRFNASLGTYHDLLKIIKDKDFLDNEENEDILEDIVLTLTLFEDREMIEERLKTYAHLFDDKVMKQLKRRRYTGWGRLSRKLINGIRDKQSGKTILDFLKSDGFANRNFMQLIHDDSLTFKEDIQKAQVSGQGDSLHEHIANLAGSPAIKKGILQTVKVVDELVKVMGRHKPENIVIEMARENQTTQKGQKNSRERMKRIEEGIKELGSQILKEHPVENTQLQNEKLYLYYLQNGRDMYVDQELDINRLSDYDVDHIVPQSFLKDDSIDNKVLTRSDKARGKSDNVPSEEVVKKMKNYWRQLLNAKLITQRKFDNLTKAERGGLSELDKAGFIKRQLVETRQITKHVAQILDSRMNTKYDENDKLIREVKVITLKSKLVSDFRKDFQFYKVREINNYHHAHDAYLNAVVGTALIKKYPKLESEFVYGDYKVYDVRKMIAKSEQEIGKATAKYFFYSNIMNFFKTEITLANGEIRKRPLIETNGETGEIVWDKGRDFATVRKVLSMPQVNIVKKTEVQTGGFSKESILPKRNSDKLIARKKDWDPKKYGGFDSPTVAYSVLVVAKVEKGKSKKLKSVKELLGITIMERSSFEKNPIDFLEAKGYKEVKKDLIIKLPKYSLFELENGRKRMLASAGELQKGNELALPSKYVNFLYLASHYEKLKGSPEDNEQKQLFVEQHKHYLDEIIEQISEFSKRVILADANLDKVLSAYNKHRDKPIREQAENIIHLFTLTNLGAPAAFKYFDTTIDRKRYTSTKEVLDATLIHQSITGLYETRIDLSQLGGDGGGGSGGGGGTAPLEEEYRLFLEAPIQNVTLLEQWKREIPKVWAEINPPGLASTQAPIHVQLLSTALPVRVRQYPITLEAKRSLRETIRKFRAAGILRPVHSPWNTPLLPVRKSGTSEYRMVQDLREVNKRVETIHPTVPNPYTLLSLLPPDRIWYSVLDLKDAFFCIPLAPESQLIFAFEWADAEEGESGQLTWTRLPQGFKNSPTLFDEALNRDLQGFRLDHPSVSLLQYVDDLLIAADTQAACLSATRDLLMTLAELGYRVSGKKAQLCQEEVTYLGFKIHKGSRSLSNSRTQAILQIPVPKTKRQVREFLGTIGYCRLWIPGFAELAQPLYAATRGGNDPLVWGEKEEEAFQSLKLALTQPPALALPSLDKPFQLFVEETSGAAKGVLTQALGPWKRPVAYLSKRLDPVAAGWPRCLRAIAAAALLTREASKLTFGQDIEITSSHNLESLLRSPPDKWLTNARITQYQVLLLDPPRVRFKQTAALNPATLLPETDDTLPIHHCLDTLDSLTSTRPDLTDQPLAQAEATLFTDGSSYIRDGKRYAGAAVVTLDSVIWAEPLPIGTSAQKAELIALTKALEWSKDKSVNIYTDSRYAFATLHVHGMIYRERGLLTAGGKAIKNAPEILALLTAVWLPKRVAVMHCKGHQKDDAPTSTGNRRADEVAREVAIRPLSTQATISAGKRTADGSEFEKRTADGSEFESPKKKAKVE

SEQ ID NO: 13 - protein, 2103 aa, synthetic construct
MPAAKRVKLDGGDKKYSIGLDIGTNSVGWAVITDEYKVPSKKFKVLGNTDRHSIKKNLIGALLFDSGETAEATRLKRTARRRYTRRKNRICYLQEIFSNEMAKVDDSFFHRLEESFLVEEDKKHERHPIFGNIVDEVAYHEKYPTIYHLRKKLVDSTDKADLRLIYLALAHMIKFRGHFLIEGDLNPDNSDVDKLFIQLVQTYNQLFEENPINASGVDAKAILSARLSKSRRLENLIAQLPGEKKNGLFGNLIALSLGLTPNFKSNFDLAEDAKLQLSKDTYDDDLDNLLAQIGDQYADLFLAAKNLSDAILLSDILRVNTEITKAPLSASMIKRYDEHHQDLTLLKALVRQQLPEKYKEIFFDQSKNGYAGYIDGGASQEEFYKFIKPILEKMDGTEELLVKLNREDLLRKQRTFDNGSIPHQIHLGELHAILRRQEDFYPFLKDNREKIEKILTFRIPYYVGPLARGNSRFAWMTRKSEETITPWNFEEVVDKGASAQSFIERMTNFDKNLPNEKVLPKHSLLYEYFTVYNELTKVKYVTEGMRKPAFLSGEQKKAIVDLLFKTNRKVTVKQLKEDYFKKIECFDSVEISGVEDRFNASLGTYHDLLKIIKDKDFLDNEENEDILEDIVLTLTLFEDREMIEERLKTYAHLFDDKVMKQLKRRRYTGWGRLSRKLINGIRDKQSGKTILDFLKSDGFANRNFMQLIHDDSLTFKEDIQKAQVSGQGDSLHEHIANLAGSPAIKKGILQTVKVVDELVKVMGRHKPENIVIEMARENQTTQKGQKNSRERMKRIEEGIKELGSQILKEHPVENTQLQNEKLYLYYLQNGRDMYVDQELDINRLSDYDVDHIVPQSFLKDDSIDNKVLTRSDKARGKSDNVPSEEVVKKMKNYWRQLLNAKLITQRKFDNLTKAERGGLSELDKAGFIKRQLVETRQITKHVAQILDSRMNTKYDENDKLIREVKVITLKSKLVSDFRKDFQFYKVREINNYHHAHDAYLNAVVGTALIKKYPKLESEFVYGDYKVYDVRKMIAKSEQEIGKATAKYFFYSNIMNFFKTEITLANGEIRKRPLIETNGETGEIVWDKGRDFATVRKVLSMPQVNIVKKTEVQTGGFSKESILPKRNSDKLIARKKDWDPKKYGGFDSPTVAYSVLVVAKVEKGKSKKLKSVKELLGITIMERSSFEKNPIDFLEAKGYKEVKKDLIIKLPKYSLFELENGRKRMLASAGELQKGNELALPSKYVNFLYLASHYEKLKGSPEDNEQKQLFVEQHKHYLDEIIEQISEFSKRVILADANLDKVLSAYNKHRDKPIREQAENIIHLFTLTNLGAPAAFKYFDTTIDRKRYTSTKEVLDATLIHQSITGLYETRIDLSQLGGDGGSGSETPGTSESATPESGGTAPLEEEYRLFLEAPIQNVTLLEQWKREIPKVWAEINPPGLASTQAPIHVQLLSTALPVRVRQYPITLEAKRSLRETIRKFRAAGILRPVHSPWNTPLLPVRKSGTSEYRMVQDLREVNKRVETIHPTVPNPYTLLSLLPPDRIWYSVLDLKDAFFCIPLAPESQLIFAFEWADAEEGESGQLTWTRLPQGFKNSPTLFDEALNRDLQGFRLDHPSVSLLQYVDDLLIAADTQAACLSATRDLLMTLAELGYRVSGKKAQLCQEEVTYLGFKIHKGSRSLSNSRTQAILQIPVPKTKRQVREFLGTIGYCRLWIPGFAELAQPLYAATRGGNDPLVWGEKEEEAFQSLKLALTQPPALALPSLDKPFQLFVEETSGAAKGVLTQALGPWKRPVAYLSKRLDPVAAGWPRCLRAIAAAALLTREASKLTFGQDIEITSSHNLESLLRSPPDKWLTNARITQYQVLLLDPPRVRFKQTAALNPATLLPETDDTLPIHHCLDTLDSLTSTRPDLTDQPLAQAEATLFTDGSSYIRDGKRYAGAAVVTLDSVIWAEPLPIGTSAQKAELIALTKALEWSKDKSVNIYTDSRYAFATLHVHGMIYRERGLLTAGGKAIKNAPEILALLTAVWLPKRVAVMHCKGHQKDDAPTSTGNRRADEVAREVAIRPLSTQATISAGKRTADGSEFEKRTADGSEFESPKKKAKVE

SEQ ID NO: 14 - protein, 2099 aa, synthetic construct
MPAAKRVKLDGGDKKYSIGLDIGTNSVGWAVITDEYKVPSKKFKVLGNTDRHSIKKNLIGALLFDSGETAEATRLKRTARRRYTRRKNRICYLQEIFSNEMAKVDDSFFHRLEESFLVEEDKKHERHPIFGNIVDEVAYHEKYPTIYHLRKKLVDSTDKADLRLIYLALAHMIKFRGHFLIEGDLNPDNSDVDKLFIQLVQTYNQLFEENPINASGVDAKAILSARLSKSRRLENLIAQLPGEKKNGLFGNLIALSLGLTPNFKSNFDLAEDAKLQLSKDTYDDDLDNLLAQIGDQYADLFLAAKNLSDAILLSDILRVNTEITKAPLSASMIKRYDEHHQDLTLLKALVRQQLPEKYKEIFFDQSKNGYAGYIDGGASQEEFYKFIKPILEKMDGTEELLVKLNREDLLRKQRTFDNGSIPHQIHLGELHAILRRQEDFYPFLKDNREKIEKILTFRIPYYVGPLARGNSRFAWMTRKSEETITPWNFEEVVDKGASAQSFIERMTNFDKNLPNEKVLPKHSLLYEYFTVYNELTKVKYVTEGMRKPAFLSGEQKKAIVDLLFKTNRKVTVKQLKEDYFKKIECFDSVEISGVEDRFNASLGTYHDLLKIIKDKDFLDNEENEDILEDIVLTLTLFEDREMIEERLKTYAHLFDDKVMKQLKRRRYTGWGRLSRKLINGIRDKQSGKTILDFLKSDGFANRNFMQLIHDDSLTFKEDIQKAQVSGQGDSLHEHIANLAGSPAIKKGILQTVKVVDELVKVMGRHKPENIVIEMARENQTTQKGQKNSRERMKRIEEGIKELGSQILKEHPVENTQLQNEKLYLYYLQNGRDMYVDQELDINRLSDYDVDHIVPQSFLKDDSIDNKVLTRSDKARGKSDNVPSEEVVKKMKNYWRQLLNAKLITQRKFDNLTKAERGGLSELDKAGFIKRQLVETRQITKHVAQILDSRMNTKYDENDKLIREVKVITLKSKLVSDFRKDFQFYKVREINNYHHAHDAYLNAVVGTALIKKYPKLESEFVYGDYKVYDVRKMIAKSEQEIGKATAKYFFYSNIMNFFKTEITLANGEIRKRPLIETNGETGEIVWDKGRDFATVRKVLSMPQVNIVKKTEVQTGGFSKESILPKRNSDKLIARKKDWDPKKYGGFDSPTVAYSVLVVAKVEKGKSKKLKSVKELLGITIMERSSFEKNPIDFLEAKGYKEVKKDLIIKLPKYSLFELENGRKRMLASAGELQKGNELALPSKYVNFLYLASHYEKLKGSPEDNEQKQLFVEQHKHYLDEIIEQISEFSKRVILADANLDKVLSAYNKHRDKPIREQAENIIHLFTLTNLGAPAAFKYFDTTIDRKRYTSTKEVLDATLIHQSITGLYETRIDLSQLGGDGGGSAGSAAGSGEFGGTAPLEEEYRLFLEAPIQNVTLLEQWKREIPKVWAEINPPGLASTQAPIHVQLLSTALPVRVRQYPITLEAKRSLRETIRKFRAAGILRPVHSPWNTPLLPVRKSGTSEYRMVQDLREVNKRVETIHPTVPNPYTLLSLLPPDRIWYSVLDLKDAFFCIPLAPESQLIFAFEWADAEEGESGQLTWTRLPQGFKNSPTLFDEALNRDLQGFRLDHPSVSLLQYVDDLLIAADTQAACLSATRDLLMTLAELGYRVSGKKAQLCQEEVTYLGFKIHKGSRSLSNSRTQAILQIPVPKTKRQVREFLGTIGYCRLWIPGFAELAQPLYAATRGGNDPLVWGEKEEEAFQSLKLALTQPPALALPSLDKPFQLFVEETSGAAKGVLTQALGPWKRPVAYLSKRLDPVAAGWPRCLRAIAAAALLTREASKLTFGQDIEITSSHNLESLLRSPPDKWLTNARITQYQVLLLDPPRVRFKQTAALNPATLLPETDDTLPIHHCLDTLDSLTSTRPDLTDQPLAQAEATLFTDGSSYIRDGKRYAGAAVVTLDSVIWAEPLPIGTSAQKAELIALTKALEWSKDKSVNIYTDSRYAFATLHVHGMIYRERGLLTAGGKAIKNAPEILALLTAVWLPKRVAVMHCKGHQKDDAPTSTGNRRADEVAREVAIRPLSTQATISAGKRTADGSEFEKRTADGSEFESPKKKAKVE

SEQ ID NO: 15 - protein, 2096 aa, synthetic construct
MPAAKRVKLDGGDKKYSIGLDIGTNSVGWAVITDEYKVPSKKFKVLGNTDRHSIKKNLIGALLFDSGETAEATRLKRTARRRYTRRKNRICYLQEIFSNEMAKVDDSFFHRLEESFLVEEDKKHERHPIFGNIVDEVAYHEKYPTIYHLRKKLVDSTDKADLRLIYLALAHMIKFRGHFLIEGDLNPDNSDVDKLFIQLVQTYNQLFEENPINASGVDAKAILSARLSKSRRLENLIAQLPGEKKNGLFGNLIALSLGLTPNFKSNFDLAEDAKLQLSKDTYDDDLDNLLAQIGDQYADLFLAAKNLSDAILLSDILRVNTEITKAPLSASMIKRYDEHHQDLTLLKALVRQQLPEKYKEIFFDQSKNGYAGYIDGGASQEEFYKFIKPILEKMDGTEELLVKLNREDLLRKQRTFDNGSIPHQIHLGELHAILRRQEDFYPFLKDNREKIEKILTFRIPYYVGPLARGNSRFAWMTRKSEETITPWNFEEVVDKGASAQSFIERMTNFDKNLPNEKVLPKHSLLYEYFTVYNELTKVKYVTEGMRKPAFLSGEQKKAIVDLLFKTNRKVTVKQLKEDYFKKIECFDSVEISGVEDRFNASLGTYHDLLKIIKDKDFLDNEENEDILEDIVLTLTLFEDREMIEERLKTYAHLFDDKVMKQLKRRRYTGWGRLSRKLINGIRDKQSGKTILDFLKSDGFANRNFMQLIHDDSLTFKEDIQKAQVSGQGDSLHEHIANLAGSPAIKKGILQTVKVVDELVKVMGRHKPENIVIEMARENQTTQKGQKNSRERMKRIEEGIKELGSQILKEHPVENTQLQNEKLYLYYLQNGRDMYVDQELDINRLSDYDVDHIVPQSFLKDDSIDNKVLTRSDKARGKSDNVPSEEVVKKMKNYWRQLLNAKLITQRKFDNLTKAERGGLSELDKAGFIKRQLVETRQITKHVAQILDSRMNTKYDENDKLIREVKVITLKSKLVSDFRKDFQFYKVREINNYHHAHDAYLNAVVGTALIKKYPKLESEFVYGDYKVYDVRKMIAKSEQEIGKATAKYFFYSNIMNFFKTEITLANGEIRKRPLIETNGETGEIVWDKGRDFATVRKVLSMPQVNIVKKTEVQTGGFSKESILPKRNSDKLIARKKDWDPKKYGGFDSPTVAYSVLVVAKVEKGKSKKLKSVKELLGITIMERSSFEKNPIDFLEAKGYKEVKKDLIIKLPKYSLFELENGRKRMLASAGELQKGNELALPSKYVNFLYLASHYEKLKGSPEDNEQKQLFVEQHKHYLDEIIEQISEFSKRVILADANLDKVLSAYNKHRDKPIREQAENIIHLFTLTNLGAPAAFKYFDTTIDRKRYTSTKEVLDATLIHQSITGLYETRIDLSQLGGDGGGGGPAPGGSGGTAPLEEEYRLFLEAPIQNVTLLEQWKREIPKVWAEINPPGLASTQAPIHVQLLSTALPVRVRQYPITLEAKRSLRETIRKFRAAGILRPVHSPWNTPLLPVRKSGTSEYRMVQDLREVNKRVETIHPTVPNPYTLLSLLPPDRIWYSVLDLKDAFFCIPLAPESQLIFAFEWADAEEGESGQLTWTRLPQGFKNSPTLFDEALNRDLQGFRLDHPSVSLLQYVDDLLIAADTQAACLSATRDLLMTLAELGYRVSGKKAQLCQEEVTYLGFKIHKGSRSLSNSRTQAILQIPVPKTKRQVREFLGTIGYCRLWIPGFAELAQPLYAATRGGNDPLVWGEKEEEAFQSLKLALTQPPALALPSLDKPFQLFVEETSGAAKGVLTQALGPWKRPVAYLSKRLDPVAAGWPRCLRAIAAAALLTREASKLTFGQDIEITSSHNLESLLRSPPDKWLTNARITQYQVLLLDPPRVRFKQTAALNPATLLPETDDTLPIHHCLDTLDSLTSTRPDLTDQPLAQAEATLFTDGSSYIRDGKRYAGAAVVTLDSVIWAEPLPIGTSAQKAELIALTKALEWSKDKSVNIYTDSRYAFATLHVHGMIYRERGLLTAGGKAIKNAPEILALLTAVWLPKRVAVMHCKGHQKDDAPTSTGNRRADEVAREVAIRPLSTQATISAGKRTADGSEFEKRTADGSEFESPKKKAKVE

SEQ ID NO: 16 - protein, 2098 aa, synthetic construct
MPAAKRVKLDGGDKKYSIGLDIGTNSVGWAVITDEYKVPSKKFKVLGNTDRHSIKKNLIGALLFDSGETAEATRLKRTARRRYTRRKNRICYLQEIFSNEMAKVDDSFFHRLEESFLVEEDKKHERHPIFGNIVDEVAYHEKYPTIYHLRKKLVDSTDKADLRLIYLALAHMIKFRGHFLIEGDLNPDNSDVDKLFIQLVQTYNQLFEENPINASGVDAKAILSARLSKSRRLENLIAQLPGEKKNGLFGNLIALSLGLTPNFKSNFDLAEDAKLQLSKDTYDDDLDNLLAQIGDQYADLFLAAKNLSDAILLSDILRVNTEITKAPLSASMIKRYDEHHQDLTLLKALVRQQLPEKYKEIFFDQSKNGYAGYIDGGASQEEFYKFIKPILEKMDGTEELLVKLNREDLLRKQRTFDNGSIPHQIHLGELHAILRRQEDFYPFLKDNREKIEKILTFRIPYYVGPLARGNSRFAWMTRKSEETITPWNFEEVVDKGASAQSFIERMTNFDKNLPNEKVLPKHSLLYEYFTVYNELTKVKYVTEGMRKPAFLSGEQKKAIVDLLFKTNRKVTVKQLKEDYFKKIECFDSVEISGVEDRFNASLGTYHDLLKIIKDKDFLDNEENEDILEDIVLTLTLFEDREMIEERLKTYAHLFDDKVMKQLKRRRYTGWGRLSRKLINGIRDKQSGKTILDFLKSDGFANRNFMQLIHDDSLTFKEDIQKAQVSGQGDSLHEHIANLAGSPAIKKGILQTVKVVDELVKVMGRHKPENIVIEMARENQTTQKGQKNSRERMKRIEEGIKELGSQILKEHPVENTQLQNEKLYLYYLQNGRDMYVDQELDINRLSDYDVDHIVPQSFLKDDSIDNKVLTRSDKARGKSDNVPSEEVVKKMKNYWRQLLNAKLITQRKFDNLTKAERGGLSELDKAGFIKRQLVETRQITKHVAQILDSRMNTKYDENDKLIREVKVITLKSKLVSDFRKDFQFYKVREINNYHHAHDAYLNAVVGTALIKKYPKLESEFVYGDYKVYDVRKMIAKSEQEIGKATAKYFFYSNIMNFFKTEITLANGEIRKRPLIETNGETGEIVWDKGRDFATVRKVLSMPQVNIVKKTEVQTGGFSKESILPKRNSDKLIARKKDWDPKKYGGFDSPTVAYSVLVVAKVEKGKSKKLKSVKELLGITIMERSSFEKNPIDFLEAKGYKEVKKDLIIKLPKYSLFELENGRKRMLASAGELQKGNELALPSKYVNFLYLASHYEKLKGSPEDNEQKQLFVEQHKHYLDEIIEQISEFSKRVILADANLDKVLSAYNKHRDKPIREQAENIIHLFTLTNLGAPAAFKYFDTTIDRKRYTSTKEVLDATLIHQSITGLYETRIDLSQLGGDGGGSSGGGEAAAKGGTAPLEEEYRLFLEAPIQNVTLLEQWKREIPKVWAEINPPGLASTQAPIHVQLLSTALPVRVRQYPITLEAKRSLRETIRKFRAAGILRPVHSPWNTPLLPVRKSGTSEYRMVQDLREVNKRVETIHPTVPNPYTLLSLLPPDRIWYSVLDLKDAFFCIPLAPESQLIFAFEWADAEEGESGQLTWTRLPQGFKNSPTLFDEALNRDLQGFRLDHPSVSLLQYVDDLLIAADTQAACLSATRDLLMTLAELGYRVSGKKAQLCQEEVTYLGFKIHKGSRSLSNSRTQAILQIPVPKTKRQVREFLGTIGYCRLWIPGFAELAQPLYAATRGGNDPLVWGEKEEEAFQSLKLALTQPPALALPSLDKPFQLFVEETSGAAKGVLTQALGPWKRPVAYLSKRLDPVAAGWPRCLRAIAAAALLTREASKLTFGQDIEITSSHNLESLLRSPPDKWLTNARITQYQVLLLDPPRVRFKQTAALNPATLLPETDDTLPIHHCLDTLDSLTSTRPDLTDQPLAQAEATLFTDGSSYIRDGKRYAGAAVVTLDSVIWAEPLPIGTSAQKAELIALTKALEWSKDKSVNIYTDSRYAFATLHVHGMIYRERGLLTAGGKAIKNAPEILALLTAVWLPKRVAVMHCKGHQKDDAPTSTGNRRADEVAREVAIRPLSTQATISAGKRTADGSEFEKRTADGSEFESPKKKAKVE

SEQ ID NO: 17 - protein, 1998 aa, synthetic construct
MPAAKRVKLDGGDKKYSIGLDIGTNSVGWAVITDEYKVPSKKFKVLGNTDRHSIKKNLIGALLFDSGETAEATRLKRTARRRYTRRKNRICYLQEIFSNEMAKVDDSFFHRLEESFLVEEDKKHERHPIFGNIVDEVAYHEKYPTIYHLRKKLVDSTDKADLRLIYLALAHMIKFRGHFLIEGDLNPDNSDVDKLFIQLVQTYNQLFEENPINASGVDAKAILSARLSKSRRLENLIAQLPGEKKNGLFGNLIALSLGLTPNFKSNFDLAEDAKLQLSKDTYDDDLDNLLAQIGDQYADLFLAAKNLSDAILLSDILRVNTEITKAPLSASMIKRYDEHHQDLTLLKALVRQQLPEKYKEIFFDQSKNGYAGYIDGGASQEEFYKFIKPILEKMDGTEELLVKLNREDLLRKQRTFDNGSIPHQIHLGELHAILRRQEDFYPFLKDNREKIEKILTFRIPYYVGPLARGNSRFAWMTRKSEETITPWNFEEVVDKGASAQSFIERMTNFDKNLPNEKVLPKHSLLYEYFTVYNELTKVKYVTEGMRKPAFLSGEQKKAIVDLLFKTNRKVTVKQLKEDYFKKIECFDSVEISGVEDRFNASLGTYHDLLKIIKDKDFLDNEENEDILEDIVLTLTLFEDREMIEERLKTYAHLFDDKVMKQLKRRRYTGWGRLSRKLINGIRDKQSGKTILDFLKSDGFANRNFMQLIHDDSLTFKEDIQKAQVSGQGDSLHEHIANLAGSPAIKKGILQTVKVVDELVKVMGRHKPENIVIEMARENQTTQKGQKNSRERMKRIEEGIKELGSQILKEHPVENTQLQNEKLYLYYLQNGRDMYVDQELDINRLSDYDVDHIVPQSFLKDDSIDNKVLTRSDKARGKSDNVPSEEVVKKMKNYWRQLLNAKLITQRKFDNLTKAERGGLSELDKAGFIKRQLVETRQITKHVAQILDSRMNTKYDENDKLIREVKVITLKSKLVSDFRKDFQFYKVREINNYHHAHDAYLNAVVGTALIKKYPKLESEFVYGDYKVYDVRKMIAKSEQEIGKATAKYFFYSNIMNFFKTEITLANGEIRKRPLIETNGETGEIVWDKGRDFATVRKVLSMPQVNIVKKTEVQTGGFSKESILPKRNSDKLIARKKDWDPKKYGGFDSPTVAYSVLVVAKVEKGKSKKLKSVKELLGITIMERSSFEKNPIDFLEAKGYKEVKKDLIIKLPKYSLFELENGRKRMLASAGELQKGNELALPSKYVNFLYLASHYEKLKGSPEDNEQKQLFVEQHKHYLDEIIEQISEFSKRVILADANLDKVLSAYNKHRDKPIREQAENIIHLFTLTNLGAPAAFKYFDTTIDRKRYTSTKEVLDATLIHQSITGLYETRIDLSQLGGDGGPAPEAAAKGGGVLDTPPSHIGLEHLPPPPEVPQFPLNLERLQALQDLVHRSLEAGYISPWDGPGNNPVFPVRKPNGAWRFVHDLRATNALTKPIPALSPGPPDLTAIPTHPPHIICLDLKDAFFQIPVEDRFRFYLSFTLPSPGGLQPHRRFAWRVLPQGFINSPALFERALQEPLRQVSAAFSQSLLVSYMDDILYASPTEEQRSQCYQALAARLRDLGFQVASEKTSQTPSPVPFLGQMVHEQIVTYQSLPTLQISSPISLHQLQAVLGDLQWVSRGTPTTRRPLQLLYSSLKRHHDPRAIIQLSPEQLQGIAELRQALSHNARSRYNEQEPLLAYVHLTRAGSTLVLFQKGAQFPLAYFQTPLTDNQASPWGLLLLLGCQYLQTQALSSYAKPILKYYHNLPKTSLDNWIQSSEDPRVQELLQLWPQISSQGIQPPGPWKTLITRAEVFLTPQFSPDPIPAALCLFSDGATGRGAYCLWKDHLLDFQAVPAPESAQKGELAGLLAGLAAAPPEPVNIWVDSKYLYSLLRTLVLGAWLQPDPVPSYALLYKSLLRHPAIVVGHVRSHSSASHPIASLNNYVDQLAGKRTADGSEFEKRTADGSEFESPKKKAKVE

SEQ ID NO: 18 - protein, 2116 aa, synthetic construct
MPAAKRVKLDGGDKKYSIGLDIGTNSVGWAVITDEYKVPSKKFKVLGNTDRHSIKKNLIGALLFDSGETAEATRLKRTARRRYTRRKNRICYLQEIFSNEMAKVDDSFFHRLEESFLVEEDKKHERHPIFGNIVDEVAYHEKYPTIYHLRKKLVDSTDKADLRLIYLALAHMIKFRGHFLIEGDLNPDNSDVDKLFIQLVQTYNQLFEENPINASGVDAKAILSARLSKSRRLENLIAQLPGEKKNGLFGNLIALSLGLTPNFKSNFDLAEDAKLQLSKDTYDDDLDNLLAQIGDQYADLFLAAKNLSDAILLSDILRVNTEITKAPLSASMIKRYDEHHQDLTLLKALVRQQLPEKYKEIFFDQSKNGYAGYIDGGASQEEFYKFIKPILEKMDGTEELLVKLNREDLLRKQRTFDNGSIPHQIHLGELHAILRRQEDFYPFLKDNREKIEKILTFRIPYYVGPLARGNSRFAWMTRKSEETITPWNFEEVVDKGASAQSFIERMTNFDKNLPNEKVLPKHSLLYEYFTVYNELTKVKYVTEGMRKPAFLSGEQKKAIVDLLFKTNRKVTVKQLKEDYFKKIECFDSVEISGVEDRFNASLGTYHDLLKIIKDKDFLDNEENEDILEDIVLTLTLFEDREMIEERLKTYAHLFDDKVMKQLKRRRYTGWGRLSRKLINGIRDKQSGKTILDFLKSDGFANRNFMQLIHDDSLTFKEDIQKAQVSGQGDSLHEHIANLAGSPAIKKGILQTVKVVDELVKVMGRHKPENIVIEMARENQTTQKGQKNSRERMKRIEEGIKELGSQILKEHPVENTQLQNEKLYLYYLQNGRDMYVDQELDINRLSDYDVDHIVPQSFLKDDSIDNKVLTRSDKARGKSDNVPSEEVVKKMKNYWRQLLNAKLITQRKFDNLTKAERGGLSELDKAGFIKRQLVETRQITKHVAQILDSRMNTKYDENDKLIREVKVITLKSKLVSDFRKDFQFYKVREINNYHHAHDAYLNAVVGTALIKKYPKLESEFVYGDYKVYDVRKMIAKSEQEIGKATAKYFFYSNIMNFFKTEITLANGEIRKRPLIETNGETGEIVWDKGRDFATVRKVLSMPQVNIVKKTEVQTGGFSKESILPKRNSDKLIARKKDWDPKKYGGFDSPTVAYSVLVVAKVEKGKSKKLKSVKELLGITIMERSSFEKNPIDFLEAKGYKEVKKDLIIKLPKYSLFELENGRKRMLASAGELQKGNELALPSKYVNFLYLASHYEKLKGSPEDNEQKQLFVEQHKHYLDEIIEQISEFSKRVILADANLDKVLSAYNKHRDKPIREQAENIIHLFTLTNLGAPAAFKYFDTTIDRKRYTSTKEVLDATLIHQSITGLYETRIDLSQLGGDGGEAAAKPAPGGGGGWVQEISDSRPMLHIYLNGRRFLGLLNTGADKTCIAGRDWPANWPIHQTESSLQGLGMACGVARSSQPLRWQHEDKSGIIHPFVIPTLPFTLWGRDIMKDIKVRLMTDSPDDSQDLMIGAIESNLFADQISWKSDQPVWLNQWPLKQEKLQALQQLVTEQLQLGHLEESNSPWNTPVFVIKKKSGKWRLLQDLRAVNATMHDMGALQPGLPSPVAPPKGWEIIIIDLQDCFFNIKLHPEDCKRFAFSVPSPNFKRPYQRFQWKVLPQGMKNSPTLCQKFVDKAILTVRDKYQDSYIVHYMDDILLAHPSRSIVDEILTSMIQALNKHGLVVSTEKIQKYDNLKYLGTHIQGDSVSYQKLQIRTDKLRTLNDFQKLLGNINWIRPFLKLTTGELKPLFEILNPDSNPISTRKLTPEACKALQLMNERLSTARVKRLDLSQPWSLCILKTEYTPTACLWQDGVVEWIHLPHISPKVITPYDIFCTQLIIKGRHRSKELFSKDPDYIVVPYTKVQFDLLLQEKEDWPISLLGFLGEVHFHLPKDPLLTFTLQTAIIFPHMTSTTPLEKGIVIFTDGSANGRSVTYIQGREPIIKENTQNTAQQAEIVAVITAFEEVSQPFNLYTDSKYVTGLFPEIETATLSPRTKIYTELKHLQRLIHKRQEKFYIGHIRGHTGLPGPLAQGNAYADSLTRILTAGKRTADGSEFEKRTADGSEFESPKKKAKVE

SEQ ID NO: 19 - protein, 2114 aa, synthetic construct
MPAAKRVKLDGGDKKYSIGLDIGTNSVGWAVITDEYKVPSKKFKVLGNTDRHSIKKNLIGALLFDSGETAEATRLKRTARRRYTRRKNRICYLQEIFSNEMAKVDDSFFHRLEESFLVEEDKKHERHPIFGNIVDEVAYHEKYPTIYHLRKKLVDSTDKADLRLIYLALAHMIKFRGHFLIEGDLNPDNSDVDKLFIQLVQTYNQLFEENPINASGVDAKAILSARLSKSRRLENLIAQLPGEKKNGLFGNLIALSLGLTPNFKSNFDLAEDAKLQLSKDTYDDDLDNLLAQIGDQYADLFLAAKNLSDAILLSDILRVNTEITKAPLSASMIKRYDEHHQDLTLLKALVRQQLPEKYKEIFFDQSKNGYAGYIDGGASQEEFYKFIKPILEKMDGTEELLVKLNREDLLRKQRTFDNGSIPHQIHLGELHAILRRQEDFYPFLKDNREKIEKILTFRIPYYVGPLARGNSRFAWMTRKSEETITPWNFEEVVDKGASAQSFIERMTNFDKNLPNEKVLPKHSLLYEYFTVYNELTKVKYVTEGMRKPAFLSGEQKKAIVDLLFKTNRKVTVKQLKEDYFKKIECFDSVEISGVEDRFNASLGTYHDLLKIIKDKDFLDNEENEDILEDIVLTLTLFEDREMIEERLKTYAHLFDDKVMKQLKRRRYTGWGRLSRKLINGIRDKQSGKTILDFLKSDGFANRNFMQLIHDDSLTFKEDIQKAQVSGQGDSLHEHIANLAGSPAIKKGILQTVKVVDELVKVMGRHKPENIVIEMARENQTTQKGQKNSRERMKRIEEGIKELGSQILKEHPVENTQLQNEKLYLYYLQNGRDMYVDQELDINRLSDYDVDHIVPQSFLKDDSIDNKVLTRSDKARGKSDNVPSEEVVKKMKNYWRQLLNAKLITQRKFDNLTKAERGGLSELDKAGFIKRQLVETRQITKHVAQILDSRMNTKYDENDKLIREVKVITLKSKLVSDFRKDFQFYKVREINNYHHAHDAYLNAVVGTALIKKYPKLESEFVYGDYKVYDVRKMIAKSEQEIGKATAKYFFYSNIMNFFKTEITLANGEIRKRPLIETNGETGEIVWDKGRDFATVRKVLSMPQVNIVKKTEVQTGGFSKESILPKRNSDKLIARKKDWDPKKYGGFDSPTVAYSVLVVAKVEKGKSKKLKSVKELLGITIMERSSFEKNPIDFLEAKGYKEVKKDLIIKLPKYSLFELENGRKRMLASAGELQKGNELALPSKYVNFLYLASHYEKLKGSPEDNEQKQLFVEQHKHYLDEIIEQISEFSKRVILADANLDKVLSAYNKHRDKPIREQAENIIHLFTLTNLGAPAAFKYFDTTIDRKRYTSTKEVLDATLIHQSITGLYETRIDLSQLGGDGGPAPGGGGGSGGWVQEISDSRPMLHIYLNGRRFLGLLNTGADKTCIAGRDWPANWPIHQTESSLQGLGMACGVARSSQPLRWQHEDKSGIIHPFVIPTLPFTLWGRDIMKDIKVRLMTDSPDDSQDLMIGAIESNLFADQISWKSDQPVWLNQWPLKQEKLQALQQLVTEQLQLGHLEESNSPWNTPVFVIKKKSGKWRLLQDLRAVNATMHDMGALQPGLPSPVAPPKGWEIIIIDLQDCFFNIKLHPEDCKRFAFSVPSPNFKRPYQRFQWKVLPQGMKNSPTLCQKFVDKAILTVRDKYQDSYIVHYMDDILLAHPSRSIVDEILTSMIQALNKHGLVVSTEKIQKYDNLKYLGTHIQGDSVSYQKLQIRTDKLRTLNDFQKLLGNINWIRPFLKLTTGELKPLFEILNPDSNPISTRKLTPEACKALQLMNERLSTARVKRLDLSQPWSLCILKTEYTPTACLWQDGVVEWIHLPHISPKVITPYDIFCTQLIIKGRHRSKELFSKDPDYIVVPYTKVQFDLLLQEKEDWPISLLGFLGEVHFHLPKDPLLTFTLQTAIIFPHMTSTTPLEKGIVIFTDGSANGRSVTYIQGREPIIKENTQNTAQQAEIVAVITAFEEVSQPFNLYTDSKYVTGLFPEIETATLSPRTKIYTELKHLQRLIHKRQEKFYIGHIRGHTGLPGPLAQGNAYADSLTRILTAGKRTADGSEFEKRTADGSEFESPKKKAKVE

SEQ ID NO: 20 - protein, 2114 aa, synthetic construct
MPAAKRVKLDGGDKKYSIGLDIGTNSVGWAVITDEYKVPSKKFKVLGNTDRHSIKKNLIGALLFDSGETAEATRLKRTARRRYTRRKNRICYLQEIFSNEMAKVDDSFFHRLEESFLVEEDKKHERHPIFGNIVDEVAYHEKYPTIYHLRKKLVDSTDKADLRLIYLALAHMIKFRGHFLIEGDLNPDNSDVDKLFIQLVQTYNQLFEENPINASGVDAKAILSARLSKSRRLENLIAQLPGEKKNGLFGNLIALSLGLTPNFKSNFDLAEDAKLQLSKDTYDDDLDNLLAQIGDQYADLFLAAKNLSDAILLSDILRVNTEITKAPLSASMIKRYDEHHQDLTLLKALVRQQLPEKYKEIFFDQSKNGYAGYIDGGASQEEFYKFIKPILEKMDGTEELLVKLNREDLLRKQRTFDNGSIPHQIHLGELHAILRRQEDFYPFLKDNREKIEKILTFRIPYYVGPLARGNSRFAWMTRKSEETITPWNFEEVVDKGASAQSFIERMTNFDKNLPNEKVLPKHSLLYEYFTVYNELTKVKYVTEGMRKPAFLSGEQKKAIVDLLFKTNRKVTVKQLKEDYFKKIECFDSVEISGVEDRFNASLGTYHDLLKIIKDKDFLDNEENEDILEDIVLTLTLFEDREMIEERLKTYAHLFDDKVMKQLKRRRYTGWGRLSRKLINGIRDKQSGKTILDFLKSDGFANRNFMQLIHDDSLTFKEDIQKAQVSGQGDSLHEHIANLAGSPAIKKGILQTVKVVDELVKVMGRHKPENIVIEMARENQTTQKGQKNSRERMKRIEEGIKELGSQILKEHPVENTQLQNEKLYLYYLQNGRDMYVDQELDINRLSDYDVDHIVPQSFLKDDSIDNKVLTRSDKARGKSDNVPSEEVVKKMKNYWRQLLNAKLITQRKFDNLTKAERGGLSELDKAGFIKRQLVETRQITKHVAQILDSRMNTKYDENDKLIREVKVITLKSKLVSDFRKDFQFYKVREINNYHHAHDAYLNAVVGTALIKKYPKLESEFVYGDYKVYDVRKMIAKSEQEIGKATAKYFFYSNIMNFFKTEITLANGEIRKRPLIETNGETGEIVWDKGRDFATVRKVLSMPQVNIVKKTEVQTGGFSKESILPKRNSDKLIARKKDWDPKKYGGFDSPTVAYSVLVVAKVEKGKSKKLKSVKELLGITIMERSSFEKNPIDFLEAKGYKEVKKDLIIKLPKYSLFELENGRKRMLASAGELQKGNELALPSKYVNFLYLASHYEKLKGSPEDNEQKQLFVEQHKHYLDEIIEQISEFSKRVILADANLDKVLSAYNKHRDKPIREQAENIIHLFTLTNLGAPAAFKYFDTTIDRKRYTSTKEVLDATLIHQSITGLYETRIDLSQLGGDGGGGSGSSGGGGGWVQEISDSRPMLHIYLNGRRFLGLLNTGADKTCIAGRDWPANWPIHQTESSLQGLGMACGVARSSQPLRWQHEDKSGIIHPFVIPTLPFTLWGRDIMKDIKVRLMTDSPDDSQDLMIGAIESNLFADQISWKSDQPVWLNQWPLKQEKLQALQQLVTEQLQLGHLEESNSPWNTPVFVIKKKSGKWRLLQDLRAVNATMHDMGALQPGLPSPVAPPKGWEIIIIDLQDCFFNIKLHPEDCKRFAFSVPSPNFKRPYQRFQWKVLPQGMKNSPTLCQKFVDKAILTVRDKYQDSYIVHYMDDILLAHPSRSIVDEILTSMIQALNKHGLVVSTEKIQKYDNLKYLGTHIQGDSVSYQKLQIRTDKLRTLNDFQKLLGNINWIRPFLKLTTGELKPLFEILNPDSNPISTRKLTPEACKALQLMNERLSTARVKRLDLSQPWSLCILKTEYTPTACLWQDGVVEWIHLPHISPKVITPYDIFCTQLIIKGRHRSKELFSKDPDYIVVPYTKVQFDLLLQEKEDWPISLLGFLGEVHFHLPKDPLLTFTLQTAIIFPHMTSTTPLEKGIVIFTDGSANGRSVTYIQGREPIIKENTQNTAQQAEIVAVITAFEEVSQPFNLYTDSKYVTGLFPEIETATLSPRTKIYTELKHLQRLIHKRQEKFYIGHIRGHTGLPGPLAQGNAYADSLTRILTAGKRTADGSEFEKRTADGSEFESPKKKAKVE

SEQ ID NO: 21 - protein, 2116 aa, synthetic construct
MPAAKRVKLDGGDKKYSIGLDIGTNSVGWAVITDEYKVPSKKFKVLGNTDRHSIKKNLIGALLFDSGETAEATRLKRTARRRYTRRKNRICYLQEIFSNEMAKVDDSFFHRLEESFLVEEDKKHERHPIFGNIVDEVAYHEKYPTIYHLRKKLVDSTDKADLRLIYLALAHMIKFRGHFLIEGDLNPDNSDVDKLFIQLVQTYNQLFEENPINASGVDAKAILSARLSKSRRLENLIAQLPGEKKNGLFGNLIALSLGLTPNFKSNFDLAEDAKLQLSKDTYDDDLDNLLAQIGDQYADLFLAAKNLSDAILLSDILRVNTEITKAPLSASMIKRYDEHHQDLTLLKALVRQQLPEKYKEIFFDQSKNGYAGYIDGGASQEEFYKFIKPILEKMDGTEELLVKLNREDLLRKQRTFDNGSIPHQIHLGELHAILRRQEDFYPFLKDNREKIEKILTFRIPYYVGPLARGNSRFAWMTRKSEETITPWNFEEVVDKGASAQSFIERMTNFDKNLPNEKVLPKHSLLYEYFTVYNELTKVKYVTEGMRKPAFLSGEQKKAIVDLLFKTNRKVTVKQLKEDYFKKIECFDSVEISGVEDRFNASLGTYHDLLKIIKDKDFLDNEENEDILEDIVLTLTLFEDREMIEERLKTYAHLFDDKVMKQLKRRRYTGWGRLSRKLINGIRDKQSGKTILDFLKSDGFANRNFMQLIHDDSLTFKEDIQKAQVSGQGDSLHEHIANLAGSPAIKKGILQTVKVVDELVKVMGRHKPENIVIEMARENQTTQKGQKNSRERMKRIEEGIKELGSQILKEHPVENTQLQNEKLYLYYLQNGRDMYVDQELDINRLSDYDVDHIVPQSFLKDDSIDNKVLTRSDKARGKSDNVPSEEVVKKMKNYWRQLLNAKLITQRKFDNLTKAERGGLSELDKAGFIKRQLVETRQITKHVAQILDSRMNTKYDENDKLIREVKVITLKSKLVSDFRKDFQFYKVREINNYHHAHDAYLNAVVGTALIKKYPKLESEFVYGDYKVYDVRKMIAKSEQEIGKATAKYFFYSNIMNFFKTEITLANGEIRKRPLIETNGETGEIVWDKGRDFATVRKVLSMPQVNIVKKTEVQTGGFSKESILPKRNSDKLIARKKDWDPKKYGGFDSPTVAYSVLVVAKVEKGKSKKLKSVKELLGITIMERSSFEKNPIDFLEAKGYKEVKKDLIIKLPKYSLFELENGRKRMLASAGELQKGNELALPSKYVNFLYLASHYEKLKGSPEDNEQKQLFVEQHKHYLDEIIEQISEFSKRVILADANLDKVLSAYNKHRDKPIREQAENIIHLFTLTNLGAPAAFKYFDTTIDRKRYTSTKEVLDATLIHQSITGLYETRIDLSQLGGDGGPAPGGSEAAAKGGVQEISDSRPMLHIYLNGRRFLGLLDTGADKTCIAGRDWPANWPIHQTESSLQGLGMACGVARSSQPLRWQHEDKSGIIHPFVIPTLPFTLWGRDIMKDIKVRLMTDSPDDSQDLMIGAIESNLFADQISWKSDQPVWLNQWPLKQEKLQALQQLVTEQLQLGHLEESNSPWNTPVFVIKKKSGKWRLLQDLRAVNATMHDMGALQPGLPSPPAVPKGWEIIIIDLQDCFFNIKLHPEDCKRFAFSVPSPNFKRPYQRFQWKVLPQGMKNSPTLCQKFVDKAILTVRDKYQDSYIVHYMDDILLAHPSRSIVDEILTSMIQALNKHGLVVSTEKIQKYDNLKYLGTHIQGDSVSYQKLQIRTDKLRTLNDFQKLLGNINWIRPFLKLTTGELKPLFEILNPDSNPISTRKLTPEACKALQLMNERLSTARVKRLDLSQPWSLCILKTEYTPTACLWQDGVVEWIHLPHISPKVITPYDIFCTQLIIKGRHRSKELFSKDPDYIVVPYTKVQFDLLLQEKEDWPISLLGFLGEVHFHLPKDPLLTFTLQTAIIFPHMTSTTPLEKGIVIFTDGSANGRSVTYIQGREPIIKENTQNTAQQAEIVAVITAFEEVSQPFNLYTDSKYVTGLFPEIETATLSPRTKIYTELKHLQRLIHKRQEKFYIGHIRGHTGLPGPLAQGNAYADSLTRILTAAGKRTADGSEFEKRTADGSEFESPKKKAKVE

SEQ ID NO: 22 - protein, 2116 aa, synthetic construct
MPAAKRVKLDGGDKKYSIGLDIGTNSVGWAVITDEYKVPSKKFKVLGNTDRHSIKKNLIGALLFDSGETAEATRLKRTARRRYTRRKNRICYLQEIFSNEMAKVDDSFFHRLEESFLVEEDKKHERHPIFGNIVDEVAYHEKYPTIYHLRKKLVDSTDKADLRLIYLALAHMIKFRGHFLIEGDLNPDNSDVDKLFIQLVQTYNQLFEENPINASGVDAKAILSARLSKSRRLENLIAQLPGEKKNGLFGNLIALSLGLTPNFKSNFDLAEDAKLQLSKDTYDDDLDNLLAQIGDQYADLFLAAKNLSDAILLSDILRVNTEITKAPLSASMIKRYDEHHQDLTLLKALVRQQLPEKYKEIFFDQSKNGYAGYIDGGASQEEFYKFIKPILEKMDGTEELLVKLNREDLLRKQRTFDNGSIPHQIHLGELHAILRRQEDFYPFLKDNREKIEKILTFRIPYYVGPLARGNSRFAWMTRKSEETITPWNFEEVVDKGASAQSFIERMTNFDKNLPNEKVLPKHSLLYEYFTVYNELTKVKYVTEGMRKPAFLSGEQKKAIVDLLFKTNRKVTVKQLKEDYFKKIECFDSVEISGVEDRFNASLGTYHDLLKIIKDKDFLDNEENEDILEDIVLTLTLFEDREMIEERLKTYAHLFDDKVMKQLKRRRYTGWGRLSRKLINGIRDKQSGKTILDFLKSDGFANRNFMQLIHDDSLTFKEDIQKAQVSGQGDSLHEHIANLAGSPAIKKGILQTVKVVDELVKVMGRHKPENIVIEMARENQTTQKGQKNSRERMKRIEEGIKELGSQILKEHPVENTQLQNEKLYLYYLQNGRDMYVDQELDINRLSDYDVDHIVPQSFLKDDSIDNKVLTRSDKARGKSDNVPSEEVVKKMKNYWRQLLNAKLITQRKFDNLTKAERGGLSELDKAGFIKRQLVETRQITKHVAQILDSRMNTKYDENDKLIREVKVITLKSKLVSDFRKDFQFYKVREINNYHHAHDAYLNAVVGTALIKKYPKLESEFVYGDYKVYDVRKMIAKSEQEIGKATAKYFFYSNIMNFFKTEITLANGEIRKRPLIETNGETGEIVWDKGRDFATVRKVLSMPQVNIVKKTEVQTGGFSKESILPKRNSDKLIARKKDWDPKKYGGFDSPTVAYSVLVVAKVEKGKSKKLKSVKELLGITIMERSSFEKNPIDFLEAKGYKEVKKDLIIKLPKYSLFELENGRKRMLASAGELQKGNELALPSKYVNFLYLASHYEKLKGSPEDNEQKQLFVEQHKHYLDEIIEQISEFSKRVILADANLDKVLSAYNKHRDKPIREQAENIIHLFTLTNLGAPAAFKYFDTTIDRKRYTSTKEVLDATLIHQSITGLYETRIDLSQLGGDGGGGSEAAAKGGGGGVQEISDSRPMLHIYLNGRRFLGLLDTGADKTCIAGRDWPANWPIHQTESSLQGLGMACGVARSSQPLRWQHEDKSGIIHPFVIPTLPFTLWGRDIMKDIKVRLMTDSPDDSQDLMIGAIESNLFADQISWKSDQPVWLNQWPLKQEKLQALQQLVTEQLQLGHLEESNSPWNTPVFVIKKKSGKWRLLQDLRAVNATMHDMGALQPGLPSPPAVPKGWEIIIIDLQDCFFNIKLHPEDCKRFAFSVPSPNFKRPYQRFQWKVLPQGMKNSPTLCQKFVDKAILTVRDKYQDSYIVHYMDDILLAHPSRSIVDEILTSMIQALNKHGLVVSTEKIQKYDNLKYLGTHIQGDSVSYQKLQIRTDKLRTLNDFQKLLGNINWIRPFLKLTTGELKPLFEILNPDSNPISTRKLTPEACKALQLMNERLSTARVKRLDLSQPWSLCILKTEYTPTACLWQDGVVEWIHLPHISPKVITPYDIFCTQLIIKGRHRSKELFSKDPDYIVVPYTKVQFDLLLQEKEDWPISLLGFLGEVHFHLPKDPLLTFTLQTAIIFPHMTSTTPLEKGIVIFTDGSANGRSVTYIQGREPIIKENTQNTAQQAEIVAVITAFEEVSQPFNLYTDSKYVTGLFPEIETATLSPRTKIYTELKHLQRLIHKRQEKFYIGHIRGHTGLPGPLAQGNAYADSLTRILTAAGKRTADGSEFEKRTADGSEFESPKKKAKVE

SEQ ID NO: 23 - protein, 2116 aa, synthetic construct
MPAAKRVKLDGGDKKYSIGLDIGTNSVGWAVITDEYKVPSKKFKVLGNTDRHSIKKNLIGALLFDSGETAEATRLKRTARRRYTRRKNRICYLQEIFSNEMAKVDDSFFHRLEESFLVEEDKKHERHPIFGNIVDEVAYHEKYPTIYHLRKKLVDSTDKADLRLIYLALAHMIKFRGHFLIEGDLNPDNSDVDKLFIQLVQTYNQLFEENPINASGVDAKAILSARLSKSRRLENLIAQLPGEKKNGLFGNLIALSLGLTPNFKSNFDLAEDAKLQLSKDTYDDDLDNLLAQIGDQYADLFLAAKNLSDAILLSDILRVNTEITKAPLSASMIKRYDEHHQDLTLLKALVRQQLPEKYKEIFFDQSKNGYAGYIDGGASQEEFYKFIKPILEKMDGTEELLVKLNREDLLRKQRTFDNGSIPHQIHLGELHAILRRQEDFYPFLKDNREKIEKILTFRIPYYVGPLARGNSRFAWMTRKSEETITPWNFEEVVDKGASAQSFIERMTNFDKNLPNEKVLPKHSLLYEYFTVYNELTKVKYVTEGMRKPAFLSGEQKKAIVDLLFKTNRKVTVKQLKEDYFKKIECFDSVEISGVEDRFNASLGTYHDLLKIIKDKDFLDNEENEDILEDIVLTLTLFEDREMIEERLKTYAHLFDDKVMKQLKRRRYTGWGRLSRKLINGIRDKQSGKTILDFLKSDGFANRNFMQLIHDDSLTFKEDIQKAQVSGQGDSLHEHIANLAGSPAIKKGILQTVKVVDELVKVMGRHKPENIVIEMARENQTTQKGQKNSRERMKRIEEGIKELGSQILKEHPVENTQLQNEKLYLYYLQNGRDMYVDQELDINRLSDYDVDHIVPQSFLKDDSIDNKVLTRSDKARGKSDNVPSEEVVKKMKNYWRQLLNAKLITQRKFDNLTKAERGGLSELDKAGFIKRQLVETRQITKHVAQILDSRMNTKYDENDKLIREVKVITLKSKLVSDFRKDFQFYKVREINNYHHAHDAYLNAVVGTALIKKYPKLESEFVYGDYKVYDVRKMIAKSEQEIGKATAKYFFYSNIMNFFKTEITLANGEIRKRPLIETNGETGEIVWDKGRDFATVRKVLSMPQVNIVKKTEVQTGGFSKESILPKRNSDKLIARKKDWDPKKYGGFDSPTVAYSVLVVAKVEKGKSKKLKSVKELLGITIMERSSFEKNPIDFLEAKGYKEVKKDLIIKLPKYSLFELENGRKRMLASAGELQKGNELALPSKYVNFLYLASHYEKLKGSPEDNEQKQLFVEQHKHYLDEIIEQISEFSKRVILADANLDKVLSAYNKHRDKPIREQAENIIHLFTLTNLGAPAAFKYFDTTIDRKRYTSTKEVLDATLIHQSITGLYETRIDLSQLGGDGGGGGGGSEAAAKGGVQEISDSRPMLHIYLNGRRFLGLLDTGADKTCIAGRDWPANWPIHQTESSLQGLGMACGVARSSQPLRWQHEDKSGIIHPFVIPTLPFTLWGRDIMKDIKVRLMTDSPDDSQDLMIGAIESNLFADQISWKSDQPVWLNQWPLKQEKLQALQQLVTEQLQLGHLEESNSPWNTPVFVIKKKSGKWRLLQDLRAVNATMHDMGALQPGLPSPPAVPKGWEIIIIDLQDCFFNIKLHPEDCKRFAFSVPSPNFKRPYQRFQWKVLPQGMKNSPTLCQKFVDKAILTVRDKYQDSYIVHYMDDILLAHPSRSIVDEILTSMIQALNKHGLVVSTEKIQKYDNLKYLGTHIQGDSVSYQKLQIRTDKLRTLNDFQKLLGNINWIRPFLKLTTGELKPLFEILNPDSNPISTRKLTPEACKALQLMNERLSTARVKRLDLSQPWSLCILKTEYTPTACLWQDGVVEWIHLPHISPKVITPYDIFCTQLIIKGRHRSKELFSKDPDYIVVPYTKVQFDLLLQEKEDWPISLLGFLGEVHFHLPKDPLLTFTLQTAIIFPHMTSTTPLEKGIVIFTDGSANGRSVTYIQGREPIIKENTQNTAQQAEIVAVITAFEEVSQPFNLYTDSKYVTGLFPEIETATLSPRTKIYTELKHLQRLIHKRQEKFYIGHIRGHTGLPGPLAQGNAYADSLTRILTAAGKRTADGSEFEKRTADGSEFESPKKKAKVE

SEQ ID NO: 24 - protein, 2116 aa, synthetic construct
MPAAKRVKLDGGDKKYSIGLDIGTNSVGWAVITDEYKVPSKKFKVLGNTDRHSIKKNLIGALLFDSGETAEATRLKRTARRRYTRRKNRICYLQEIFSNEMAKVDDSFFHRLEESFLVEEDKKHERHPIFGNIVDEVAYHEKYPTIYHLRKKLVDSTDKADLRLIYLALAHMIKFRGHFLIEGDLNPDNSDVDKLFIQLVQTYNQLFEENPINASGVDAKAILSARLSKSRRLENLIAQLPGEKKNGLFGNLIALSLGLTPNFKSNFDLAEDAKLQLSKDTYDDDLDNLLAQIGDQYADLFLAAKNLSDAILLSDILRVNTEITKAPLSASMIKRYDEHHQDLTLLKALVRQQLPEKYKEIFFDQSKNGYAGYIDGGASQEEFYKFIKPILEKMDGTEELLVKLNREDLLRKQRTFDNGSIPHQIHLGELHAILRRQEDFYPFLKDNREKIEKILTFRIPYYVGPLARGNSRFAWMTRKSEETITPWNFEEVVDKGASAQSFIERMTNFDKNLPNEKVLPKHSLLYEYFTVYNELTKVKYVTEGMRKPAFLSGEQKKAIVDLLFKTNRKVTVKQLKEDYFKKIECFDSVEISGVEDRFNASLGTYHDLLKIIKDKDFLDNEENEDILEDIVLTLTLFEDREMIEERLKTYAHLFDDKVMKQLKRRRYTGWGRLSRKLINGIRDKQSGKTILDFLKSDGFANRNFMQLIHDDSLTFKEDIQKAQVSGQGDSLHEHIANLAGSPAIKKGILQTVKVVDELVKVMGRHKPENIVIEMARENQTTQKGQKNSRERMKRIEEGIKELGSQILKEHPVENTQLQNEKLYLYYLQNGRDMYVDQELDINRLSDYDVDHIVPQSFLKDDSIDNKVLTRSDKARGKSDNVPSEEVVKKMKNYWRQLLNAKLITQRKFDNLTKAERGGLSELDKAGFIKRQLVETRQITKHVAQILDSRMNTKYDENDKLIREVKVITLKSKLVSDFRKDFQFYKVREINNYHHAHDAYLNAVVGTALIKKYPKLESEFVYGDYKVYDVRKMIAKSEQEIGKATAKYFFYSNIMNFFKTEITLANGEIRKRPLIETNGETGEIVWDKGRDFATVRKVLSMPQVNIVKKTEVQTGGFSKESILPKRNSDKLIARKKDWDPKKYGGFDSPTVAYSVLVVAKVEKGKSKKLKSVKELLGITIMERSSFEKNPIDFLEAKGYKEVKKDLIIKLPKYSLFELENGRKRMLASAGELQKGNELALPSKYVNFLYLASHYEKLKGSPEDNEQKQLFVEQHKHYLDEIIEQISEFSKRVILADANLDKVLSAYNKHRDKPIREQAENIIHLFTLTNLGAPAAFKYFDTTIDRKRYTSTKEVLDATLIHQSITGLYETRIDLSQLGGDGGPAPEAAAKGSSGGVQEISDSRPMLHIYLNGRRFLGLLDTGADKTCIAGRDWPANWPIHQTESSLQGLGMACGVARSSQPLRWQHEDKSGIIHPFVIPTLPFTLWGRDIMKDIKVRLMTDSPDDSQDLMIGAIESNLFADQISWKSDQPVWLNQWPLKQEKLQALQQLVTEQLQLGHLEESNSPWNTPVFVIKKKSGKWRLLQDLRAVNATMHDMGALQPGLPSPPAVPKGWEIIIIDLQDCFFNIKLHPEDCKRFAFSVPSPNFKRPYQRFQWKVLPQGMKNSPTLCQKFVDKAILTVRDKYQDSYIVHYMDDILLAHPSRSIVDEILTSMIQALNKHGLVVSTEKIQKYDNLKYLGTHIQGDSVSYQKLQIRTDKLRTLNDFQKLLGNINWIRPFLKLTTGELKPLFEILNPDSNPISTRKLTPEACKALQLMNERLSTARVKRLDLSQPWSLCILKTEYTPTACLWQDGVVEWIHLPHISPKVITPYDIFCTQLIIKGRHRSKELFSKDPDYIVVPYTKVQFDLLLQEKEDWPISLLGFLGEVHFHLPKDPLLTFTLQTAIIFPHMTSTTPLEKGIVIFTDGSANGRSVTYIQGREPIIKENTQNTAQQAEIVAVITAFEEVSQPFNLYTDSKYVTGLFPEIETATLSPRTKIYTELKHLQRLIHKRQEKFYIGHIRGHTGLPGPLAQGNAYADSLTRILTAAGKRTADGSEFEKRTADGSEFESPKKKAKVE

SEQ ID NO: 25 - protein, 2116 aa, synthetic construct
MPAAKRVKLDGGDKKYSIGLDIGTNSVGWAVITDEYKVPSKKFKVLGNTDRHSIKKNLIGALLFDSGETAEATRLKRTARRRYTRRKNRICYLQEIFSNEMAKVDDSFFHRLEESFLVEEDKKHERHPIFGNIVDEVAYHEKYPTIYHLRKKLVDSTDKADLRLIYLALAHMIKFRGHFLIEGDLNPDNSDVDKLFIQLVQTYNQLFEENPINASGVDAKAILSARLSKSRRLENLIAQLPGEKKNGLFGNLIALSLGLTPNFKSNFDLAEDAKLQLSKDTYDDDLDNLLAQIGDQYADLFLAAKNLSDAILLSDILRVNTEITKAPLSASMIKRYDEHHQDLTLLKALVRQQLPEKYKEIFFDQSKNGYAGYIDGGASQEEFYKFIKPILEKMDGTEELLVKLNREDLLRKQRTFDNGSIPHQIHLGELHAILRRQEDFYPFLKDNREKIEKILTFRIPYYVGPLARGNSRFAWMTRKSEETITPWNFEEVVDKGASAQSFIERMTNFDKNLPNEKVLPKHSLLYEYFTVYNELTKVKYVTEGMRKPAFLSGEQKKAIVDLLFKTNRKVTVKQLKEDYFKKIECFDSVEISGVEDRFNASLGTYHDLLKIIKDKDFLDNEENEDILEDIVLTLTLFEDREMIEERLKTYAHLFDDKVMKQLKRRRYTGWGRLSRKLINGIRDKQSGKTILDFLKSDGFANRNFMQLIHDDSLTFKEDIQKAQVSGQGDSLHEHIANLAGSPAIKKGILQTVKVVDELVKVMGRHKPENIVIEMARENQTTQKGQKNSRERMKRIEEGIKELGSQILKEHPVENTQLQNEKLYLYYLQNGRDMYVDQELDINRLSDYDVDHIVPQSFLKDDSIDNKVLTRSDKARGKSDNVPSEEVVKKMKNYWRQLLNAKLITQRKFDNLTKAERGGLSELDKAGFIKRQLVETRQITKHVAQILDSRMNTKYDENDKLIREVKVITLKSKLVSDFRKDFQFYKVREINNYHHAHDAYLNAVVGTALIKKYPKLESEFVYGDYKVYDVRKMIAKSEQEIGKATAKYFFYSNIMNFFKTEITLANGEIRKRPLIETNGETGEIVWDKGRDFATVRKVLSMPQVNIVKKTEVQTGGFSKESILPKRNSDKLIARKKDWDPKKYGGFDSPTVAYSVLVVAKVEKGKSKKLKSVKELLGITIMERSSFEKNPIDFLEAKGYKEVKKDLIIKLPKYSLFELENGRKRMLASAGELQKGNELALPSKYVNFLYLASHYEKLKGSPEDNEQKQLFVEQHKHYLDEIIEQISEFSKRVILADANLDKVLSAYNKHRDKPIREQAENIIHLFTLTNLGAPAAFKYFDTTIDRKRYTSTKEVLDATLIHQSITGLYETRIDLSQLGGDGGGGSGSSEAAAKGGVQEISDSRPMLHIYLNGRRFLGLLDTGADKTCIAGRDWPANWPIHQTESSLQGLGMACGVARSSQPLRWQHEDKSGIIHPFVIPTLPFTLWGRDIMKDIKVRLMTDSPDDSQDLMIGAIESNLFADQISWKSDQPVWLNQWPLKQEKLQALQQLVTEQLQLGHLEESNSPWNTPVFVIKKKSGKWRLLQDLRAVNATMHDMGALQPGLPSPPAVPKGWEIIIIDLQDCFFNIKLHPEDCKRFAFSVPSPNFKRPYQRFQWKVLPQGMKNSPTLCQKFVDKAILTVRDKYQDSYIVHYMDDILLAHPSRSIVDEILTSMIQALNKHGLVVSTEKIQKYDNLKYLGTHIQGDSVSYQKLQIRTDKLRTLNDFQKLLGNINWIRPFLKLTTGELKPLFEILNPDSNPISTRKLTPEACKALQLMNERLSTARVKRLDLSQPWSLCILKTEYTPTACLWQDGVVEWIHLPHISPKVITPYDIFCTQLIIKGRHRSKELFSKDPDYIVVPYTKVQFDLLLQEKEDWPISLLGFLGEVHFHLPKDPLLTFTLQTAIIFPHMTSTTPLEKGIVIFTDGSANGRSVTYIQGREPIIKENTQNTAQQAEIVAVITAFEEVSQPFNLYTDSKYVTGLFPEIETATLSPRTKIYTELKHLQRLIHKRQEKFYIGHIRGHTGLPGPLAQGNAYADSLTRILTAAGKRTADGSEFEKRTADGSEFESPKKKAKVE

SEQ ID NO: 26 - protein, 2116 aa, synthetic construct
MPAAKRVKLDGGDKKYSIGLDIGTNSVGWAVITDEYKVPSKKFKVLGNTDRHSIKKNLIGALLFDSGETAEATRLKRTARRRYTRRKNRICYLQEIFSNEMAKVDDSFFHRLEESFLVEEDKKHERHPIFGNIVDEVAYHEKYPTIYHLRKKLVDSTDKADLRLIYLALAHMIKFRGHFLIEGDLNPDNSDVDKLFIQLVQTYNQLFEENPINASGVDAKAILSARLSKSRRLENLIAQLPGEKKNGLFGNLIALSLGLTPNFKSNFDLAEDAKLQLSKDTYDDDLDNLLAQIGDQYADLFLAAKNLSDAILLSDILRVNTEITKAPLSASMIKRYDEHHQDLTLLKALVRQQLPEKYKEIFFDQSKNGYAGYIDGGASQEEFYKFIKPILEKMDGTEELLVKLNREDLLRKQRTFDNGSIPHQIHLGELHAILRRQEDFYPFLKDNREKIEKILTFRIPYYVGPLARGNSRFAWMTRKSEETITPWNFEEVVDKGASAQSFIERMTNFDKNLPNEKVLPKHSLLYEYFTVYNELTKVKYVTEGMRKPAFLSGEQKKAIVDLLFKTNRKVTVKQLKEDYFKKIECFDSVEISGVEDRFNASLGTYHDLLKIIKDKDFLDNEENEDILEDIVLTLTLFEDREMIEERLKTYAHLFDDKVMKQLKRRRYTGWGRLSRKLINGIRDKQSGKTILDFLKSDGFANRNFMQLIHDDSLTFKEDIQKAQVSGQGDSLHEHIANLAGSPAIKKGILQTVKVVDELVKVMGRHKPENIVIEMARENQTTQKGQKNSRERMKRIEEGIKELGSQILKEHPVENTQLQNEKLYLYYLQNGRDMYVDQELDINRLSDYDVDHIVPQSFLKDDSIDNKVLTRSDKARGKSDNVPSEEVVKKMKNYWRQLLNAKLITQRKFDNLTKAERGGLSELDKAGFIKRQLVETRQITKHVAQILDSRMNTKYDENDKLIREVKVITLKSKLVSDFRKDFQFYKVREINNYHHAHDAYLNAVVGTALIKKYPKLESEFVYGDYKVYDVRKMIAKSEQEIGKATAKYFFYSNIMNFFKTEITLANGEIRKRPLIETNGETGEIVWDKGRDFATVRKVLSMPQVNIVKKTEVQTGGFSKESILPKRNSDKLIARKKDWDPKKYGGFDSPTVAYSVLVVAKVEKGKSKKLKSVKELLGITIMERSSFEKNPIDFLEAKGYKEVKKDLIIKLPKYSLFELENGRKRMLASAGELQKGNELALPSKYVNFLYLASHYEKLKGSPEDNEQKQLFVEQHKHYLDEIIEQISEFSKRVILADANLDKVLSAYNKHRDKPIREQAENIIHLFTLTNLGAPAAFKYFDTTIDRKRYTSTKEVLDATLIHQSITGLYETRIDLSQLGGDGGEAAAKGGSGSSGGVQEISDSRPMLHIYLNGRRFLGLLDTGADKTCIAGRDWPANWPIHQTESSLQGLGMACGVARSSQPLRWQHEDKSGIIHPFVIPTLPFTLWGRDIMKDIKVRLMTDSPDDSQDLMIGAIESNLFADQISWKSDQPVWLNQWPLKQEKLQALQQLVTEQLQLGHLEESNSPWNTPVFVIKKKSGKWRLLQDLRAVNATMHDMGALQPGLPSPVAVPKGWEIIIIDLQDCFFNIKLHPEDCKRFAFSVPSPNFKRPYQRFQWKVLPQGMKNSPTLCQKFVDKAILTVRDKYQDSYIVHYMDDILLAHPSRSIVDEILTSMIQALNKHGLVVSTEKIQKYDNLKYLGTHIQGDSVSYQKLQIRTDKLRTLNDFQKLLGNINWIRPFLKLTTGELKPLFEILNPDSNPISTRKLTPEACKALQLMNERLSTARVKRLDLSQPWSLCILKTEYTPTACLWQDGVVEWIHLPHISPKVITPYDIFCTQLIIKGRHRSKELFSKDPDYIVVPYTKVQFDLLLQEKEDWPISLLGFLGEVHFHLPKDPLLTFTLQTAIIFPHMTSTTPLEKGIVIFTDGSANGRSVTYIQGREPIIKENTQNTAQQAEIVAVITAFEEVSQPFNLYTDSKYVTGLFPEIETATLSPRTKIYTELKHLQRLIHKRQEKFYIGHIRGHTGLPGPLAQGNAYADSLTRILTAAGKRTADGSEFEKRTADGSEFESPKKKAKVE

SEQ ID NO: 27 - protein, 2116 aa, synthetic construct
MPAAKRVKLDGGDKKYSIGLDIGTNSVGWAVITDEYKVPSKKFKVLGNTDRHSIKKNLIGALLFDSGETAEATRLKRTARRRYTRRKNRICYLQEIFSNEMAKVDDSFFHRLEESFLVEEDKKHERHPIFGNIVDEVAYHEKYPTIYHLRKKLVDSTDKADLRLIYLALAHMIKFRGHFLIEGDLNPDNSDVDKLFIQLVQTYNQLFEENPINASGVDAKAILSARLSKSRRLENLIAQLPGEKKNGLFGNLIALSLGLTPNFKSNFDLAEDAKLQLSKDTYDDDLDNLLAQIGDQYADLFLAAKNLSDAILLSDILRVNTEITKAPLSASMIKRYDEHHQDLTLLKALVRQQLPEKYKEIFFDQSKNGYAGYIDGGASQEEFYKFIKPILEKMDGTEELLVKLNREDLLRKQRTFDNGSIPHQIHLGELHAILRRQEDFYPFLKDNREKIEKILTFRIPYYVGPLARGNSRFAWMTRKSEETITPWNFEEVVDKGASAQSFIERMTNFDKNLPNEKVLPKHSLLYEYFTVYNELTKVKYVTEGMRKPAFLSGEQKKAIVDLLFKTNRKVTVKQLKEDYFKKIECFDSVEISGVEDRFNASLGTYHDLLKIIKDKDFLDNEENEDILEDIVLTLTLFEDREMIEERLKTYAHLFDDKVMKQLKRRRYTGWGRLSRKLINGIRDKQSGKTILDFLKSDGFANRNFMQLIHDDSLTFKEDIQKAQVSGQGDSLHEHIANLAGSPAIKKGILQTVKVVDELVKVMGRHKPENIVIEMARENQTTQKGQKNSRERMKRIEEGIKELGSQILKEHPVENTQLQNEKLYLYYLQNGRDMYVDQELDINRLSDYDVDHIVPQSFLKDDSIDNKVLTRSDKARGKSDNVPSEEVVKKMKNYWRQLLNAKLITQRKFDNLTKAERGGLSELDKAGFIKRQLVETRQITKHVAQILDSRMNTKYDENDKLIREVKVITLKSKLVSDFRKDFQFYKVREINNYHHAHDAYLNAVVGTALIKKYPKLESEFVYGDYKVYDVRKMIAKSEQEIGKATAKYFFYSNIMNFFKTEITLANGEIRKRPLIETNGETGEIVWDKGRDFATVRKVLSMPQVNIVKKTEVQTGGFSKESILPKRNSDKLIARKKDWDPKKYGGFDSPTVAYSVLVVAKVEKGKSKKLKSVKELLGITIMERSSFEKNPIDFLEAKGYKEVKKDLIIKLPKYSLFELENGRKRMLASAGELQKGNELALPSKYVNFLYLASHYEKLKGSPEDNEQKQLFVEQHKHYLDEIIEQISEFSKRVILADANLDKVLSAYNKHRDKPIREQAENIIHLFTLTNLGAPAAFKYFDTTIDRKRYTSTKEVLDATLIHQSITGLYETRIDLSQLGGDGGEAAAKGGGGGSGGVQEISDSRPMLHIYLNGRRFLGLLDTGADKTCIAGRDWPANWPIHQTESSLQGLGMACGVARSSQPLRWQHEDKSGIIHPFVIPTLPFTLWGRDIMKDIKVRLMTDSPDDSQDLMIGAIESNLFADQISWKSDQPVWLNQWPLKQEKLQALQQLVTEQLQLGHLEESNSPWNTPVFVIKKKSGKWRLLQDLRAVNATMHDMGALQPGLPSPVAVPKGWEIIIIDLQDCFFNIKLHPEDCKRFAFSVPSPNFKRPYQRFQWKVLPQGMKNSPTLCQKFVDKAILTVRDKYQDSYIVHYMDDILLAHPSRSIVDEILTSMIQALNKHGLVVSTEKIQKYDNLKYLGTHIQGDSVSYQKLQIRTDKLRTLNDFQKLLGNINWIRPFLKLTTGELKPLFEILNPDSNPISTRKLTPEACKALQLMNERLSTARVKRLDLSQPWSLCILKTEYTPTACLWQDGVVEWIHLPHISPKVITPYDIFCTQLIIKGRHRSKELFSKDPDYIVVPYTKVQFDLLLQEKEDWPISLLGFLGEVHFHLPKDPLLTFTLQTAIIFPHMTSTTPLEKGIVIFTDGSANGRSVTYIQGREPIIKENTQNTAQQAEIVAVITAFEEVSQPFNLYTDSKYVTGLFPEIETATLSPRTKIYTELKHLQRLIHKRQEKFYIGHIRGHTGLPGPLAQGNAYADSLTRILTAAGKRTADGSEFEKRTADGSEFESPKKKAKVE

SEQ ID NO: 28 - protein, 2116 aa, synthetic construct
MPAAKRVKLDGGDKKYSIGLDIGTNSVGWAVITDEYKVPSKKFKVLGNTDRHSIKKNLIGALLFDSGETAEATRLKRTARRRYTRRKNRICYLQEIFSNEMAKVDDSFFHRLEESFLVEEDKKHERHPIFGNIVDEVAYHEKYPTIYHLRKKLVDSTDKADLRLIYLALAHMIKFRGHFLIEGDLNPDNSDVDKLFIQLVQTYNQLFEENPINASGVDAKAILSARLSKSRRLENLIAQLPGEKKNGLFGNLIALSLGLTPNFKSNFDLAEDAKLQLSKDTYDDDLDNLLAQIGDQYADLFLAAKNLSDAILLSDILRVNTEITKAPLSASMIKRYDEHHQDLTLLKALVRQQLPEKYKEIFFDQSKNGYAGYIDGGASQEEFYKFIKPILEKMDGTEELLVKLNREDLLRKQRTFDNGSIPHQIHLGELHAILRRQEDFYPFLKDNREKIEKILTFRIPYYVGPLARGNSRFAWMTRKSEETITPWNFEEVVDKGASAQSFIERMTNFDKNLPNEKVLPKHSLLYEYFTVYNELTKVKYVTEGMRKPAFLSGEQKKAIVDLLFKTNRKVTVKQLKEDYFKKIECFDSVEISGVEDRFNASLGTYHDLLKIIKDKDFLDNEENEDILEDIVLTLTLFEDREMIEERLKTYAHLFDDKVMKQLKRRRYTGWGRLSRKLINGIRDKQSGKTILDFLKSDGFANRNFMQLIHDDSLTFKEDIQKAQVSGQGDSLHEHIANLAGSPAIKKGILQTVKVVDELVKVMGRHKPENIVIEMARENQTTQKGQKNSRERMKRIEEGIKELGSQILKEHPVENTQLQNEKLYLYYLQNGRDMYVDQELDINRLSDYDVDHIVPQSFLKDDSIDNKVLTRSDKARGKSDNVPSEEVVKKMKNYWRQLLNAKLITQRKFDNLTKAERGGLSELDKAGFIKRQLVETRQITKHVAQILDSRMNTKYDENDKLIREVKVITLKSKLVSDFRKDFQFYKVREINNYHHAHDAYLNAVVGTALIKKYPKLESEFVYGDYKVYDVRKMIAKSEQEIGKATAKYFFYSNIMNFFKTEITLANGEIRKRPLIETNGETGEIVWDKGRDFATVRKVLSMPQVNIVKKTEVQTGGFSKESILPKRNSDKLIARKKDWDPKKYGGFDSPTVAYSVLVVAKVEKGKSKKLKSVKELLGITIMERSSFEKNPIDFLEAKGYKEVKKDLIIKLPKYSLFELENGRKRMLASAGELQKGNELALPSKYVNFLYLASHYEKLKGSPEDNEQKQLFVEQHKHYLDEIIEQISEFSKRVILADANLDKVLSAYNKHRDKPIREQAENIIHLFTLTNLGAPAAFKYFDTTIDRKRYTSTKEVLDATLIHQSITGLYETRIDLSQLGGDGGEAAAKPAPGGSGGVQEISDSRPMLHIYLNGRRFLGLLDTGADKTCIAGRDWPANWPIHQTESSLQGLGMACGVARSSQPLRWQHEDKSGIIHPFVIPTLPFTLWGRDIMKDIKVRLMTDSPDDSQDLMIGAIESNLFADQISWKSDQPVWLNQWPLKQEKLQALQQLVTEQLQLGHLEESNSPWNTPVFVIKKKSGKWRLLQDLRAVNATMHDMGALQPGLPSPVAVPKGWEIIIIDLQDCFFNIKLHPEDCKRFAFSVPSPNFKRPYQRFQWKVLPQGMKNSPTLCQKFVDKAILTVRDKYQDSYIVHYMDDILLAHPSRSIVDEILTSMIQALNKHGLVVSTEKIQKYDNLKYLGTHIQGDSVSYQKLQIRTDKLRTLNDFQKLLGNINWIRPFLKLTTGELKPLFEILNPDSNPISTRKLTPEACKALQLMNERLSTARVKRLDLSQPWSLCILKTEYTPTACLWQDGVVEWIHLPHISPKVITPYDIFCTQLIIKGRHRSKELFSKDPDYIVVPYTKVQFDLLLQEKEDWPISLLGFLGEVHFHLPKDPLLTFTLQTAIIFPHMTSTTPLEKGIVIFTDGSANGRSVTYIQGREPIIKENTQNTAQQAEIVAVITAFEEVSQPFNLYTDSKYVTGLFPEIETATLSPRTKIYTELKHLQRLIHKRQEKFYIGHIRGHTGLPGPLAQGNAYADSLTRILTAAGKRTADGSEFEKRTADGSEFESPKKKAKVE

SEQ ID NO: 29 - protein, 2113 aa, synthetic construct
MPAAKRVKLDGGDKKYSIGLDIGTNSVGWAVITDEYKVPSKKFKVLGNTDRHSIKKNLIGALLFDSGETAEATRLKRTARRRYTRRKNRICYLQEIFSNEMAKVDDSFFHRLEESFLVEEDKKHERHPIFGNIVDEVAYHEKYPTIYHLRKKLVDSTDKADLRLIYLALAHMIKFRGHFLIEGDLNPDNSDVDKLFIQLVQTYNQLFEENPINASGVDAKAILSARLSKSRRLENLIAQLPGEKKNGLFGNLIALSLGLTPNFKSNFDLAEDAKLQLSKDTYDDDLDNLLAQIGDQYADLFLAAKNLSDAILLSDILRVNTEITKAPLSASMIKRYDEHHQDLTLLKALVRQQLPEKYKEIFFDQSKNGYAGYIDGGASQEEFYKFIKPILEKMDGTEELLVKLNREDLLRKQRTFDNGSIPHQIHLGELHAILRRQEDFYPFLKDNREKIEKILTFRIPYYVGPLARGNSRFAWMTRKSEETITPWNFEEVVDKGASAQSFIERMTNFDKNLPNEKVLPKHSLLYEYFTVYNELTKVKYVTEGMRKPAFLSGEQKKAIVDLLFKTNRKVTVKQLKEDYFKKIECFDSVEISGVEDRFNASLGTYHDLLKIIKDKDFLDNEENEDILEDIVLTLTLFEDREMIEERLKTYAHLFDDKVMKQLKRRRYTGWGRLSRKLINGIRDKQSGKTILDFLKSDGFANRNFMQLIHDDSLTFKEDIQKAQVSGQGDSLHEHIANLAGSPAIKKGILQTVKVVDELVKVMGRHKPENIVIEMARENQTTQKGQKNSRERMKRIEEGIKELGSQILKEHPVENTQLQNEKLYLYYLQNGRDMYVDQELDINRLSDYDVDHIVPQSFLKDDSIDNKVLTRSDKARGKSDNVPSEEVVKKMKNYWRQLLNAKLITQRKFDNLTKAERGGLSELDKAGFIKRQLVETRQITKHVAQILDSRMNTKYDENDKLIREVKVITLKSKLVSDFRKDFQFYKVREINNYHHAHDAYLNAVVGTALIKKYPKLESEFVYGDYKVYDVRKMIAKSEQEIGKATAKYFFYSNIMNFFKTEITLANGEIRKRPLIETNGETGEIVWDKGRDFATVRKVLSMPQVNIVKKTEVQTGGFSKESILPKRNSDKLIARKKDWDPKKYGGFDSPTVAYSVLVVAKVEKGKSKKLKSVKELLGITIMERSSFEKNPIDFLEAKGYKEVKKDLIIKLPKYSLFELENGRKRMLASAGELQKGNELALPSKYVNFLYLASHYEKLKGSPEDNEQKQLFVEQHKHYLDEIIEQISEFSKRVILADANLDKVLSAYNKHRDKPIREQAENIIHLFTLTNLGAPAAFKYFDTTIDRKRYTSTKEVLDATLIHQSITGLYETRIDLSQLGGDGGGGSEAAAKGGVQEISDSRPMLHIYLNGRRFLGLLDTGADKTCIAGRDWPANWPIHQTESSLQGLGMACGVARSSQPLRWQHEDKSGIIHPFVIPTLPFTLWGRDIMKDIKVRLMTDSPDDSQDLMIGAIESNLFADQISWKSDQPVWLNQWPLKQEKLQALQQLVTEQLQLGHLEESNSPWNTPVFVIKKKSGKWRLLQDLRAVNATMHDMGALQPGLPSPVAVPKGWEIIIIDLQDCFFNIKLHPEDCKRFAFSVPSPNFKRPYQRFQWKVLPQGMKNSPTLCQKFVDKAILTVRDKYQDSYIVHYMDDILLAHPSRSIVDEILTSMIQALNKHGLVVSTEKIQKYDNLKYLGTHIQGDSVSYQKLQIRTDKLRTLNDFQKLLGNINWIRPFLKLTTGELKPLFEILNPDSNPISTRKLTPEACKALQLMNERLSTARVKRLDLSQPWSLCILKTEYTPTACLWQDGVVEWIHLPHISPKVITPYDIFCTQLIIKGRHRSKELFSKDPDYIVVPYTKVQFDLLLQEKEDWPISLLGFLGEVHFHLPKDPLLTFTLQTAIIFPHMTSTTPLEKGIVIFTDGSANGRSVTYIQGREPIIKENTQNTAQQAEIVAVITAFEEVSQPFNLYTDSKYVTGLFPEIETATLSPRTKIYTELKHLQRLIHKRQEKFYIGHIRGHTGLPGPLAQGNAYADSLTRILTAAGKRTADGSEFEKRTADGSEFESPKKKAKVE

SEQ ID NO: 30 - protein, 2111 aa, synthetic construct
MPAAKRVKLDGGDKKYSIGLDIGTNSVGWAVITDEYKVPSKKFKVLGNTDRHSIKKNLIGALLFDSGETAEATRLKRTARRRYTRRKNRICYLQEIFSNEMAKVDDSFFHRLEESFLVEEDKKHERHPIFGNIVDEVAYHEKYPTIYHLRKKLVDSTDKADLRLIYLALAHMIKFRGHFLIEGDLNPDNSDVDKLFIQLVQTYNQLFEENPINASGVDAKAILSARLSKSRRLENLIAQLPGEKKNGLFGNLIALSLGLTPNFKSNFDLAEDAKLQLSKDTYDDDLDNLLAQIGDQYADLFLAAKNLSDAILLSDILRVNTEITKAPLSASMIKRYDEHHQDLTLLKALVRQQLPEKYKEIFFDQSKNGYAGYIDGGASQEEFYKFIKPILEKMDGTEELLVKLNREDLLRKQRTFDNGSIPHQIHLGELHAILRRQEDFYPFLKDNREKIEKILTFRIPYYVGPLARGNSRFAWMTRKSEETITPWNFEEVVDKGASAQSFIERMTNFDKNLPNEKVLPKHSLLYEYFTVYNELTKVKYVTEGMRKPAFLSGEQKKAIVDLLFKTNRKVTVKQLKEDYFKKIECFDSVEISGVEDRFNASLGTYHDLLKIIKDKDFLDNEENEDILEDIVLTLTLFEDREMIEERLKTYAHLFDDKVMKQLKRRRYTGWGRLSRKLINGIRDKQSGKTILDFLKSDGFANRNFMQLIHDDSLTFKEDIQKAQVSGQGDSLHEHIANLAGSPAIKKGILQTVKVVDELVKVMGRHKPENIVIEMARENQTTQKGQKNSRERMKRIEEGIKELGSQILKEHPVENTQLQNEKLYLYYLQNGRDMYVDQELDINRLSDYDVDHIVPQSFLKDDSIDNKVLTRSDKARGKSDNVPSEEVVKKMKNYWRQLLNAKLITQRKFDNLTKAERGGLSELDKAGFIKRQLVETRQITKHVAQILDSRMNTKYDENDKLIREVKVITLKSKLVSDFRKDFQFYKVREINNYHHAHDAYLNAVVGTALIKKYPKLESEFVYGDYKVYDVRKMIAKSEQEIGKATAKYFFYSNIMNFFKTEITLANGEIRKRPLIETNGETGEIVWDKGRDFATVRKVLSMPQVNIVKKTEVQTGGFSKESILPKRNSDKLIARKKDWDPKKYGGFDSPTVAYSVLVVAKVEKGKSKKLKSVKELLGITIMERSSFEKNPIDFLEAKGYKEVKKDLIIKLPKYSLFELENGRKRMLASAGELQKGNELALPSKYVNFLYLASHYEKLKGSPEDNEQKQLFVEQHKHYLDEIIEQISEFSKRVILADANLDKVLSAYNKHRDKPIREQAENIIHLFTLTNLGAPAAFKYFDTTIDRKRYTSTKEVLDATLIHQSITGLYETRIDLSQLGGDGGGSSGGGGGVQEISDSRPMLHIYLNGRRFLGLLDTGADKTCIAGRDWPANWPIHQTESSLQGLGMACGVARSSQPLRWQHEDKSGIIHPFVIPTLPFTLWGRDIMKDIKVRLMTDSPDDSQDLMIGAIESNLFADQISWKSDQPVWLNQWPLKQEKLQALQQLVTEQLQLGHLEESNSPWNTPVFVIKKKSGKWRLLQDLRAVNATMHDMGALQPGLPSPVAVPKGWEIIIIDLQDCFFNIKLHPEDCKRFAFSVPSPNFKRPYQRFQWKVLPQGMKNSPTLCQKFVDKAILTVRDKYQDSYIVHYMDDILLAHPSRSIVDEILTSMIQALNKHGLVVSTEKIQKYDNLKYLGTHIQGDSVSYQKLQIRTDKLRTLNDFQKLLGNINWIRPFLKLTTGELKPLFEILNPDSNPISTRKLTPEACKALQLMNERLSTARVKRLDLSQPWSLCILKTEYTPTACLWQDGVVEWIHLPHISPKVITPYDIFCTQLIIKGRHRSKELFSKDPDYIVVPYTKVQFDLLLQEKEDWPISLLGFLGEVHFHLPKDPLLTFTLQTAIIFPHMTSTTPLEKGIVIFTDGSANGRSVTYIQGREPIIKENTQNTAQQAEIVAVITAFEEVSQPFNLYTDSKYVTGLFPEIETATLSPRTKIYTELKHLQRLIHKRQEKFYIGHIRGHTGLPGPLAQGNAYADSLTRILTAAGKRTADGSEFEKRTADGSEFESPKKKAKVE

SEQ ID NO: 31 - protein, 2114 aa, synthetic construct
MPAAKRVKLDGGDKKYSIGLDIGTNSVGWAVITDEYKVPSKKFKVLGNTDRHSIKKNLIGALLFDSGETAEATRLKRTARRRYTRRKNRICYLQEIFSNEMAKVDDSFFHRLEESFLVEEDKKHERHPIFGNIVDEVAYHEKYPTIYHLRKKLVDSTDKADLRLIYLALAHMIKFRGHFLIEGDLNPDNSDVDKLFIQLVQTYNQLFEENPINASGVDAKAILSARLSKSRRLENLIAQLPGEKKNGLFGNLIALSLGLTPNFKSNFDLAEDAKLQLSKDTYDDDLDNLLAQIGDQYADLFLAAKNLSDAILLSDILRVNTEITKAPLSASMIKRYDEHHQDLTLLKALVRQQLPEKYKEIFFDQSKNGYAGYIDGGASQEEFYKFIKPILEKMDGTEELLVKLNREDLLRKQRTFDNGSIPHQIHLGELHAILRRQEDFYPFLKDNREKIEKILTFRIPYYVGPLARGNSRFAWMTRKSEETITPWNFEEVVDKGASAQSFIERMTNFDKNLPNEKVLPKHSLLYEYFTVYNELTKVKYVTEGMRKPAFLSGEQKKAIVDLLFKTNRKVTVKQLKEDYFKKIECFDSVEISGVEDRFNASLGTYHDLLKIIKDKDFLDNEENEDILEDIVLTLTLFEDREMIEERLKTYAHLFDDKVMKQLKRRRYTGWGRLSRKLINGIRDKQSGKTILDFLKSDGFANRNFMQLIHDDSLTFKEDIQKAQVSGQGDSLHEHIANLAGSPAIKKGILQTVKVVDELVKVMGRHKPENIVIEMARENQTTQKGQKNSRERMKRIEEGIKELGSQILKEHPVENTQLQNEKLYLYYLQNGRDMYVDQELDINRLSDYDVDHIVPQSFLKDDSIDNKVLTRSDKARGKSDNVPSEEVVKKMKNYWRQLLNAKLITQRKFDNLTKAERGGLSELDKAGFIKRQLVETRQITKHVAQILDSRMNTKYDENDKLIREVKVITLKSKLVSDFRKDFQFYKVREINNYHHAHDAYLNAVVGTALIKKYPKLESEFVYGDYKVYDVRKMIAKSEQEIGKATAKYFFYSNIMNFFKTEITLANGEIRKRPLIETNGETGEIVWDKGRDFATVRKVLSMPQVNIVKKTEVQTGGFSKESILPKRNSDKLIARKKDWDPKKYGGFDSPTVAYSVLVVAKVEKGKSKKLKSVKELLGITIMERSSFEKNPIDFLEAKGYKEVKKDLIIKLPKYSLFELENGRKRMLASAGELQKGNELALPSKYVNFLYLASHYEKLKGSPEDNEQKQLFVEQHKHYLDEIIEQISEFSKRVILADANLDKVLSAYNKHRDKPIREQAENIIHLFTLTNLGAPAAFKYFDTTIDRKRYTSTKEVLDATLIHQSITGLYETRIDLSQLGGDGGGGGPAPGSSGGVQEISDSRPMLHIYLNGRRFLGLLDTGADKTCIAGRDWPANWPIHQTESSLQGLGMACGVARSSQPLRWQHEDKSGIIHPFVIPTLPFTLWGRDIMKDIKVRLMTDSPDDSQDLMIGAIESNLFADQISWKSDQPVWLNQWPLKQEKLQALQQLVTEQLQLGHLEESNSPWNTPVFVIKKKSGKWRLLQDLRAVNATMHDMGALQPGLPSPVAVPKGWEIIIIDLQDCFFNIKLHPEDCKRFAFSVPSPNFKRPYQRFQWKVLPQGMKNSPTLCQKFVDKAILTVRDKYQDSYIVHYMDDILLAHPSRSIVDEILTSMIQALNKHGLVVSTEKIQKYDNLKYLGTHIQGDSVSYQKLQIRTDKLRTLNDFQKLLGNINWIRPFLKLTTGELKPLFEILNPDSNPISTRKLTPEACKALQLMNERLSTARVKRLDLSQPWSLCILKTEYTPTACLWQDGVVEWIHLPHISPKVITPYDIFCTQLIIKGRHRSKELFSKDPDYIVVPYTKVQFDLLLQEKEDWPISLLGFLGEVHFHLPKDPLLTFTLQTAIIFPHMTSTTPLEKGIVIFTDGSANGRSVTYIQGREPIIKENTQNTAQQAEIVAVITAFEEVSQPFNLYTDSKYVTGLFPEIETATLSPRTKIYTELKHLQRLIHKRQEKFYIGHIRGHTGLPGPLAQGNAYADSLTRILTAAGKRTADGSEFEKRTADGSEFESPKKKAKVE

SEQ ID NO: 32 - protein, 2010 aa, synthetic construct
MPAAKRVKLDGGDKKYSIGLDIGTNSVGWAVITDEYKVPSKKFKVLGNTDRHSIKKNLIGALLFDSGETAEATRLKRTARRRYTRRKNRICYLQEIFSNEMAKVDDSFFHRLEESFLVEEDKKHERHPIFGNIVDEVAYHEKYPTIYHLRKKLVDSTDKADLRLIYLALAHMIKFRGHFLIEGDLNPDNSDVDKLFIQLVQTYNQLFEENPINASGVDAKAILSARLSKSRRLENLIAQLPGEKKNGLFGNLIALSLGLTPNFKSNFDLAEDAKLQLSKDTYDDDLDNLLAQIGDQYADLFLAAKNLSDAILLSDILRVNTEITKAPLSASMIKRYDEHHQDLTLLKALVRQQLPEKYKEIFFDQSKNGYAGYIDGGASQEEFYKFIKPILEKMDGTEELLVKLNREDLLRKQRTFDNGSIPHQIHLGELHAILRRQEDFYPFLKDNREKIEKILTFRIPYYVGPLARGNSRFAWMTRKSEETITPWNFEEVVDKGASAQSFIERMTNFDKNLPNEKVLPKHSLLYEYFTVYNELTKVKYVTEGMRKPAFLSGEQKKAIVDLLFKTNRKVTVKQLKEDYFKKIECFDSVEISGVEDRFNASLGTYHDLLKIIKDKDFLDNEENEDILEDIVLTLTLFEDREMIEERLKTYAHLFDDKVMKQLKRRRYTGWGRLSRKLINGIRDKQSGKTILDFLKSDGFANRNFMQLIHDDSLTFKEDIQKAQVSGQGDSLHEHIANLAGSPAIKKGILQTVKVVDELVKVMGRHKPENIVIEMARENQTTQKGQKNSRERMKRIEEGIKELGSQILKEHPVENTQLQNEKLYLYYLQNGRDMYVDQELDINRLSDYDVDHIVPQSFLKDDSIDNKVLTRSDKARGKSDNVPSEEVVKKMKNYWRQLLNAKLITQRKFDNLTKAERGGLSELDKAGFIKRQLVETRQITKHVAQILDSRMNTKYDENDKLIREVKVITLKSKLVSDFRKDFQFYKVREINNYHHAHDAYLNAVVGTALIKKYPKLESEFVYGDYKVYDVRKMIAKSEQEIGKATAKYFFYSNIMNFFKTEITLANGEIRKRPLIETNGETGEIVWDKGRDFATVRKVLSMPQVNIVKKTEVQTGGFSKESILPKRNSDKLIARKKDWDPKKYGGFDSPTVAYSVLVVAKVEKGKSKKLKSVKELLGITIMERSSFEKNPIDFLEAKGYKEVKKDLIIKLPKYSLFELENGRKRMLASAGELQKGNELALPSKYVNFLYLASHYEKLKGSPEDNEQKQLFVEQHKHYLDEIIEQISEFSKRVILADANLDKVLSAYNKHRDKPIREQAENIIHLFTLTNLGAPAAFKYFDTTIDRKRYTSTKEVLDATLIHQSITGLYETRIDLSQLGGDGGGGGEAAAKGSSGGLTAAIDILAPQQCAEPITWKSDEPVWVDQWPLTNDKLAAAQQLVQEQLEAGHITESSSPWNTPIFVIKKKSGKWRLLQDLRAVNATMVLMGALQPGLPSPVAIPQGYLKIIIDLKDCFFSIPLHPSDQKRFAFSLPSTNFKEPMQRFQWKVLPQGMANSPTLCQKYVATAIHKVRHAWKQMYIIHYMDDILIAGKDGQQVLQCFDQLKQELTAAGLHIAPEKVQLQDPYTYLGFELNGPKITNQKAVIRKDKLQTLNDFQKLLGDINWLRPYLKLTTGDLKPLFDTLKGDSDPNSHRSLSKEALASLEKVETAIAEQFVTHINYSLPLIFLIFNTALTPTGLFWQDNPIMWIHLPASPKKVLLPYYDAIADLIILGRDHSKKYFGIEPSTIIQPYSKSQIDWLMQNTEMWPIACASFVGILDNHYPPNKLIQFCKLHTFVFPQIISKTPLNNALLVFTDGSSTGMAAYTLTDTTIKFQTNLNSAQLVELQALIAVLSAFPNQPLNIYTDSAYLAHSIPLLETVAQIKHISETAKLFLQCQQLIYNRSIPFYIGHVRAHSGLPGPIAQGNQRADLATKIVASNINTAGKRTADGSEFEKRTADGSEFESPKKKAKVE

SEQ ID NO: 33 - protein, 2008 aa, synthetic construct
MPAAKRVKLDGGDKKYSIGLDIGTNSVGWAVITDEYKVPSKKFKVLGNTDRHSIKKNLIGALLFDSGETAEATRLKRTARRRYTRRKNRICYLQEIFSNEMAKVDDSFFHRLEESFLVEEDKKHERHPIFGNIVDEVAYHEKYPTIYHLRKKLVDSTDKADLRLIYLALAHMIKFRGHFLIEGDLNPDNSDVDKLFIQLVQTYNQLFEENPINASGVDAKAILSARLSKSRRLENLIAQLPGEKKNGLFGNLIALSLGLTPNFKSNFDLAEDAKLQLSKDTYDDDLDNLLAQIGDQYADLFLAAKNLSDAILLSDILRVNTEITKAPLSASMIKRYDEHHQDLTLLKALVRQQLPEKYKEIFFDQSKNGYAGYIDGGASQEEFYKFIKPILEKMDGTEELLVKLNREDLLRKQRTFDNGSIPHQIHLGELHAILRRQEDFYPFLKDNREKIEKILTFRIPYYVGPLARGNSRFAWMTRKSEETITPWNFEEVVDKGASAQSFIERMTNFDKNLPNEKVLPKHSLLYEYFTVYNELTKVKYVTEGMRKPAFLSGEQKKAIVDLLFKTNRKVTVKQLKEDYFKKIECFDSVEISGVEDRFNASLGTYHDLLKIIKDKDFLDNEENEDILEDIVLTLTLFEDREMIEERLKTYAHLFDDKVMKQLKRRRYTGWGRLSRKLINGIRDKQSGKTILDFLKSDGFANRNFMQLIHDDSLTFKEDIQKAQVSGQGDSLHEHIANLAGSPAIKKGILQTVKVVDELVKVMGRHKPENIVIEMARENQTTQKGQKNSRERMKRIEEGIKELGSQILKEHPVENTQLQNEKLYLYYLQNGRDMYVDQELDINRLSDYDVDHIVPQSFLKDDSIDNKVLTRSDKARGKSDNVPSEEVVKKMKNYWRQLLNAKLITQRKFDNLTKAERGGLSELDKAGFIKRQLVETRQITKHVAQILDSRMNTKYDENDKLIREVKVITLKSKLVSDFRKDFQFYKVREINNYHHAHDAYLNAVVGTALIKKYPKLESEFVYGDYKVYDVRKMIAKSEQEIGKATAKYFFYSNIMNFFKTEITLANGEIRKRPLIETNGETGEIVWDKGRDFATVRKVLSMPQVNIVKKTEVQTGGFSKESILPKRNSDKLIARKKDWDPKKYGGFDSPTVAYSVLVVAKVEKGKSKKLKSVKELLGITIMERSSFEKNPIDFLEAKGYKEVKKDLIIKLPKYSLFELENGRKRMLASAGELQKGNELALPSKYVNFLYLASHYEKLKGSPEDNEQKQLFVEQHKHYLDEIIEQISEFSKRVILADANLDKVLSAYNKHRDKPIREQAENIIHLFTLTNLGAPAAFKYFDTTIDRKRYTSTKEVLDATLIHQSITGLYETRIDLSQLGGDGGGSSPAPGGGGGLTAAIDILAPQQCAEPITWKSDEPVWVDQWPLTNDKLAAAQQLVQEQLEAGHITESSSPWNTPIFVIKKKSGKWRLLQDLRAVNATMVLMGALQPGLPSPVAPPQGYLKIIIDLKDCFFSIPLHPSDQKRFAFSLPSTNFKEPMQRFQWKVLPQGMANSPTLCQKYVATAIHKVRHAWKQMYIIHYMDDILIAGKDGQQVLQCFDQLKQELTAAGLHIAPEKVQLQDPYTYLGFELNGPKITNQKAVIRKDKLQTLNDFQKLLGDINWLRPYLKLTTGDLKPLFDTLKPDSDPNSHRSLSKEALASLEKVETAIAEQFVTHINYSLPLIFLIFNTALTPTGLFWQDNPIMWIHLPASPKKVLLPYYDAIADLIILGRDHSKKYFGIEPSTIIQPYSKSQIDWLMQNTEMWPIACASFVGILDNHYPPNKLIQFCKLHTFVFPQIISKTPLNNALLVFTDGSSTGMAAYTLTDTTIKFQTNLNSAQLVELQALIAVLSAFPNQPLNIYTDSAYLAHSIPLLETVAQIKHISETAKLFLQCQQLIYNRSIPFYIGHVRAHSGLPGPIAQGNQRADLATKIVASNINTAGKRTADGSEFEKRTADGSEFESPKKKAKVE

SEQ ID NO: 34 - protein, 2085 aa, synthetic construct
MPAAKRVKLDGGDKKYSIGLDIGTNSVGWAVITDEYKVPSKKFKVLGNTDRHSIKKNLIGALLFDSGETAEATRLKRTARRRYTRRKNRICYLQEIFSNEMAKVDDSFFHRLEESFLVEEDKKHERHPIFGNIVDEVAYHEKYPTIYHLRKKLVDSTDKADLRLIYLALAHMIKFRGHFLIEGDLNPDNSDVDKLFIQLVQTYNQLFEENPINASGVDAKAILSARLSKSRRLENLIAQLPGEKKNGLFGNLIALSLGLTPNFKSNFDLAEDAKLQLSKDTYDDDLDNLLAQIGDQYADLFLAAKNLSDAILLSDILRVNTEITKAPLSASMIKRYDEHHQDLTLLKALVRQQLPEKYKEIFFDQSKNGYAGYIDGGASQEEFYKFIKPILEKMDGTEELLVKLNREDLLRKQRTFDNGSIPHQIHLGELHAILRRQEDFYPFLKDNREKIEKILTFRIPYYVGPLARGNSRFAWMTRKSEETITPWNFEEVVDKGASAQSFIERMTNFDKNLPNEKVLPKHSLLYEYFTVYNELTKVKYVTEGMRKPAFLSGEQKKAIVDLLFKTNRKVTVKQLKEDYFKKIECFDSVEISGVEDRFNASLGTYHDLLKIIKDKDFLDNEENEDILEDIVLTLTLFEDREMIEERLKTYAHLFDDKVMKQLKRRRYTGWGRLSRKLINGIRDKQSGKTILDFLKSDGFANRNFMQLIHDDSLTFKEDIQKAQVSGQGDSLHEHIANLAGSPAIKKGILQTVKVVDELVKVMGRHKPENIVIEMARENQTTQKGQKNSRERMKRIEEGIKELGSQILKEHPVENTQLQNEKLYLYYLQNGRDMYVDQELDINRLSDYDVDHIVPQSFLKDDSIDNKVLTRSDKARGKSDNVPSEEVVKKMKNYWRQLLNAKLITQRKFDNLTKAERGGLSELDKAGFIKRQLVETRQITKHVAQILDSRMNTKYDENDKLIREVKVITLKSKLVSDFRKDFQFYKVREINNYHHAHDAYLNAVVGTALIKKYPKLESEFVYGDYKVYDVRKMIAKSEQEIGKATAKYFFYSNIMNFFKTEITLANGEIRKRPLIETNGETGEIVWDKGRDFATVRKVLSMPQVNIVKKTEVQTGGFSKESILPKRNSDKLIARKKDWDPKKYGGFDSPTVAYSVLVVAKVEKGKSKKLKSVKELLGITIMERSSFEKNPIDFLEAKGYKEVKKDLIIKLPKYSLFELENGRKRMLASAGELQKGNELALPSKYVNFLYLASHYEKLKGSPEDNEQKQLFVEQHKHYLDEIIEQISEFSKRVILADANLDKVLSAYNKHRDKPIREQAENIIHLFTLTNLGAPAAFKYFDTTIDRKRYTSTKEVLDATLIHQSITGLYETRIDLSQLGGDGGEAAAKGSSGGLDDEYRLYSPLVKPDQNIQFWLEQFPQAWAETAGMGLAKQVPPQVIQLKASATPVSVRQYPLSKEAQEGIRPHVQRLIQQGILVPVQSPWNTPLLPVRKPGTNDYRPVQDLREVNKRVQDIHPTVPNPYNLLCALPPQRSWYTVLDLKDAFFCLRLHPTSQPLFAFEWRDPGTGRTGQLTWTRLPQGFKNSPTIFNEALHRDLANFRIQHPQVTLLQYVDDLLLAGATKQDCLEGTKALLLELSDLGYRASAKKAQICRREVTYLGYSLRDGQRWLTEARKKTVVQIPAPTTAKQVREFLGKAGFCRLFIPGFATLAAPLYPLTKPKGEFSWAPEHQKAFDAIKKALLSAPALALPDVTKPFTLYVDERKGVARGVLTQTLGPWRRPVAYLSKKLDPVASGWPVCLKAIAAVAILVKDADKLTLGQNITVIAPHALENIVRQPPDRWMTNARMTHYQSLLLTERVTFAPPAALNPATLLPEETDEPVTHDCHQLLIEETGVRKDLTDIPLTGEVLTWFTDGSSYVVEGKRMAGAAVVDGTRTIWASSLPEGTSAQKAELMALTQALRLAEGKSINIYTDSRYAFATAHVHGAIYKQRGWLTSAGREIKNKEEILSLLEALHLPKRLAIIHCPGHQKAKDPISRGNQMADRVAKQAAQGVNLLPAGKRTADGSEFEKRTADGSEFESPKKKAKVE

SEQ ID NO: 35 - protein, 2088 aa, synthetic construct
MPAAKRVKLDGGDKKYSIGLDIGTNSVGWAVITDEYKVPSKKFKVLGNTDRHSIKKNLIGALLFDSGETAEATRLKRTARRRYTRRKNRICYLQEIFSNEMAKVDDSFFHRLEESFLVEEDKKHERHPIFGNIVDEVAYHEKYPTIYHLRKKLVDSTDKADLRLIYLALAHMIKFRGHFLIEGDLNPDNSDVDKLFIQLVQTYNQLFEENPINASGVDAKAILSARLSKSRRLENLIAQLPGEKKNGLFGNLIALSLGLTPNFKSNFDLAEDAKLQLSKDTYDDDLDNLLAQIGDQYADLFLAAKNLSDAILLSDILRVNTEITKAPLSASMIKRYDEHHQDLTLLKALVRQQLPEKYKEIFFDQSKNGYAGYIDGGASQEEFYKFIKPILEKMDGTEELLVKLNREDLLRKQRTFDNGSIPHQIHLGELHAILRRQEDFYPFLKDNREKIEKILTFRIPYYVGPLARGNSRFAWMTRKSEETITPWNFEEVVDKGASAQSFIERMTNFDKNLPNEKVLPKHSLLYEYFTVYNELTKVKYVTEGMRKPAFLSGEQKKAIVDLLFKTNRKVTVKQLKEDYFKKIECFDSVEISGVEDRFNASLGTYHDLLKIIKDKDFLDNEENEDILEDIVLTLTLFEDREMIEERLKTYAHLFDDKVMKQLKRRRYTGWGRLSRKLINGIRDKQSGKTILDFLKSDGFANRNFMQLIHDDSLTFKEDIQKAQVSGQGDSLHEHIANLAGSPAIKKGILQTVKVVDELVKVMGRHKPENIVIEMARENQTTQKGQKNSRERMKRIEEGIKELGSQILKEHPVENTQLQNEKLYLYYLQNGRDMYVDQELDINRLSDYDVDHIVPQSFLKDDSIDNKVLTRSDKARGKSDNVPSEEVVKKMKNYWRQLLNAKLITQRKFDNLTKAERGGLSELDKAGFIKRQLVETRQITKHVAQILDSRMNTKYDENDKLIREVKVITLKSKLVSDFRKDFQFYKVREINNYHHAHDAYLNAVVGTALIKKYPKLESEFVYGDYKVYDVRKMIAKSEQEIGKATAKYFFYSNIMNFFKTEITLANGEIRKRPLIETNGETGEIVWDKGRDFATVRKVLSMPQVNIVKKTEVQTGGFSKESILPKRNSDKLIARKKDWDPKKYGGFDSPTVAYSVLVVAKVEKGKSKKLKSVKELLGITIMERSSFEKNPIDFLEAKGYKEVKKDLIIKLPKYSLFELENGRKRMLASAGELQKGNELALPSKYVNFLYLASHYEKLKGSPEDNEQKQLFVEQHKHYLDEIIEQISEFSKRVILADANLDKVLSAYNKHRDKPIREQAENIIHLFTLTNLGAPAAFKYFDTTIDRKRYTSTKEVLDATLIHQSITGLYETRIDLSQLGGDGGEAAAKGGSPAPGGLDDEYRLYSPLVKPDQNIQFWLEQFPQAWAETAGMGLAKQVPPQVIQLKASATPVSVRQYPLSKEAQEGIRPHVQRLIQQGILVPVQSPWNTPLLPVRKPGTNDYRPVQDLREVNKRVQDIHPTVPNPYNLLCALPPQRSWYTVLDLKDAFFCLRLHPTSQPLFAFEWRDPGTGRTGQLTWTRLPQGFKNSPTIFNEALHRDLANFRIQHPQVTLLQYVDDLLLAGATKQDCLEGTKALLLELSDLGYRASAKKAQICRREVTYLGYSLRDGQRWLTEARKKTVVQIPAPTTAKQVREFLGKAGFCRLFIPGFATLAAPLYPLTKPKGEFSWAPEHQKAFDAIKKALLSAPALALPDVTKPFTLYVDERKGVARGVLTQTLGPWRRPVAYLSKKLDPVASGWPVCLKAIAAVAILVKDADKLTLGQNITVIAPHALENIVRQPPDRWMTNARMTHYQSLLLTERVTFAPPAALNPATLLPEETDEPVTHDCHQLLIEETGVRKDLTDIPLTGEVLTWFTDGSSYVVEGKRMAGAAVVDGTRTIWASSLPEGTSAQKAELMALTQALRLAEGKSINIYTDSRYAFATAHVHGAIYKQRGWLTSAGREIKNKEEILSLLEALHLPKRLAIIHCPGHQKAKDPISRGNQMADRVAKQAAQGVNLLPAGKRTADGSEFEKRTADGSEFESPKKKAKVE

SEQ ID NO: 36 - protein, 2123 aa, synthetic construct
MPAAKRVKLDGGDKKYSIGLDIGTNSVGWAVITDEYKVPSKKFKVLGNTDRHSIKKNLIGALLFDSGETAEATRLKRTARRRYTRRKNRICYLQEIFSNEMAKVDDSFFHRLEESFLVEEDKKHERHPIFGNIVDEVAYHEKYPTIYHLRKKLVDSTDKADLRLIYLALAHMIKFRGHFLIEGDLNPDNSDVDKLFIQLVQTYNQLFEENPINASGVDAKAILSARLSKSRRLENLIAQLPGEKKNGLFGNLIALSLGLTPNFKSNFDLAEDAKLQLSKDTYDDDLDNLLAQIGDQYADLFLAAKNLSDAILLSDILRVNTEITKAPLSASMIKRYDEHHQDLTLLKALVRQQLPEKYKEIFFDQSKNGYAGYIDGGASQEEFYKFIKPILEKMDGTEELLVKLNREDLLRKQRTFDNGSIPHQIHLGELHAILRRQEDFYPFLKDNREKIEKILTFRIPYYVGPLARGNSRFAWMTRKSEETITPWNFEEVVDKGASAQSFIERMTNFDKNLPNEKVLPKHSLLYEYFTVYNELTKVKYVTEGMRKPAFLSGEQKKAIVDLLFKTNRKVTVKQLKEDYFKKIECFDSVEISGVEDRFNASLGTYHDLLKIIKDKDFLDNEENEDILEDIVLTLTLFEDREMIEERLKTYAHLFDDKVMKQLKRRRYTGWGRLSRKLINGIRDKQSGKTILDFLKSDGFANRNFMQLIHDDSLTFKEDIQKAQVSGQGDSLHEHIANLAGSPAIKKGILQTVKVVDELVKVMGRHKPENIVIEMARENQTTQKGQKNSRERMKRIEEGIKELGSQILKEHPVENTQLQNEKLYLYYLQNGRDMYVDQELDINRLSDYDVDHIVPQSFLKDDSIDNKVLTRSDKARGKSDNVPSEEVVKKMKNYWRQLLNAKLITQRKFDNLTKAERGGLSELDKAGFIKRQLVETRQITKHVAQILDSRMNTKYDENDKLIREVKVITLKSKLVSDFRKDFQFYKVREINNYHHAHDAYLNAVVGTALIKKYPKLESEFVYGDYKVYDVRKMIAKSEQEIGKATAKYFFYSNIMNFFKTEITLANGEIRKRPLIETNGETGEIVWDKGRDFATVRKVLSMPQVNIVKKTEVQTGGFSKESILPKRNSDKLIARKKDWDPKKYGGFDSPTVAYSVLVVAKVEKGKSKKLKSVKELLGITIMERSSFEKNPIDFLEAKGYKEVKKDLIIKLPKYSLFELENGRKRMLASAGELQKGNELALPSKYVNFLYLASHYEKLKGSPEDNEQKQLFVEQHKHYLDEIIEQISEFSKRVILADANLDKVLSAYNKHRDKPIREQAENIIHLFTLTNLGAPAAFKYFDTTIDRKRYTSTKEVLDATLIHQSITGLYETRIDLSQLGGDGGAEAAAKEAAAKEAAAKEAAAKALEAEAAAKEAAAKEAAAKEAAAKAGGLDDEYRLYSPLVKPDQNIQFWLEQFPQAWAETAGMGLAKQVPPQVIQLKASATPVSVRQYPLSKEAQEGIRPHVQRLIQQGILVPVQSPWNTPLLPVRKPGTNDYRPVQDLREVNKRVQDIHPTVPNPYNLLCALPPQRSWYTVLDLKDAFFCLRLHPTSQPLFAFEWRDPGTGRTGQLTWTRLPQGFKNSPTIFNEALHRDLANFRIQHPQVTLLQYVDDLLLAGATKQDCLEGTKALLLELSDLGYRASAKKAQICRREVTYLGYSLRDGQRWLTEARKKTVVQIPAPTTAKQVREFLGKAGFCRLFIPGFATLAAPLYPLTKPKGEFSWAPEHQKAFDAIKKALLSAPALALPDVTKPFTLYVDERKGVARGVLTQTLGPWRRPVAYLSKKLDPVASGWPVCLKAIAAVAILVKDADKLTLGQNITVIAPHALENIVRQPPDRWMTNARMTHYQSLLLTERVTFAPPAALNPATLLPEETDEPVTHDCHQLLIEETGVRKDLTDIPLTGEVLTWFTDGSSYVVEGKRMAGAAVVDGTRTIWASSLPEGTSAQKAELMALTQALRLAEGKSINIYTDSRYAFATAHVHGAIYKQRGWLTSAGREIKNKEEILSLLEALHLPKRLAIIHCPGHQKAKDPISRGNQMADRVAKQAAQGVNLLPAGKRTADGSEFEKRTADGSEFESPKKKAKVE

SEQ ID NO: 37 - protein, 2092 aa, synthetic construct
MPAAKRVKLDGGDKKYSIGLDIGTNSVGWAVITDEYKVPSKKFKVLGNTDRHSIKKNLIGALLFDSGETAEATRLKRTARRRYTRRKNRICYLQEIFSNEMAKVDDSFFHRLEESFLVEEDKKHERHPIFGNIVDEVAYHEKYPTIYHLRKKLVDSTDKADLRLIYLALAHMIKFRGHFLIEGDLNPDNSDVDKLFIQLVQTYNQLFEENPINASGVDAKAILSARLSKSRRLENLIAQLPGEKKNGLFGNLIALSLGLTPNFKSNFDLAEDAKLQLSKDTYDDDLDNLLAQIGDQYADLFLAAKNLSDAILLSDILRVNTEITKAPLSASMIKRYDEHHQDLTLLKALVRQQLPEKYKEIFFDQSKNGYAGYIDGGASQEEFYKFIKPILEKMDGTEELLVKLNREDLLRKQRTFDNGSIPHQIHLGELHAILRRQEDFYPFLKDNREKIEKILTFRIPYYVGPLARGNSRFAWMTRKSEETITPWNFEEVVDKGASAQSFIERMTNFDKNLPNEKVLPKHSLLYEYFTVYNELTKVKYVTEGMRKPAFLSGEQKKAIVDLLFKTNRKVTVKQLKEDYFKKIECFDSVEISGVEDRFNASLGTYHDLLKIIKDKDFLDNEENEDILEDIVLTLTLFEDREMIEERLKTYAHLFDDKVMKQLKRRRYTGWGRLSRKLINGIRDKQSGKTILDFLKSDGFANRNFMQLIHDDSLTFKEDIQKAQVSGQGDSLHEHIANLAGSPAIKKGILQTVKVVDELVKVMGRHKPENIVIEMARENQTTQKGQKNSRERMKRIEEGIKELGSQILKEHPVENTQLQNEKLYLYYLQNGRDMYVDQELDINRLSDYDVDHIVPQSFLKDDSIDNKVLTRSDKARGKSDNVPSEEVVKKMKNYWRQLLNAKLITQRKFDNLTKAERGGLSELDKAGFIKRQLVETRQITKHVAQILDSRMNTKYDENDKLIREVKVITLKSKLVSDFRKDFQFYKVREINNYHHAHDAYLNAVVGTALIKKYPKLESEFVYGDYKVYDVRKMIAKSEQEIGKATAKYFFYSNIMNFFKTEITLANGEIRKRPLIETNGETGEIVWDKGRDFATVRKVLSMPQVNIVKKTEVQTGGFSKESILPKRNSDKLIARKKDWDPKKYGGFDSPTVAYSVLVVAKVEKGKSKKLKSVKELLGITIMERSSFEKNPIDFLEAKGYKEVKKDLIIKLPKYSLFELENGRKRMLASAGELQKGNELALPSKYVNFLYLASHYEKLKGSPEDNEQKQLFVEQHKHYLDEIIEQISEFSKRVILADANLDKVLSAYNKHRDKPIREQAENIIHLFTLTNLGAPAAFKYFDTTIDRKRYTSTKEVLDATLIHQSITGLYETRIDLSQLGGDGGEAAAKEAAAKEAAAKGGLDDEYRLYSPLVKPDQNIQFWLEQFPQAWAETAGMGLAKQVPPQVIQLKASATPVSVRQYPLSKEAQEGIRPHVQRLIQQGILVPVQSPWNTPLLPVRKPGTNDYRPVQDLREVNKRVQDIHPTVPNPYNLLCALPPQRSWYTVLDLKDAFFCLRLHPTSQPLFAFEWRDPGTGRTGQLTWTRLPQGFKNSPTIFNEALHRDLANFRIQHPQVTLLQYVDDLLLAGATKQDCLEGTKALLLELSDLGYRASAKKAQICRREVTYLGYSLRDGQRWLTEARKKTVVQIPAPTTAKQVREFLGKAGFCRLFIPGFATLAAPLYPLTKPKGEFSWAPEHQKAFDAIKKALLSAPALALPDVTKPFTLYVDERKGVARGVLTQTLGPWRRPVAYLSKKLDPVASGWPVCLKAIAAVAILVKDADKLTLGQNITVIAPHALENIVRQPPDRWMTNARMTHYQSLLLTERVTFAPPAALNPATLLPEETDEPVTHDCHQLLIEETGVRKDLTDIPLTGEVLTWFTDGSSYVVEGKRMAGAAVVDGTRTIWASSLPEGTSAQKAELMALTQALRLAEGKSINIYTDSRYAFATAHVHGAIYKQRGWLTSAGREIKNKEEILSLLEALHLPKRLAIIHCPGHQKAKDPISRGNQMADRVAKQAAQGVNLLPAGKRTADGSEFEKRTADGSEFESPKKKAKVE

SEQ ID NO: 38 - protein, 2086 aa, synthetic construct
MPAAKRVKLDGGDKKYSIGLDIGTNSVGWAVITDEYKVPSKKFKVLGNTDRHSIKKNLIGALLFDSGETAEATRLKRTARRRYTRRKNRICYLQEIFSNEMAKVDDSFFHRLEESFLVEEDKKHERHPIFGNIVDEVAYHEKYPTIYHLRKKLVDSTDKADLRLIYLALAHMIKFRGHFLIEGDLNPDNSDVDKLFIQLVQTYNQLFEENPINASGVDAKAILSARLSKSRRLENLIAQLPGEKKNGLFGNLIALSLGLTPNFKSNFDLAEDAKLQLSKDTYDDDLDNLLAQIGDQYADLFLAAKNLSDAILLSDILRVNTEITKAPLSASMIKRYDEHHQDLTLLKALVRQQLPEKYKEIFFDQSKNGYAGYIDGGASQEEFYKFIKPILEKMDGTEELLVKLNREDLLRKQRTFDNGSIPHQIHLGELHAILRRQEDFYPFLKDNREKIEKILTFRIPYYVGPLARGNSRFAWMTRKSEETITPWNFEEVVDKGASAQSFIERMTNFDKNLPNEKVLPKHSLLYEYFTVYNELTKVKYVTEGMRKPAFLSGEQKKAIVDLLFKTNRKVTVKQLKEDYFKKIECFDSVEISGVEDRFNASLGTYHDLLKIIKDKDFLDNEENEDILEDIVLTLTLFEDREMIEERLKTYAHLFDDKVMKQLKRRRYTGWGRLSRKLINGIRDKQSGKTILDFLKSDGFANRNFMQLIHDDSLTFKEDIQKAQVSGQGDSLHEHIANLAGSPAIKKGILQTVKVVDELVKVMGRHKPENIVIEMARENQTTQKGQKNSRERMKRIEEGIKELGSQILKEHPVENTQLQNEKLYLYYLQNGRDMYVDQELDINRLSDYDVDHIVPQSFLKDDSIDNKVLTRSDKARGKSDNVPSEEVVKKMKNYWRQLLNAKLITQRKFDNLTKAERGGLSELDKAGFIKRQLVETRQITKHVAQILDSRMNTKYDENDKLIREVKVITLKSKLVSDFRKDFQFYKVREINNYHHAHDAYLNAVVGTALIKKYPKLESEFVYGDYKVYDVRKMIAKSEQEIGKATAKYFFYSNIMNFFKTEITLANGEIRKRPLIETNGETGEIVWDKGRDFATVRKVLSMPQVNIVKKTEVQTGGFSKESILPKRNSDKLIARKKDWDPKKYGGFDSPTVAYSVLVVAKVEKGKSKKLKSVKELLGITIMERSSFEKNPIDFLEAKGYKEVKKDLIIKLPKYSLFELENGRKRMLASAGELQKGNELALPSKYVNFLYLASHYEKLKGSPEDNEQKQLFVEQHKHYLDEIIEQISEFSKRVILADANLDKVLSAYNKHRDKPIREQAENIIHLFTLTNLGAPAAFKYFDTTIDRKRYTSTKEVLDATLIHQSITGLYETRIDLSQLGGDGGGGSGSSPAPGGLDDEYRLYSPLVKPDQNIQFWLEQFPQAWAETAGMGLAKQVPPQVIQLKASATPVSVRQYPLSKEAQEGIRPHVQRLIQQGILVPVQSPWNTPLLPVRKPGTNDYRPVQDLREVNKRVQDIHPTVPNPYNLLCALPPQRSWYTVLDLKDAFFCLRLHPTSQPLFAFEWRDPGTGRTGQLTWTRLPQGFKNSPTIFNEALHRDLANFRIQHPQVTLLQYVDDLLLAGATKQDCLEGTKALLLELSDLGYRASAKKAQICRREVTYLGYSLRDGQRWLTEARKKTVVQIPAPTTAKQVREFLGKAGFCRLFIPGFATLAAPLYPLTKPKGEFSWAPEHQKAFDAIKKALLSAPALALPDVTKPFTLYVDERKGVARGVLTQTLGPWRRPVAYLSKKLDPVASGWPVCLKAIAAVAILVKDADKLTLGQNITVIAPHALENIVRQPPDRWMTNARMTHYQSLLLTERVTFAPPAALNPATLLPEETDEPVTHDCHQLLIEETGVRKDLTDIPLTGEVLTWFTDGSSYVVEGKRMAGAAVVDGTRTIWASSLPEGTSAQKAELMALTQALRLAEGKSINIYTDSRYAFATAHVHGAIYKQRGWLTSAGREIKNKEEILSLLEALHLPKRLAIIHCPGHQKAKDPISRGNQMADRVAKQAAQGVNLLPAGKRTADGSEFEKRTADGSEFESPKKKAKVE

SEQ ID NO: 39 - protein, 2102 aa, synthetic construct
MPAAKRVKLDGGDKKYSIGLDIGTNSVGWAVITDEYKVPSKKFKVLGNTDRHSIKKNLIGALLFDSGETAEATRLKRTARRRYTRRKNRICYLQEIFSNEMAKVDDSFFHRLEESFLVEEDKKHERHPIFGNIVDEVAYHEKYPTIYHLRKKLVDSTDKADLRLIYLALAHMIKFRGHFLIEGDLNPDNSDVDKLFIQLVQTYNQLFEENPINASGVDAKAILSARLSKSRRLENLIAQLPGEKKNGLFGNLIALSLGLTPNFKSNFDLAEDAKLQLSKDTYDDDLDNLLAQIGDQYADLFLAAKNLSDAILLSDILRVNTEITKAPLSASMIKRYDEHHQDLTLLKALVRQQLPEKYKEIFFDQSKNGYAGYIDGGASQEEFYKFIKPILEKMDGTEELLVKLNREDLLRKQRTFDNGSIPHQIHLGELHAILRRQEDFYPFLKDNREKIEKILTFRIPYYVGPLARGNSRFAWMTRKSEETITPWNFEEVVDKGASAQSFIERMTNFDKNLPNEKVLPKHSLLYEYFTVYNELTKVKYVTEGMRKPAFLSGEQKKAIVDLLFKTNRKVTVKQLKEDYFKKIECFDSVEISGVEDRFNASLGTYHDLLKIIKDKDFLDNEENEDILEDIVLTLTLFEDREMIEERLKTYAHLFDDKVMKQLKRRRYTGWGRLSRKLINGIRDKQSGKTILDFLKSDGFANRNFMQLIHDDSLTFKEDIQKAQVSGQGDSLHEHIANLAGSPAIKKGILQTVKVVDELVKVMGRHKPENIVIEMARENQTTQKGQKNSRERMKRIEEGIKELGSQILKEHPVENTQLQNEKLYLYYLQNGRDMYVDQELDINRLSDYDVDHIVPQSFLKDDSIDNKVLTRSDKARGKSDNVPSEEVVKKMKNYWRQLLNAKLITQRKFDNLTKAERGGLSELDKAGFIKRQLVETRQITKHVAQILDSRMNTKYDENDKLIREVKVITLKSKLVSDFRKDFQFYKVREINNYHHAHDAYLNAVVGTALIKKYPKLESEFVYGDYKVYDVRKMIAKSEQEIGKATAKYFFYSNIMNFFKTEITLANGEIRKRPLIETNGETGEIVWDKGRDFATVRKVLSMPQVNIVKKTEVQTGGFSKESILPKRNSDKLIARKKDWDPKKYGGFDSPTVAYSVLVVAKVEKGKSKKLKSVKELLGITIMERSSFEKNPIDFLEAKGYKEVKKDLIIKLPKYSLFELENGRKRMLASAGELQKGNELALPSKYVNFLYLASHYEKLKGSPEDNEQKQLFVEQHKHYLDEIIEQISEFSKRVILADANLDKVLSAYNKHRDKPIREQAENIIHLFTLTNLGAPAAFKYFDTTIDRKRYTSTKEVLDATLIHQSITGLYETRIDLSQLGGDGGEAAAKEAAAKEAAAKEAAAKEAAAKGGLDDEYRLYSPLVKPDQNIQFWLEQFPQAWAETAGMGLAKQVPPQVIQLKASATPVSVRQYPLSKEAQEGIRPHVQRLIQQGILVPVQSPWNTPLLPVRKPGTNDYRPVQDLREVNKRVQDIHPTVPNPYNLLCALPPQRSWYTVLDLKDAFFCLRLHPTSQPLFAFEWRDPGTGRTGQLTWTRLPQGFKNSPTIFNEALHRDLANFRIQHPQVTLLQYVDDLLLAGATKQDCLEGTKALLLELSDLGYRASAKKAQICRREVTYLGYSLRDGQRWLTEARKKTVVQIPAPTTAKQVREFLGKAGFCRLFIPGFATLAAPLYPLTKPKGEFSWAPEHQKAFDAIKKALLSAPALALPDVTKPFTLYVDERKGVARGVLTQTLGPWRRPVAYLSKKLDPVASGWPVCLKAIAAVAILVKDADKLTLGQNITVIAPHALENIVRQPPDRWMTNARMTHYQSLLLTERVTFAPPAALNPATLLPEETDEPVTHDCHQLLIEETGVRKDLTDIPLTGEVLTWFTDGSSYVVEGKRMAGAAVVDGTRTIWASSLPEGTSAQKAELMALTQALRLAEGKSINIYTDSRYAFATAHVHGAIYKQRGWLTSAGREIKNKEEILSLLEALHLPKRLAIIHCPGHQKAKDPISRGNQMADRVAKQAAQGVNLLPAGKRTADGSEFEKRTADGSEFESPKKKAKVE

SEQ ID NO: 40 - protein, 2088 aa, synthetic construct
MPAAKRVKLDGGDKKYSIGLDIGTNSVGWAVITDEYKVPSKKFKVLGNTDRHSIKKNLIGALLFDSGETAEATRLKRTARRRYTRRKNRICYLQEIFSNEMAKVDDSFFHRLEESFLVEEDKKHERHPIFGNIVDEVAYHEKYPTIYHLRKKLVDSTDKADLRLIYLALAHMIKFRGHFLIEGDLNPDNSDVDKLFIQLVQTYNQLFEENPINASGVDAKAILSARLSKSRRLENLIAQLPGEKKNGLFGNLIALSLGLTPNFKSNFDLAEDAKLQLSKDTYDDDLDNLLAQIGDQYADLFLAAKNLSDAILLSDILRVNTEITKAPLSASMIKRYDEHHQDLTLLKALVRQQLPEKYKEIFFDQSKNGYAGYIDGGASQEEFYKFIKPILEKMDGTEELLVKLNREDLLRKQRTFDNGSIPHQIHLGELHAILRRQEDFYPFLKDNREKIEKILTFRIPYYVGPLARGNSRFAWMTRKSEETITPWNFEEVVDKGASAQSFIERMTNFDKNLPNEKVLPKHSLLYEYFTVYNELTKVKYVTEGMRKPAFLSGEQKKAIVDLLFKTNRKVTVKQLKEDYFKKIECFDSVEISGVEDRFNASLGTYHDLLKIIKDKDFLDNEENEDILEDIVLTLTLFEDREMIEERLKTYAHLFDDKVMKQLKRRRYTGWGRLSRKLINGIRDKQSGKTILDFLKSDGFANRNFMQLIHDDSLTFKEDIQKAQVSGQGDSLHEHIANLAGSPAIKKGILQTVKVVDELVKVMGRHKPENIVIEMARENQTTQKGQKNSRERMKRIEEGIKELGSQILKEHPVENTQLQNEKLYLYYLQNGRDMYVDQELDINRLSDYDVDHIVPQSFLKDDSIDNKVLTRSDKARGKSDNVPSEEVVKKMKNYWRQLLNAKLITQRKFDNLTKAERGGLSELDKAGFIKRQLVETRQITKHVAQILDSRMNTKYDENDKLIREVKVITLKSKLVSDFRKDFQFYKVREINNYHHAHDAYLNAVVGTALIKKYPKLESEFVYGDYKVYDVRKMIAKSEQEIGKATAKYFFYSNIMNFFKTEITLANGEIRKRPLIETNGETGEIVWDKGRDFATVRKVLSMPQVNIVKKTEVQTGGFSKESILPKRNSDKLIARKKDWDPKKYGGFDSPTVAYSVLVVAKVEKGKSKKLKSVKELLGITIMERSSFEKNPIDFLEAKGYKEVKKDLIIKLPKYSLFELENGRKRMLASAGELQKGNELALPSKYVNFLYLASHYEKLKGSPEDNEQKQLFVEQHKHYLDEIIEQISEFSKRVILADANLDKVLSAYNKHRDKPIREQAENIIHLFTLTNLGAPAAFKYFDTTIDRKRYTSTKEVLDATLIHQSITGLYETRIDLSQLGGDGGGSSGGGEAAAKGGLDDEYRLYSPLVKPDQNIQFWLEQFPQAWAETAGMGLAKQVPPQVIQLKASATPVSVRQYPLSKEAQEGIRPHVQRLIQQGILVPVQSPWNTPLLPVRKPGTNDYRPVQDLREVNKRVQDIHPTVPNPYNLLCALPPQRSWYTVLDLKDAFFCLRLHPTSQPLFAFEWRDPGTGRTGQLTWTRLPQGFKNSPTIFNEALHRDLANFRIQHPQVTLLQYVDDLLLAGATKQDCLEGTKALLLELSDLGYRASAKKAQICRREVTYLGYSLRDGQRWLTEARKKTVVQIPAPTTAKQVREFLGKAGFCRLFIPGFATLAAPLYPLTKPKGEFSWAPEHQKAFDAIKKALLSAPALALPDVTKPFTLYVDERKGVARGVLTQTLGPWRRPVAYLSKKLDPVASGWPVCLKAIAAVAILVKDADKLTLGQNITVIAPHALENIVRQPPDRWMTNARMTHYQSLLLTERVTFAPPAALNPATLLPEETDEPVTHDCHQLLIEETGVRKDLTDIPLTGEVLTWFTDGSSYVVEGKRMAGAAVVDGTRTIWASSLPEGTSAQKAELMALTQALRLAEGKSINIYTDSRYAFATAHVHGAIYKQRGWLTSAGREIKNKEEILSLLEALHLPKRLAIIHCPGHQKAKDPISRGNQMADRVAKQAAQGVNLLPAGKRTADGSEFEKRTADGSEFESPKKKAKVE

SEQ ID NO: 41 - protein, 2089 aa, synthetic construct
MPAAKRVKLDGGDKKYSIGLDIGTNSVGWAVITDEYKVPSKKFKVLGNTDRHSIKKNLIGALLFDSGETAEATRLKRTARRRYTRRKNRICYLQEIFSNEMAKVDDSFFHRLEESFLVEEDKKHERHPIFGNIVDEVAYHEKYPTIYHLRKKLVDSTDKADLRLIYLALAHMIKFRGHFLIEGDLNPDNSDVDKLFIQLVQTYNQLFEENPINASGVDAKAILSARLSKSRRLENLIAQLPGEKKNGLFGNLIALSLGLTPNFKSNFDLAEDAKLQLSKDTYDDDLDNLLAQIGDQYADLFLAAKNLSDAILLSDILRVNTEITKAPLSASMIKRYDEHHQDLTLLKALVRQQLPEKYKEIFFDQSKNGYAGYIDGGASQEEFYKFIKPILEKMDGTEELLVKLNREDLLRKQRTFDNGSIPHQIHLGELHAILRRQEDFYPFLKDNREKIEKILTFRIPYYVGPLARGNSRFAWMTRKSEETITPWNFEEVVDKGASAQSFIERMTNFDKNLPNEKVLPKHSLLYEYFTVYNELTKVKYVTEGMRKPAFLSGEQKKAIVDLLFKTNRKVTVKQLKEDYFKKIECFDSVEISGVEDRFNASLGTYHDLLKIIKDKDFLDNEENEDILEDIVLTLTLFEDREMIEERLKTYAHLFDDKVMKQLKRRRYTGWGRLSRKLINGIRDKQSGKTILDFLKSDGFANRNFMQLIHDDSLTFKEDIQKAQVSGQGDSLHEHIANLAGSPAIKKGILQTVKVVDELVKVMGRHKPENIVIEMARENQTTQKGQKNSRERMKRIEEGIKELGSQILKEHPVENTQLQNEKLYLYYLQNGRDMYVDQELDINRLSDYDVDHIVPQSFLKDDSIDNKVLTRSDKARGKSDNVPSEEVVKKMKNYWRQLLNAKLITQRKFDNLTKAERGGLSELDKAGFIKRQLVETRQITKHVAQILDSRMNTKYDENDKLIREVKVITLKSKLVSDFRKDFQFYKVREINNYHHAHDAYLNAVVGTALIKKYPKLESEFVYGDYKVYDVRKMIAKSEQEIGKATAKYFFYSNIMNFFKTEITLANGEIRKRPLIETNGETGEIVWDKGRDFATVRKVLSMPQVNIVKKTEVQTGGFSKESILPKRNSDKLIARKKDWDPKKYGGFDSPTVAYSVLVVAKVEKGKSKKLKSVKELLGITIMERSSFEKNPIDFLEAKGYKEVKKDLIIKLPKYSLFELENGRKRMLASAGELQKGNELALPSKYVNFLYLASHYEKLKGSPEDNEQKQLFVEQHKHYLDEIIEQISEFSKRVILADANLDKVLSAYNKHRDKPIREQAENIIHLFTLTNLGAPAAFKYFDTTIDRKRYTSTKEVLDATLIHQSITGLYETRIDLSQLGGDGGGSSGSSGSSGSSGGLDDEYRLYSPLVKPDQNIQFWLEQFPQAWAETAGMGLAKQVPPQVIQLKASATPVSVRQYPLSKEAQEGIRPHVQRLIQQGILVPVQSPWNTPLLPVRKPGTNDYRPVQDLREVNKRVQDIHPTVPNPYNLLCALPPQRSWYTVLDLKDAFFCLRLHPTSQPLFAFEWRDPGTGRTGQLTWTRLPQGFKNSPTIFNEALHRDLANFRIQHPQVTLLQYVDDLLLAGATKQDCLEGTKALLLELSDLGYRASAKKAQICRREVTYLGYSLRDGQRWLTEARKKTVVQIPAPTTAKQVREFLGKAGFCRLFIPGFATLAAPLYPLTKPKGEFSWAPEHQKAFDAIKKALLSAPALALPDVTKPFTLYVDERKGVARGVLTQTLGPWRRPVAYLSKKLDPVASGWPVCLKAIAAVAILVKDADKLTLGQNITVIAPHALENIVRQPPDRWMTNARMTHYQSLLLTERVTFAPPAALNPATLLPEETDEPVTHDCHQLLIEETGVRKDLTDIPLTGEVLTWFTDGSSYVVEGKRMAGAAVVDGTRTIWASSLPEGTSAQKAELMALTQALRLAEGKSINIYTDSRYAFATAHVHGAIYKQRGWLTSAGREIKNKEEILSLLEALHLPKRLAIIHCPGHQKAKDPISRGNQMADRVAKQAAQGVNLLPAGKRTADGSEFEKRTADGSEFESPKKKAKVE

SEQ ID NO: 42 - protein, 2088 aa, synthetic construct
MPAAKRVKLDGGDKKYSIGLDIGTNSVGWAVITDEYKVPSKKFKVLGNTDRHSIKKNLIGALLFDSGETAEATRLKRTARRRYTRRKNRICYLQEIFSNEMAKVDDSFFHRLEESFLVEEDKKHERHPIFGNIVDEVAYHEKYPTIYHLRKKLVDSTDKADLRLIYLALAHMIKFRGHFLIEGDLNPDNSDVDKLFIQLVQTYNQLFEENPINASGVDAKAILSARLSKSRRLENLIAQLPGEKKNGLFGNLIALSLGLTPNFKSNFDLAEDAKLQLSKDTYDDDLDNLLAQIGDQYADLFLAAKNLSDAILLSDILRVNTEITKAPLSASMIKRYDEHHQDLTLLKALVRQQLPEKYKEIFFDQSKNGYAGYIDGGASQEEFYKFIKPILEKMDGTEELLVKLNREDLLRKQRTFDNGSIPHQIHLGELHAILRRQEDFYPFLKDNREKIEKILTFRIPYYVGPLARGNSRFAWMTRKSEETITPWNFEEVVDKGASAQSFIERMTNFDKNLPNEKVLPKHSLLYEYFTVYNELTKVKYVTEGMRKPAFLSGEQKKAIVDLLFKTNRKVTVKQLKEDYFKKIECFDSVEISGVEDRFNASLGTYHDLLKIIKDKDFLDNEENEDILEDIVLTLTLFEDREMIEERLKTYAHLFDDKVMKQLKRRRYTGWGRLSRKLINGIRDKQSGKTILDFLKSDGFANRNFMQLIHDDSLTFKEDIQKAQVSGQGDSLHEHIANLAGSPAIKKGILQTVKVVDELVKVMGRHKPENIVIEMARENQTTQKGQKNSRERMKRIEEGIKELGSQILKEHPVENTQLQNEKLYLYYLQNGRDMYVDQELDINRLSDYDVDHIVPQSFLKDDSIDNKVLTRSDKARGKSDNVPSEEVVKKMKNYWRQLLNAKLITQRKFDNLTKAERGGLSELDKAGFIKRQLVETRQITKHVAQILDSRMNTKYDENDKLIREVKVITLKSKLVSDFRKDFQFYKVREINNYHHAHDAYLNAVVGTALIKKYPKLESEFVYGDYKVYDVRKMIAKSEQEIGKATAKYFFYSNIMNFFKTEITLANGEIRKRPLIETNGETGEIVWDKGRDFATVRKVLSMPQVNIVKKTEVQTGGFSKESILPKRNSDKLIARKKDWDPKKYGGFDSPTVAYSVLVVAKVEKGKSKKLKSVKELLGITIMERSSFEKNPIDFLEAKGYKEVKKDLIIKLPKYSLFELENGRKRMLASAGELQKGNELALPSKYVNFLYLASHYEKLKGSPEDNEQKQLFVEQHKHYLDEIIEQISEFSKRVILADANLDKVLSAYNKHRDKPIREQAENIIHLFTLTNLGAPAAFKYFDTTIDRKRYTSTKEVLDATLIHQSITGLYETRIDLSQLGGDGGGSSEAAAKGGGGGLDDEYRLYSPLVKPDQNIQFWLEQFPQAWAETAGMGLAKQVPPQVIQLKASATPVSVRQYPLSKEAQEGIRPHVQRLIQQGILVPVQSPWNTPLLPVRKPGTNDYRPVQDLREVNKRVQDIHPTVPNPYNLLCALPPQRSWYTVLDLKDAFFCLRLHPTSQPLFAFEWRDPGTGRTGQLTWTRLPQGFKNSPTIFNEALHRDLANFRIQHPQVTLLQYVDDLLLAGATKQDCLEGTKALLLELSDLGYRASAKKAQICRREVTYLGYSLRDGQRWLTEARKKTVVQIPAPTTAKQVREFLGKAGFCRLFIPGFATLAAPLYPLTKPKGEFSWAPEHQKAFDAIKKALLSAPALALPDVTKPFTLYVDERKGVARGVLTQTLGPWRRPVAYLSKKLDPVASGWPVCLKAIAAVAILVKDADKLTLGQNITVIAPHALENIVRQPPDRWMTNARMTHYQSLLLTERVTFAPPAALNPATLLPEETDEPVTHDCHQLLIEETGVRKDLTDIPLTGEVLTWFTDGSSYVVEGKRMAGAAVVDGTRTIWASSLPEGTSAQKAELMALTQALRLAEGKSINIYTDSRYAFATAHVHGAIYKQRGWLTSAGREIKNKEEILSLLEALHLPKRLAIIHCPGHQKAKDPISRGNQMADRVAKQAAQGVNLLPAGKRTADGSEFEKRTADGSEFESPKKKAKVE

SEQ ID NO: 43 - protein, 2086 aa, synthetic construct
MPAAKRVKLDGGDKKYSIGLDIGTNSVGWAVITDEYKVPSKKFKVLGNTDRHSIKKNLIGALLFDSGETAEATRLKRTARRRYTRRKNRICYLQEIFSNEMAKVDDSFFHRLEESFLVEEDKKHERHPIFGNIVDEVAYHEKYPTIYHLRKKLVDSTDKADLRLIYLALAHMIKFRGHFLIEGDLNPDNSDVDKLFIQLVQTYNQLFEENPINASGVDAKAILSARLSKSRRLENLIAQLPGEKKNGLFGNLIALSLGLTPNFKSNFDLAEDAKLQLSKDTYDDDLDNLLAQIGDQYADLFLAAKNLSDAILLSDILRVNTEITKAPLSASMIKRYDEHHQDLTLLKALVRQQLPEKYKEIFFDQSKNGYAGYIDGGASQEEFYKFIKPILEKMDGTEELLVKLNREDLLRKQRTFDNGSIPHQIHLGELHAILRRQEDFYPFLKDNREKIEKILTFRIPYYVGPLARGNSRFAWMTRKSEETITPWNFEEVVDKGASAQSFIERMTNFDKNLPNEKVLPKHSLLYEYFTVYNELTKVKYVTEGMRKPAFLSGEQKKAIVDLLFKTNRKVTVKQLKEDYFKKIECFDSVEISGVEDRFNASLGTYHDLLKIIKDKDFLDNEENEDILEDIVLTLTLFEDREMIEERLKTYAHLFDDKVMKQLKRRRYTGWGRLSRKLINGIRDKQSGKTILDFLKSDGFANRNFMQLIHDDSLTFKEDIQKAQVSGQGDSLHEHIANLAGSPAIKKGILQTVKVVDELVKVMGRHKPENIVIEMARENQTTQKGQKNSRERMKRIEEGIKELGSQILKEHPVENTQLQNEKLYLYYLQNGRDMYVDQELDINRLSDYDVDHIVPQSFLKDDSIDNKVLTRSDKARGKSDNVPSEEVVKKMKNYWRQLLNAKLITQRKFDNLTKAERGGLSELDKAGFIKRQLVETRQITKHVAQILDSRMNTKYDENDKLIREVKVITLKSKLVSDFRKDFQFYKVREINNYHHAHDAYLNAVVGTALIKKYPKLESEFVYGDYKVYDVRKMIAKSEQEIGKATAKYFFYSNIMNFFKTEITLANGEIRKRPLIETNGETGEIVWDKGRDFATVRKVLSMPQVNIVKKTEVQTGGFSKESILPKRNSDKLIARKKDWDPKKYGGFDSPTVAYSVLVVAKVEKGKSKKLKSVKELLGITIMERSSFEKNPIDFLEAKGYKEVKKDLIIKLPKYSLFELENGRKRMLASAGELQKGNELALPSKYVNFLYLASHYEKLKGSPEDNEQKQLFVEQHKHYLDEIIEQISEFSKRVILADANLDKVLSAYNKHRDKPIREQAENIIHLFTLTNLGAPAAFKYFDTTIDRKRYTSTKEVLDATLIHQSITGLYETRIDLSQLGGDGGGGGGSSPAPGGLDDEYRLYSPLVKPDQNIQFWLEQFPQAWAETAGMGLAKQVPPQVIQLKASATPVSVRQYPLSKEAQEGIRPHVQRLIQQGILVPVQSPWNTPLLPVRKPGTNDYRPVQDLREVNKRVQDIHPTVPNPYNLLCALPPQRSWYTVLDLKDAFFCLRLHPTSQPLFAFEWRDPGTGRTGQLTWTRLPQGFKNSPTIFNEALHRDLANFRIQHPQVTLLQYVDDLLLAGATKQDCLEGTKALLLELSDLGYRASAKKAQICRREVTYLGYSLRDGQRWLTEARKKTVVQIPAPTTAKQVREFLGKAGFCRLFIPGFATLAAPLYPLTKPKGEFSWAPEHQKAFDAIKKALLSAPALALPDVTKPFTLYVDERKGVARGVLTQTLGPWRRPVAYLSKKLDPVASGWPVCLKAIAAVAILVKDADKLTLGQNITVIAPHALENIVRQPPDRWMTNARMTHYQSLLLTERVTFAPPAALNPATLLPEETDEPVTHDCHQLLIEETGVRKDLTDIPLTGEVLTWFTDGSSYVVEGKRMAGAAVVDGTRTIWASSLPEGTSAQKAELMALTQALRLAEGKSINIYTDSRYAFATAHVHGAIYKQRGWLTSAGREIKNKEEILSLLEALHLPKRLAIIHCPGHQKAKDPISRGNQMADRVAKQAAQGVNLLPAGKRTADGSEFEKRTADGSEFESPKKKAKVE

SEQ ID NO: 44 - protein, 2086 aa, synthetic construct
MPAAKRVKLDGGDKKYSIGLDIGTNSVGWAVITDEYKVPSKKFKVLGNTDRHSIKKNLIGALLFDSGETAEATRLKRTARRRYTRRKNRICYLQEIFSNEMAKVDDSFFHRLEESFLVEEDKKHERHPIFGNIVDEVAYHEKYPTIYHLRKKLVDSTDKADLRLIYLALAHMIKFRGHFLIEGDLNPDNSDVDKLFIQLVQTYNQLFEENPINASGVDAKAILSARLSKSRRLENLIAQLPGEKKNGLFGNLIALSLGLTPNFKSNFDLAEDAKLQLSKDTYDDDLDNLLAQIGDQYADLFLAAKNLSDAILLSDILRVNTEITKAPLSASMIKRYDEHHQDLTLLKALVRQQLPEKYKEIFFDQSKNGYAGYIDGGASQEEFYKFIKPILEKMDGTEELLVKLNREDLLRKQRTFDNGSIPHQIHLGELHAILRRQEDFYPFLKDNREKIEKILTFRIPYYVGPLARGNSRFAWMTRKSEETITPWNFEEVVDKGASAQSFIERMTNFDKNLPNEKVLPKHSLLYEYFTVYNELTKVKYVTEGMRKPAFLSGEQKKAIVDLLFKTNRKVTVKQLKEDYFKKIECFDSVEISGVEDRFNASLGTYHDLLKIIKDKDFLDNEENEDILEDIVLTLTLFEDREMIEERLKTYAHLFDDKVMKQLKRRRYTGWGRLSRKLINGIRDKQSGKTILDFLKSDGFANRNFMQLIHDDSLTFKEDIQKAQVSGQGDSLHEHIANLAGSPAIKKGILQTVKVVDELVKVMGRHKPENIVIEMARENQTTQKGQKNSRERMKRIEEGIKELGSQILKEHPVENTQLQNEKLYLYYLQNGRDMYVDQELDINRLSDYDVDHIVPQSFLKDDSIDNKVLTRSDKARGKSDNVPSEEVVKKMKNYWRQLLNAKLITQRKFDNLTKAERGGLSELDKAGFIKRQLVETRQITKHVAQILDSRMNTKYDENDKLIREVKVITLKSKLVSDFRKDFQFYKVREINNYHHAHDAYLNAVVGTALIKKYPKLESEFVYGDYKVYDVRKMIAKSEQEIGKATAKYFFYSNIMNFFKTEITLANGEIRKRPLIETNGETGEIVWDKGRDFATVRKVLSMPQVNIVKKTEVQTGGFSKESILPKRNSDKLIARKKDWDPKKYGGFDSPTVAYSVLVVAKVEKGKSKKLKSVKELLGITIMERSSFEKNPIDFLEAKGYKEVKKDLIIKLPKYSLFELENGRKRMLASAGELQKGNELALPSKYVNFLYLASHYEKLKGSPEDNEQKQLFVEQHKHYLDEIIEQISEFSKRVILADANLDKVLSAYNKHRDKPIREQAENIIHLFTLTNLGAPAAFKYFDTTIDRKRYTSTKEVLDATLIHQSITGLYETRIDLSQLGGDGGPAPGGSGGGGGLDDEYRLYSPLVKPDQNIQFWLEQFPQAWAETAGMGLAKQVPPQVIQLKASATPVSVRQYPLSKEAQEGIRPHVQRLIQQGILVPVQSPWNTPLLPVRKPGTNDYRPVQDLREVNKRVQDIHPTVPNPYNLLCALPPQRSWYTVLDLKDAFFCLRLHPTSQPLFAFEWRDPGTGRTGQLTWTRLPQGFKNSPTIFNEALHRDLANFRIQHPQVTLLQYVDDLLLAGATKQDCLEGTKALLLELSDLGYRASAKKAQICRREVTYLGYSLRDGQRWLTEARKKTVVQIPAPTTAKQVREFLGKAGFCRLFIPGFATLAAPLYPLTKPKGEFSWAPEHQKAFDAIKKALLSAPALALPDVTKPFTLYVDERKGVARGVLTQTLGPWRRPVAYLSKKLDPVASGWPVCLKAIAAVAILVKDADKLTLGQNITVIAPHALENIVRQPPDRWMTNARMTHYQSLLLTERVTFAPPAALNPATLLPEETDEPVTHDCHQLLIEETGVRKDLTDIPLTGEVLTWFTDGSSYVVEGKRMAGAAVVDGTRTIWASSLPEGTSAQKAELMALTQALRLAEGKSINIYTDSRYAFATAHVHGAIYKQRGWLTSAGREIKNKEEILSLLEALHLPKRLAIIHCPGHQKAKDPISRGNQMADRVAKQAAQGVNLLPAGKRTADGSEFEKRTADGSEFESPKKKAKVE

SEQ ID NO: 45 - protein, 2084 aa, synthetic construct
MPAAKRVKLDGGDKKYSIGLDIGTNSVGWAVITDEYKVPSKKFKVLGNTDRHSIKKNLIGALLFDSGETAEATRLKRTARRRYTRRKNRICYLQEIFSNEMAKVDDSFFHRLEESFLVEEDKKHERHPIFGNIVDEVAYHEKYPTIYHLRKKLVDSTDKADLRLIYLALAHMIKFRGHFLIEGDLNPDNSDVDKLFIQLVQTYNQLFEENPINASGVDAKAILSARLSKSRRLENLIAQLPGEKKNGLFGNLIALSLGLTPNFKSNFDLAEDAKLQLSKDTYDDDLDNLLAQIGDQYADLFLAAKNLSDAILLSDILRVNTEITKAPLSASMIKRYDEHHQDLTLLKALVRQQLPEKYKEIFFDQSKNGYAGYIDGGASQEEFYKFIKPILEKMDGTEELLVKLNREDLLRKQRTFDNGSIPHQIHLGELHAILRRQEDFYPFLKDNREKIEKILTFRIPYYVGPLARGNSRFAWMTRKSEETITPWNFEEVVDKGASAQSFIERMTNFDKNLPNEKVLPKHSLLYEYFTVYNELTKVKYVTEGMRKPAFLSGEQKKAIVDLLFKTNRKVTVKQLKEDYFKKIECFDSVEISGVEDRFNASLGTYHDLLKIIKDKDFLDNEENEDILEDIVLTLTLFEDREMIEERLKTYAHLFDDKVMKQLKRRRYTGWGRLSRKLINGIRDKQSGKTILDFLKSDGFANRNFMQLIHDDSLTFKEDIQKAQVSGQGDSLHEHIANLAGSPAIKKGILQTVKVVDELVKVMGRHKPENIVIEMARENQTTQKGQKNSRERMKRIEEGIKELGSQILKEHPVENTQLQNEKLYLYYLQNGRDMYVDQELDINRLSDYDVDHIVPQSFLKDDSIDNKVLTRSDKARGKSDNVPSEEVVKKMKNYWRQLLNAKLITQRKFDNLTKAERGGLSELDKAGFIKRQLVETRQITKHVAQILDSRMNTKYDENDKLIREVKVITLKSKLVSDFRKDFQFYKVREINNYHHAHDAYLNAVVGTALIKKYPKLESEFVYGDYKVYDVRKMIAKSEQEIGKATAKYFFYSNIMNFFKTEITLANGEIRKRPLIETNGETGEIVWDKGRDFATVRKVLSMPQVNIVKKTEVQTGGFSKESILPKRNSDKLIARKKDWDPKKYGGFDSPTVAYSVLVVAKVEKGKSKKLKSVKELLGITIMERSSFEKNPIDFLEAKGYKEVKKDLIIKLPKYSLFELENGRKRMLASAGELQKGNELALPSKYVNFLYLASHYEKLKGSPEDNEQKQLFVEQHKHYLDEIIEQISEFSKRVILADANLDKVLSAYNKHRDKPIREQAENIIHLFTLTNLGAPAAFKYFDTTIDRKRYTSTKEVLDATLIHQSITGLYETRIDLSQLGGDGGPAPAPAPGGLDDEYRLYSPLVKPDQNIQFWLEQFPQAWAETAGMGLAKQVPPQVIQLKASATPVSVRQYPLSKEAQEGIRPHVQRLIQQGILVPVQSPWNTPLLPVRKPGTNDYRPVQDLREVNKRVQDIHPTVPNPYNLLCALPPQRSWYTVLDLKDAFFCLRLHPTSQPLFAFEWRDPGTGRTGQLTWTRLPQGFKNSPTIFNEALHRDLANFRIQHPQVTLLQYVDDLLLAGATKQDCLEGTKALLLELSDLGYRASAKKAQICRREVTYLGYSLRDGQRWLTEARKKTVVQIPAPTTAKQVREFLGKAGFCRLFIPGFATLAAPLYPLTKPKGEFSWAPEHQKAFDAIKKALLSAPALALPDVTKPFTLYVDERKGVARGVLTQTLGPWRRPVAYLSKKLDPVASGWPVCLKAIAAVAILVKDADKLTLGQNITVIAPHALENIVRQPPDRWMTNARMTHYQSLLLTERVTFAPPAALNPATLLPEETDEPVTHDCHQLLIEETGVRKDLTDIPLTGEVLTWFTDGSSYVVEGKRMAGAAVVDGTRTIWASSLPEGTSAQKAELMALTQALRLAEGKSINIYTDSRYAFATAHVHGAIYKQRGWLTSAGREIKNKEEILSLLEALHLPKRLAIIHCPGHQKAKDPISRGNQMADRVAKQAAQGVNLLPAGKRTADGSEFEKRTADGSEFESPKKKAKVE

SEQ ID NO: 46 - protein, 2097 aa, synthetic construct
MPAAKRVKLDGGDKKYSIGLDIGTNSVGWAVITDEYKVPSKKFKVLGNTDRHSIKKNLIGALLFDSGETAEATRLKRTARRRYTRRKNRICYLQEIFSNEMAKVDDSFFHRLEESFLVEEDKKHERHPIFGNIVDEVAYHEKYPTIYHLRKKLVDSTDKADLRLIYLALAHMIKFRGHFLIEGDLNPDNSDVDKLFIQLVQTYNQLFEENPINASGVDAKAILSARLSKSRRLENLIAQLPGEKKNGLFGNLIALSLGLTPNFKSNFDLAEDAKLQLSKDTYDDDLDNLLAQIGDQYADLFLAAKNLSDAILLSDILRVNTEITKAPLSASMIKRYDEHHQDLTLLKALVRQQLPEKYKEIFFDQSKNGYAGYIDGGASQEEFYKFIKPILEKMDGTEELLVKLNREDLLRKQRTFDNGSIPHQIHLGELHAILRRQEDFYPFLKDNREKIEKILTFRIPYYVGPLARGNSRFAWMTRKSEETITPWNFEEVVDKGASAQSFIERMTNFDKNLPNEKVLPKHSLLYEYFTVYNELTKVKYVTEGMRKPAFLSGEQKKAIVDLLFKTNRKVTVKQLKEDYFKKIECFDSVEISGVEDRFNASLGTYHDLLKIIKDKDFLDNEENEDILEDIVLTLTLFEDREMIEERLKTYAHLFDDKVMKQLKRRRYTGWGRLSRKLINGIRDKQSGKTILDFLKSDGFANRNFMQLIHDDSLTFKEDIQKAQVSGQGDSLHEHIANLAGSPAIKKGILQTVKVVDELVKVMGRHKPENIVIEMARENQTTQKGQKNSRERMKRIEEGIKELGSQILKEHPVENTQLQNEKLYLYYLQNGRDMYVDQELDINRLSDYDVDHIVPQSFLKDDSIDNKVLTRSDKARGKSDNVPSEEVVKKMKNYWRQLLNAKLITQRKFDNLTKAERGGLSELDKAGFIKRQLVETRQITKHVAQILDSRMNTKYDENDKLIREVKVITLKSKLVSDFRKDFQFYKVREINNYHHAHDAYLNAVVGTALIKKYPKLESEFVYGDYKVYDVRKMIAKSEQEIGKATAKYFFYSNIMNFFKTEITLANGEIRKRPLIETNGETGEIVWDKGRDFATVRKVLSMPQVNIVKKTEVQTGGFSKESILPKRNSDKLIARKKDWDPKKYGGFDSPTVAYSVLVVAKVEKGKSKKLKSVKELLGITIMERSSFEKNPIDFLEAKGYKEVKKDLIIKLPKYSLFELENGRKRMLASAGELQKGNELALPSKYVNFLYLASHYEKLKGSPEDNEQKQLFVEQHKHYLDEIIEQISEFSKRVILADANLDKVLSAYNKHRDKPIREQAENIIHLFTLTNLGAPAAFKYFDTTIDRKRYTSTKEVLDATLIHQSITGLYETRIDLSQLGGDGGEAAAKEAAAKEAAAKEAAAKGGLDDEYRLYSPLVKPDQNIQFWLEQFPQAWAETAGMGLAKQVPPQVIQLKASATPVSVRQYPLSKEAQEGIRPHVQRLIQQGILVPVQSPWNTPLLPVRKPGTNDYRPVQDLREVNKRVQDIHPTVPNPYNLLCALPPQRSWYTVLDLKDAFFCLRLHPTSQPLFAFEWRDPGTGRTGQLTWTRLPQGFKNSPTIFNEALHRDLANFRIQHPQVTLLQYVDDLLLAGATKQDCLEGTKALLLELSDLGYRASAKKAQICRREVTYLGYSLRDGQRWLTEARKKTVVQIPAPTTAKQVREFLGKAGFCRLFIPGFATLAAPLYPLTKPKGEFSWAPEHQKAFDAIKKALLSAPALALPDVTKPFTLYVDERKGVARGVLTQTLGPWRRPVAYLSKKLDPVASGWPVCLKAIAAVAILVKDADKLTLGQNITVIAPHALENIVRQPPDRWMTNARMTHYQSLLLTERVTFAPPAALNPATLLPEETDEPVTHDCHQLLIEETGVRKDLTDIPLTGEVLTWFTDGSSYVVEGKRMAGAAVVDGTRTIWASSLPEGTSAQKAELMALTQALRLAEGKSINIYTDSRYAFATAHVHGAIYKQRGWLTSAGREIKNKEEILSLLEALHLPKRLAIIHCPGHQKAKDPISRGNQMADRVAKQAAQGVNLLPAGKRTADGSEFEKRTADGSEFESPKKKAKVE

SEQ ID NO: 47 - protein, 2083 aa, synthetic construct
MPAAKRVKLDGGDKKYSIGLDIGTNSVGWAVITDEYKVPSKKFKVLGNTDRHSIKKNLIGALLFDSGETAEATRLKRTARRRYTRRKNRICYLQEIFSNEMAKVDDSFFHRLEESFLVEEDKKHERHPIFGNIVDEVAYHEKYPTIYHLRKKLVDSTDKADLRLIYLALAHMIKFRGHFLIEGDLNPDNSDVDKLFIQLVQTYNQLFEENPINASGVDAKAILSARLSKSRRLENLIAQLPGEKKNGLFGNLIALSLGLTPNFKSNFDLAEDAKLQLSKDTYDDDLDNLLAQIGDQYADLFLAAKNLSDAILLSDILRVNTEITKAPLSASMIKRYDEHHQDLTLLKALVRQQLPEKYKEIFFDQSKNGYAGYIDGGASQEEFYKFIKPILEKMDGTEELLVKLNREDLLRKQRTFDNGSIPHQIHLGELHAILRRQEDFYPFLKDNREKIEKILTFRIPYYVGPLARGNSRFAWMTRKSEETITPWNFEEVVDKGASAQSFIERMTNFDKNLPNEKVLPKHSLLYEYFTVYNELTKVKYVTEGMRKPAFLSGEQKKAIVDLLFKTNRKVTVKQLKEDYFKKIECFDSVEISGVEDRFNASLGTYHDLLKIIKDKDFLDNEENEDILEDIVLTLTLFEDREMIEERLKTYAHLFDDKVMKQLKRRRYTGWGRLSRKLINGIRDKQSGKTILDFLKSDGFANRNFMQLIHDDSLTFKEDIQKAQVSGQGDSLHEHIANLAGSPAIKKGILQTVKVVDELVKVMGRHKPENIVIEMARENQTTQKGQKNSRERMKRIEEGIKELGSQILKEHPVENTQLQNEKLYLYYLQNGRDMYVDQELDINRLSDYDVDHIVPQSFLKDDSIDNKVLTRSDKARGKSDNVPSEEVVKKMKNYWRQLLNAKLITQRKFDNLTKAERGGLSELDKAGFIKRQLVETRQITKHVAQILDSRMNTKYDENDKLIREVKVITLKSKLVSDFRKDFQFYKVREINNYHHAHDAYLNAVVGTALIKKYPKLESEFVYGDYKVYDVRKMIAKSEQEIGKATAKYFFYSNIMNFFKTEITLANGEIRKRPLIETNGETGEIVWDKGRDFATVRKVLSMPQVNIVKKTEVQTGGFSKESILPKRNSDKLIARKKDWDPKKYGGFDSPTVAYSVLVVAKVEKGKSKKLKSVKELLGITIMERSSFEKNPIDFLEAKGYKEVKKDLIIKLPKYSLFELENGRKRMLASAGELQKGNELALPSKYVNFLYLASHYEKLKGSPEDNEQKQLFVEQHKHYLDEIIEQISEFSKRVILADANLDKVLSAYNKHRDKPIREQAENIIHLFTLTNLGAPAAFKYFDTTIDRKRYTSTKEVLDATLIHQSITGLYETRIDLSQLGGDGGGSSPAPGGLDDEYRLYSPLVKPDQNIQFWLEQFPQAWAETAGMGLAKQVPPQVIQLKASATPVSVRQYPLSKEAQEGIRPHVQRLIQQGILVPVQSPWNTPLLPVRKPGTNDYRPVQDLREVNKRVQDIHPTVPNPYNLLCALPPQRSWYTVLDLKDAFFCLRLHPTSQPLFAFEWRDPGTGRTGQLTWTRLPQGFKNSPTIFNEALHRDLANFRIQHPQVTLLQYVDDLLLAGATKQDCLEGTKALLLELSDLGYRASAKKAQICRREVTYLGYSLRDGQRWLTEARKKTVVQIPAPTTAKQVREFLGKAGFCRLFIPGFATLAAPLYPLTKPKGEFSWAPEHQKAFDAIKKALLSAPALALPDVTKPFTLYVDERKGVARGVLTQTLGPWRRPVAYLSKKLDPVASGWPVCLKAIAAVAILVKDADKLTLGQNITVIAPHALENIVRQPPDRWMTNARMTHYQSLLLTERVTFAPPAALNPATLLPEETDEPVTHDCHQLLIEETGVRKDLTDIPLTGEVLTWFTDGSSYVVEGKRMAGAAVVDGTRTIWASSLPEGTSAQKAELMALTQALRLAEGKSINIYTDSRYAFATAHVHGAIYKQRGWLTSAGREIKNKEEILSLLEALHLPKRLAIIHCPGHQKAKDPISRGNQMADRVAKQAAQGVNLLPAGKRTADGSEFEKRTADGSEFESPKKKAKVE

SEQ ID NO: 48 - protein, 2085 aa, synthetic construct
MPAAKRVKLDGGDKKYSIGLDIGTNSVGWAVITDEYKVPSKKFKVLGNTDRHSIKKNLIGALLFDSGETAEATRLKRTARRRYTRRKNRICYLQEIFSNEMAKVDDSFFHRLEESFLVEEDKKHERHPIFGNIVDEVAYHEKYPTIYHLRKKLVDSTDKADLRLIYLALAHMIKFRGHFLIEGDLNPDNSDVDKLFIQLVQTYNQLFEENPINASGVDAKAILSARLSKSRRLENLIAQLPGEKKNGLFGNLIALSLGLTPNFKSNFDLAEDAKLQLSKDTYDDDLDNLLAQIGDQYADLFLAAKNLSDAILLSDILRVNTEITKAPLSASMIKRYDEHHQDLTLLKALVRQQLPEKYKEIFFDQSKNGYAGYIDGGASQEEFYKFIKPILEKMDGTEELLVKLNREDLLRKQRTFDNGSIPHQIHLGELHAILRRQEDFYPFLKDNREKIEKILTFRIPYYVGPLARGNSRFAWMTRKSEETITPWNFEEVVDKGASAQSFIERMTNFDKNLPNEKVLPKHSLLYEYFTVYNELTKVKYVTEGMRKPAFLSGEQKKAIVDLLFKTNRKVTVKQLKEDYFKKIECFDSVEISGVEDRFNASLGTYHDLLKIIKDKDFLDNEENEDILEDIVLTLTLFEDREMIEERLKTYAHLFDDKVMKQLKRRRYTGWGRLSRKLINGIRDKQSGKTILDFLKSDGFANRNFMQLIHDDSLTFKEDIQKAQVSGQGDSLHEHIANLAGSPAIKKGILQTVKVVDELVKVMGRHKPENIVIEMARENQTTQKGQKNSRERMKRIEEGIKELGSQILKEHPVENTQLQNEKLYLYYLQNGRDMYVDQELDINRLSDYDVDHIVPQSFLKDDSIDNKVLTRSDKARGKSDNVPSEEVVKKMKNYWRQLLNAKLITQRKFDNLTKAERGGLSELDKAGFIKRQLVETRQITKHVAQILDSRMNTKYDENDKLIREVKVITLKSKLVSDFRKDFQFYKVREINNYHHAHDAYLNAVVGTALIKKYPKLESEFVYGDYKVYDVRKMIAKSEQEIGKATAKYFFYSNIMNFFKTEITLANGEIRKRPLIETNGETGEIVWDKGRDFATVRKVLSMPQVNIVKKTEVQTGGFSKESILPKRNSDKLIARKKDWDPKKYGGFDSPTVAYSVLVVAKVEKGKSKKLKSVKELLGITIMERSSFEKNPIDFLEAKGYKEVKKDLIIKLPKYSLFELENGRKRMLASAGELQKGNELALPSKYVNFLYLASHYEKLKGSPEDNEQKQLFVEQHKHYLDEIIEQISEFSKRVILADANLDKVLSAYNKHRDKPIREQAENIIHLFTLTNLGAPAAFKYFDTTIDRKRYTSTKEVLDATLIHQSITGLYETRIDLSQLGGDGGEAAAKGGGGGLDDEYRLYSPLVKPDQNIQFWLEQFPQAWAETAGMGLAKQVPPQVIQLKASATPVSVRQYPLSKEAQEGIRPHVQRLIQQGILVPVQSPWNTPLLPVRKPGTNDYRPVQDLREVNKRVQDIHPTVPNPYNLLCALPPQRSWYTVLDLKDAFFCLRLHPTSQPLFAFEWRDPGTGRTGQLTWTRLPQGFKNSPTIFNEALHRDLANFRIQHPQVTLLQYVDDLLLAGATKQDCLEGTKALLLELSDLGYRASAKKAQICRREVTYLGYSLRDGQRWLTEARKKTVVQIPAPTTAKQVREFLGKAGFCRLFIPGFATLAAPLYPLTKPKGEFSWAPEHQKAFDAIKKALLSAPALALPDVTKPFTLYVDERKGVARGVLTQTLGPWRRPVAYLSKKLDPVASGWPVCLKAIAAVAILVKDADKLTLGQNITVIAPHALENIVRQPPDRWMTNARMTHYQSLLLTERVTFAPPAALNPATLLPEETDEPVTHDCHQLLIEETGVRKDLTDIPLTGEVLTWFTDGSSYVVEGKRMAGAAVVDGTRTIWASSLPEGTSAQKAELMALTQALRLAEGKSINIYTDSRYAFATAHVHGAIYKQRGWLTSAGREIKNKEEILSLLEALHLPKRLAIIHCPGHQKAKDPISRGNQMADRVAKQAAQGVNLLPAGKRTADGSEFEKRTADGSEFESPKKKAKVE

SEQ ID NO: 49 - protein, 2088 aa, synthetic construct
MPAAKRVKLDGGDKKYSIGLDIGTNSVGWAVITDEYKVPSKKFKVLGNTDRHSIKKNLIGALLFDSGETAEATRLKRTARRRYTRRKNRICYLQEIFSNEMAKVDDSFFHRLEESFLVEEDKKHERHPIFGNIVDEVAYHEKYPTIYHLRKKLVDSTDKADLRLIYLALAHMIKFRGHFLIEGDLNPDNSDVDKLFIQLVQTYNQLFEENPINASGVDAKAILSARLSKSRRLENLIAQLPGEKKNGLFGNLIALSLGLTPNFKSNFDLAEDAKLQLSKDTYDDDLDNLLAQIGDQYADLFLAAKNLSDAILLSDILRVNTEITKAPLSASMIKRYDEHHQDLTLLKALVRQQLPEKYKEIFFDQSKNGYAGYIDGGASQEEFYKFIKPILEKMDGTEELLVKLNREDLLRKQRTFDNGSIPHQIHLGELHAILRRQEDFYPFLKDNREKIEKILTFRIPYYVGPLARGNSRFAWMTRKSEETITPWNFEEVVDKGASAQSFIERMTNFDKNLPNEKVLPKHSLLYEYFTVYNELTKVKYVTEGMRKPAFLSGEQKKAIVDLLFKTNRKVTVKQLKEDYFKKIECFDSVEISGVEDRFNASLGTYHDLLKIIKDKDFLDNEENEDILEDIVLTLTLFEDREMIEERLKTYAHLFDDKVMKQLKRRRYTGWGRLSRKLINGIRDKQSGKTILDFLKSDGFANRNFMQLIHDDSLTFKEDIQKAQVSGQGDSLHEHIANLAGSPAIKKGILQTVKVVDELVKVMGRHKPENIVIEMARENQTTQKGQKNSRERMKRIEEGIKELGSQILKEHPVENTQLQNEKLYLYYLQNGRDMYVDQELDINRLSDYDVDHIVPQSFLKDDSIDNKVLTRSDKARGKSDNVPSEEVVKKMKNYWRQLLNAKLITQRKFDNLTKAERGGLSELDKAGFIKRQLVETRQITKHVAQILDSRMNTKYDENDKLIREVKVITLKSKLVSDFRKDFQFYKVREINNYHHAHDAYLNAVVGTALIKKYPKLESEFVYGDYKVYDVRKMIAKSEQEIGKATAKYFFYSNIMNFFKTEITLANGEIRKRPLIETNGETGEIVWDKGRDFATVRKVLSMPQVNIVKKTEVQTGGFSKESILPKRNSDKLIARKKDWDPKKYGGFDSPTVAYSVLVVAKVEKGKSKKLKSVKELLGITIMERSSFEKNPIDFLEAKGYKEVKKDLIIKLPKYSLFELENGRKRMLASAGELQKGNELALPSKYVNFLYLASHYEKLKGSPEDNEQKQLFVEQHKHYLDEIIEQISEFSKRVILADANLDKVLSAYNKHRDKPIREQAENIIHLFTLTNLGAPAAFKYFDTTIDRKRYTSTKEVLDATLIHQSITGLYETRIDLSQLGGDGGGGSEAAAKPAPGGLDDEYRLYSPLVKPDQNIQFWLEQFPQAWAETAGMGLAKQVPPQVIQLKASATPVSVRQYPLSKEAQEGIRPHVQRLIQQGILVPVQSPWNTPLLPVRKPGTNDYRPVQDLREVNKRVQDIHPTVPNPYNLLCALPPQRSWYTVLDLKDAFFCLRLHPTSQPLFAFEWRDPGTGRTGQLTWTRLPQGFKNSPTIFNEALHRDLANFRIQHPQVTLLQYVDDLLLAGATKQDCLEGTKALLLELSDLGYRASAKKAQICRREVTYLGYSLRDGQRWLTEARKKTVVQIPAPTTAKQVREFLGKAGFCRLFIPGFATLAAPLYPLTKPKGEFSWAPEHQKAFDAIKKALLSAPALALPDVTKPFTLYVDERKGVARGVLTQTLGPWRRPVAYLSKKLDPVASGWPVCLKAIAAVAILVKDADKLTLGQNITVIAPHALENIVRQPPDRWMTNARMTHYQSLLLTERVTFAPPAALNPATLLPEETDEPVTHDCHQLLIEETGVRKDLTDIPLTGEVLTWFTDGSSYVVEGKRMAGAAVVDGTRTIWASSLPEGTSAQKAELMALTQALRLAEGKSINIYTDSRYAFATAHVHGAIYKQRGWLTSAGREIKNKEEILSLLEALHLPKRLAIIHCPGHQKAKDPISRGNQMADRVAKQAAQGVNLLPAGKRTADGSEFEKRTADGSEFESPKKKAKVE

SEQ ID NO: 50 - protein, 2088 aa, synthetic construct
MPAAKRVKLDGGDKKYSIGLDIGTNSVGWAVITDEYKVPSKKFKVLGNTDRHSIKKNLIGALLFDSGETAEATRLKRTARRRYTRRKNRICYLQEIFSNEMAKVDDSFFHRLEESFLVEEDKKHERHPIFGNIVDEVAYHEKYPTIYHLRKKLVDSTDKADLRLIYLALAHMIKFRGHFLIEGDLNPDNSDVDKLFIQLVQTYNQLFEENPINASGVDAKAILSARLSKSRRLENLIAQLPGEKKNGLFGNLIALSLGLTPNFKSNFDLAEDAKLQLSKDTYDDDLDNLLAQIGDQYADLFLAAKNLSDAILLSDILRVNTEITKAPLSASMIKRYDEHHQDLTLLKALVRQQLPEKYKEIFFDQSKNGYAGYIDGGASQEEFYKFIKPILEKMDGTEELLVKLNREDLLRKQRTFDNGSIPHQIHLGELHAILRRQEDFYPFLKDNREKIEKILTFRIPYYVGPLARGNSRFAWMTRKSEETITPWNFEEVVDKGASAQSFIERMTNFDKNLPNEKVLPKHSLLYEYFTVYNELTKVKYVTEGMRKPAFLSGEQKKAIVDLLFKTNRKVTVKQLKEDYFKKIECFDSVEISGVEDRFNASLGTYHDLLKIIKDKDFLDNEENEDILEDIVLTLTLFEDREMIEERLKTYAHLFDDKVMKQLKRRRYTGWGRLSRKLINGIRDKQSGKTILDFLKSDGFANRNFMQLIHDDSLTFKEDIQKAQVSGQGDSLHEHIANLAGSPAIKKGILQTVKVVDELVKVMGRHKPENIVIEMARENQTTQKGQKNSRERMKRIEEGIKELGSQILKEHPVENTQLQNEKLYLYYLQNGRDMYVDQELDINRLSDYDVDHIVPQSFLKDDSIDNKVLTRSDKARGKSDNVPSEEVVKKMKNYWRQLLNAKLITQRKFDNLTKAERGGLSELDKAGFIKRQLVETRQITKHVAQILDSRMNTKYDENDKLIREVKVITLKSKLVSDFRKDFQFYKVREINNYHHAHDAYLNAVVGTALIKKYPKLESEFVYGDYKVYDVRKMIAKSEQEIGKATAKYFFYSNIMNFFKTEITLANGEIRKRPLIETNGETGEIVWDKGRDFATVRKVLSMPQVNIVKKTEVQTGGFSKESILPKRNSDKLIARKKDWDPKKYGGFDSPTVAYSVLVVAKVEKGKSKKLKSVKELLGITIMERSSFEKNPIDFLEAKGYKEVKKDLIIKLPKYSLFELENGRKRMLASAGELQKGNELALPSKYVNFLYLASHYEKLKGSPEDNEQKQLFVEQHKHYLDEIIEQISEFSKRVILADANLDKVLSAYNKHRDKPIREQAENIIHLFTLTNLGAPAAFKYFDTTIDRKRYTSTKEVLDATLIHQSITGLYETRIDLSQLGGDGGPAPGGGEAAAKGGLDDEYRLYSPLVKPDQNIQFWLEQFPQAWAETAGMGLAKQVPPQVIQLKASATPVSVRQYPLSKEAQEGIRPHVQRLIQQGILVPVQSPWNTPLLPVRKPGTNDYRPVQDLREVNKRVQDIHPTVPNPYNLLCALPPQRSWYTVLDLKDAFFCLRLHPTSQPLFAFEWRDPGTGRTGQLTWTRLPQGFKNSPTIFNEALHRDLANFRIQHPQVTLLQYVDDLLLAGATKQDCLEGTKALLLELSDLGYRASAKKAQICRREVTYLGYSLRDGQRWLTEARKKTVVQIPAPTTAKQVREFLGKAGFCRLFIPGFATLAAPLYPLTKPKGEFSWAPEHQKAFDAIKKALLSAPALALPDVTKPFTLYVDERKGVARGVLTQTLGPWRRPVAYLSKKLDPVASGWPVCLKAIAAVAILVKDADKLTLGQNITVIAPHALENIVRQPPDRWMTNARMTHYQSLLLTERVTFAPPAALNPATLLPEETDEPVTHDCHQLLIEETGVRKDLTDIPLTGEVLTWFTDGSSYVVEGKRMAGAAVVDGTRTIWASSLPEGTSAQKAELMALTQALRLAEGKSINIYTDSRYAFATAHVHGAIYKQRGWLTSAGREIKNKEEILSLLEALHLPKRLAIIHCPGHQKAKDPISRGNQMADRVAKQAAQGVNLLPAGKRTADGSEFEKRTADGSEFESPKKKAKVE

SEQ ID NO: 51 - protein, 2092 aa, synthetic construct
MPAAKRVKLDGGDKKYSIGLDIGTNSVGWAVITDEYKVPSKKFKVLGNTDRHSIKKNLIGALLFDSGETAEATRLKRTARRRYTRRKNRICYLQEIFSNEMAKVDDSFFHRLEESFLVEEDKKHERHPIFGNIVDEVAYHEKYPTIYHLRKKLVDSTDKADLRLIYLALAHMIKFRGHFLIEGDLNPDNSDVDKLFIQLVQTYNQLFEENPINASGVDAKAILSARLSKSRRLENLIAQLPGEKKNGLFGNLIALSLGLTPNFKSNFDLAEDAKLQLSKDTYDDDLDNLLAQIGDQYADLFLAAKNLSDAILLSDILRVNTEITKAPLSASMIKRYDEHHQDLTLLKALVRQQLPEKYKEIFFDQSKNGYAGYIDGGASQEEFYKFIKPILEKMDGTEELLVKLNREDLLRKQRTFDNGSIPHQIHLGELHAILRRQEDFYPFLKDNREKIEKILTFRIPYYVGPLARGNSRFAWMTRKSEETITPWNFEEVVDKGASAQSFIERMTNFDKNLPNEKVLPKHSLLYEYFTVYNELTKVKYVTEGMRKPAFLSGEQKKAIVDLLFKTNRKVTVKQLKEDYFKKIECFDSVEISGVEDRFNASLGTYHDLLKIIKDKDFLDNEENEDILEDIVLTLTLFEDREMIEERLKTYAHLFDDKVMKQLKRRRYTGWGRLSRKLINGIRDKQSGKTILDFLKSDGFANRNFMQLIHDDSLTFKEDIQKAQVSGQGDSLHEHIANLAGSPAIKKGILQTVKVVDELVKVMGRHKPENIVIEMARENQTTQKGQKNSRERMKRIEEGIKELGSQILKEHPVENTQLQNEKLYLYYLQNGRDMYVDQELDINRLSDYDVDHIVPQSFLKDDSIDNKVLTRSDKARGKSDNVPSEEVVKKMKNYWRQLLNAKLITQRKFDNLTKAERGGLSELDKAGFIKRQLVETRQITKHVAQILDSRMNTKYDENDKLIREVKVITLKSKLVSDFRKDFQFYKVREINNYHHAHDAYLNAVVGTALIKKYPKLESEFVYGDYKVYDVRKMIAKSEQEIGKATAKYFFYSNIMNFFKTEITLANGEIRKRPLIETNGETGEIVWDKGRDFATVRKVLSMPQVNIVKKTEVQTGGFSKESILPKRNSDKLIARKKDWDPKKYGGFDSPTVAYSVLVVAKVEKGKSKKLKSVKELLGITIMERSSFEKNPIDFLEAKGYKEVKKDLIIKLPKYSLFELENGRKRMLASAGELQKGNELALPSKYVNFLYLASHYEKLKGSPEDNEQKQLFVEQHKHYLDEIIEQISEFSKRVILADANLDKVLSAYNKHRDKPIREQAENIIHLFTLTNLGAPAAFKYFDTTIDRKRYTSTKEVLDATLIHQSITGLYETRIDLSQLGGDGGGGGGSGGGGSGGGGSGGLDDEYRLYSPLVKPDQNIQFWLEQFPQAWAETAGMGLAKQVPPQVIQLKASATPVSVRQYPLSKEAQEGIRPHVQRLIQQGILVPVQSPWNTPLLPVRKPGTNDYRPVQDLREVNKRVQDIHPTVPNPYNLLCALPPQRSWYTVLDLKDAFFCLRLHPTSQPLFAFEWRDPGTGRTGQLTWTRLPQGFKNSPTIFNEALHRDLANFRIQHPQVTLLQYVDDLLLAGATKQDCLEGTKALLLELSDLGYRASAKKAQICRREVTYLGYSLRDGQRWLTEARKKTVVQIPAPTTAKQVREFLGKAGFCRLFIPGFATLAAPLYPLTKPKGEFSWAPEHQKAFDAIKKALLSAPALALPDVTKPFTLYVDERKGVARGVLTQTLGPWRRPVAYLSKKLDPVASGWPVCLKAIAAVAILVKDADKLTLGQNITVIAPHALENIVRQPPDRWMTNARMTHYQSLLLTERVTFAPPAALNPATLLPEETDEPVTHDCHQLLIEETGVRKDLTDIPLTGEVLTWFTDGSSYVVEGKRMAGAAVVDGTRTIWASSLPEGTSAQKAELMALTQALRLAEGKSINIYTDSRYAFATAHVHGAIYKQRGWLTSAGREIKNKEEILSLLEALHLPKRLAIIHCPGHQKAKDPISRGNQMADRVAKQAAQGVNLLPAGKRTADGSEFEKRTADGSEFESPKKKAKVE

SEQ ID NO: 52 - protein, 2092 aa, synthetic construct
MPAAKRVKLDGGDKKYSIGLDIGTNSVGWAVITDEYKVPSKKFKVLGNTDRHSIKKNLIGALLFDSGETAEATRLKRTARRRYTRRKNRICYLQEIFSNEMAKVDDSFFHRLEESFLVEEDKKHERHPIFGNIVDEVAYHEKYPTIYHLRKKLVDSTDKADLRLIYLALAHMIKFRGHFLIEGDLNPDNSDVDKLFIQLVQTYNQLFEENPINASGVDAKAILSARLSKSRRLENLIAQLPGEKKNGLFGNLIALSLGLTPNFKSNFDLAEDAKLQLSKDTYDDDLDNLLAQIGDQYADLFLAAKNLSDAILLSDILRVNTEITKAPLSASMIKRYDEHHQDLTLLKALVRQQLPEKYKEIFFDQSKNGYAGYIDGGASQEEFYKFIKPILEKMDGTEELLVKLNREDLLRKQRTFDNGSIPHQIHLGELHAILRRQEDFYPFLKDNREKIEKILTFRIPYYVGPLARGNSRFAWMTRKSEETITPWNFEEVVDKGASAQSFIERMTNFDKNLPNEKVLPKHSLLYEYFTVYNELTKVKYVTEGMRKPAFLSGEQKKAIVDLLFKTNRKVTVKQLKEDYFKKIECFDSVEISGVEDRFNASLGTYHDLLKIIKDKDFLDNEENEDILEDIVLTLTLFEDREMIEERLKTYAHLFDDKVMKQLKRRRYTGWGRLSRKLINGIRDKQSGKTILDFLKSDGFANRNFMQLIHDDSLTFKEDIQKAQVSGQGDSLHEHIANLAGSPAIKKGILQTVKVVDELVKVMGRHKPENIVIEMARENQTTQKGQKNSRERMKRIEEGIKELGSQILKEHPVENTQLQNEKLYLYYLQNGRDMYVDQELDINRLSDYDVDHIVPQSFLKDDSIDNKVLTRSDKARGKSDNVPSEEVVKKMKNYWRQLLNAKLITQRKFDNLTKAERGGLSELDKAGFIKRQLVETRQITKHVAQILDSRMNTKYDENDKLIREVKVITLKSKLVSDFRKDFQFYKVREINNYHHAHDAYLNAVVGTALIKKYPKLESEFVYGDYKVYDVRKMIAKSEQEIGKATAKYFFYSNIMNFFKTEITLANGEIRKRPLIETNGETGEIVWDKGRDFATVRKVLSMPQVNIVKKTEVQTGGFSKESILPKRNSDKLIARKKDWDPKKYGGFDSPTVAYSVLVVAKVEKGKSKKLKSVKELLGITIMERSSFEKNPIDFLEAKGYKEVKKDLIIKLPKYSLFELENGRKRMLASAGELQKGNELALPSKYVNFLYLASHYEKLKGSPEDNEQKQLFVEQHKHYLDEIIEQISEFSKRVILADANLDKVLSAYNKHRDKPIREQAENIIHLFTLTNLGAPAAFKYFDTTIDRKRYTSTKEVLDATLIHQSITGLYETRIDLSQLGGDGGGGSGGSGGSGGSGGSGGLDDEYRLYSPLVKPDQNIQFWLEQFPQAWAETAGMGLAKQVPPQVIQLKASATPVSVRQYPLSKEAQEGIRPHVQRLIQQGILVPVQSPWNTPLLPVRKPGTNDYRPVQDLREVNKRVQDIHPTVPNPYNLLCALPPQRSWYTVLDLKDAFFCLRLHPTSQPLFAFEWRDPGTGRTGQLTWTRLPQGFKNSPTIFNEALHRDLANFRIQHPQVTLLQYVDDLLLAGATKQDCLEGTKALLLELSDLGYRASAKKAQICRREVTYLGYSLRDGQRWLTEARKKTVVQIPAPTTAKQVREFLGKAGFCRLFIPGFATLAAPLYPLTKPKGEFSWAPEHQKAFDAIKKALLSAPALALPDVTKPFTLYVDERKGVARGVLTQTLGPWRRPVAYLSKKLDPVASGWPVCLKAIAAVAILVKDADKLTLGQNITVIAPHALENIVRQPPDRWMTNARMTHYQSLLLTERVTFAPPAALNPATLLPEETDEPVTHDCHQLLIEETGVRKDLTDIPLTGEVLTWFTDGSSYVVEGKRMAGAAVVDGTRTIWASSLPEGTSAQKAELMALTQALRLAEGKSINIYTDSRYAFATAHVHGAIYKQRGWLTSAGREIKNKEEILSLLEALHLPKRLAIIHCPGHQKAKDPISRGNQMADRVAKQAAQGVNLLPAGKRTADGSEFEKRTADGSEFESPKKKAKVE

SEQ ID NO: 53 - protein, 2088 aa, synthetic construct
MPAAKRVKLDGGDKKYSIGLDIGTNSVGWAVITDEYKVPSKKFKVLGNTDRHSIKKNLIGALLFDSGETAEATRLKRTARRRYTRRKNRICYLQEIFSNEMAKVDDSFFHRLEESFLVEEDKKHERHPIFGNIVDEVAYHEKYPTIYHLRKKLVDSTDKADLRLIYLALAHMIKFRGHFLIEGDLNPDNSDVDKLFIQLVQTYNQLFEENPINASGVDAKAILSARLSKSRRLENLIAQLPGEKKNGLFGNLIALSLGLTPNFKSNFDLAEDAKLQLSKDTYDDDLDNLLAQIGDQYADLFLAAKNLSDAILLSDILRVNTEITKAPLSASMIKRYDEHHQDLTLLKALVRQQLPEKYKEIFFDQSKNGYAGYIDGGASQEEFYKFIKPILEKMDGTEELLVKLNREDLLRKQRTFDNGSIPHQIHLGELHAILRRQEDFYPFLKDNREKIEKILTFRIPYYVGPLARGNSRFAWMTRKSEETITPWNFEEVVDKGASAQSFIERMTNFDKNLPNEKVLPKHSLLYEYFTVYNELTKVKYVTEGMRKPAFLSGEQKKAIVDLLFKTNRKVTVKQLKEDYFKKIECFDSVEISGVEDRFNASLGTYHDLLKIIKDKDFLDNEENEDILEDIVLTLTLFEDREMIEERLKTYAHLFDDKVMKQLKRRRYTGWGRLSRKLINGIRDKQSGKTILDFLKSDGFANRNFMQLIHDDSLTFKEDIQKAQVSGQGDSLHEHIANLAGSPAIKKGILQTVKVVDELVKVMGRHKPENIVIEMARENQTTQKGQKNSRERMKRIEEGIKELGSQILKEHPVENTQLQNEKLYLYYLQNGRDMYVDQELDINRLSDYDVDHIVPQSFLKDDSIDNKVLTRSDKARGKSDNVPSEEVVKKMKNYWRQLLNAKLITQRKFDNLTKAERGGLSELDKAGFIKRQLVETRQITKHVAQILDSRMNTKYDENDKLIREVKVITLKSKLVSDFRKDFQFYKVREINNYHHAHDAYLNAVVGTALIKKYPKLESEFVYGDYKVYDVRKMIAKSEQEIGKATAKYFFYSNIMNFFKTEITLANGEIRKRPLIETNGETGEIVWDKGRDFATVRKVLSMPQVNIVKKTEVQTGGFSKESILPKRNSDKLIARKKDWDPKKYGGFDSPTVAYSVLVVAKVEKGKSKKLKSVKELLGITIMERSSFEKNPIDFLEAKGYKEVKKDLIIKLPKYSLFELENGRKRMLASAGELQKGNELALPSKYVNFLYLASHYEKLKGSPEDNEQKQLFVEQHKHYLDEIIEQISEFSKRVILADANLDKVLSAYNKHRDKPIREQAENIIHLFTLTNLGAPAAFKYFDTTIDRKRYTSTKEVLDATLIHQSITGLYETRIDLSQLGGDGGEAAAKGGGGSSGGLDDEYRLYSPLVKPDQNIQFWLEQFPQAWAETAGMGLAKQVPPQVIQLKASATPVSVRQYPLSKEAQEGIRPHVQRLIQQGILVPVQSPWNTPLLPVRKPGTNDYRPVQDLREVNKRVQDIHPTVPNPYNLLCALPPQRSWYTVLDLKDAFFCLRLHPTSQPLFAFEWRDPGTGRTGQLTWTRLPQGFKNSPTIFNEALHRDLANFRIQHPQVTLLQYVDDLLLAGATKQDCLEGTKALLLELSDLGYRASAKKAQICRREVTYLGYSLRDGQRWLTEARKKTVVQIPAPTTAKQVREFLGKAGFCRLFIPGFATLAAPLYPLTKPKGEFSWAPEHQKAFDAIKKALLSAPALALPDVTKPFTLYVDERKGVARGVLTQTLGPWRRPVAYLSKKLDPVASGWPVCLKAIAAVAILVKDADKLTLGQNITVIAPHALENIVRQPPDRWMTNARMTHYQSLLLTERVTFAPPAALNPATLLPEETDEPVTHDCHQLLIEETGVRKDLTDIPLTGEVLTWFTDGSSYVVEGKRMAGAAVVDGTRTIWASSLPEGTSAQKAELMALTQALRLAEGKSINIYTDSRYAFATAHVHGAIYKQRGWLTSAGREIKNKEEILSLLEALHLPKRLAIIHCPGHQKAKDPISRGNQMADRVAKQAAQGVNLLPAGKRTADGSEFEKRTADGSEFESPKKKAKVE

SEQ ID NO: 54 - protein, 2090 aa, synthetic construct
MPAAKRVKLDGGDKKYSIGLDIGTNSVGWAVITDEYKVPSKKFKVLGNTDRHSIKKNLIGALLFDSGETAEATRLKRTARRRYTRRKNRICYLQEIFSNEMAKVDDSFFHRLEESFLVEEDKKHERHPIFGNIVDEVAYHEKYPTIYHLRKKLVDSTDKADLRLIYLALAHMIKFRGHFLIEGDLNPDNSDVDKLFIQLVQTYNQLFEENPINASGVDAKAILSARLSKSRRLENLIAQLPGEKKNGLFGNLIALSLGLTPNFKSNFDLAEDAKLQLSKDTYDDDLDNLLAQIGDQYADLFLAAKNLSDAILLSDILRVNTEITKAPLSASMIKRYDEHHQDLTLLKALVRQQLPEKYKEIFFDQSKNGYAGYIDGGASQEEFYKFIKPILEKMDGTEELLVKLNREDLLRKQRTFDNGSIPHQIHLGELHAILRRQEDFYPFLKDNREKIEKILTFRIPYYVGPLARGNSRFAWMTRKSEETITPWNFEEVVDKGASAQSFIERMTNFDKNLPNEKVLPKHSLLYEYFTVYNELTKVKYVTEGMRKPAFLSGEQKKAIVDLLFKTNRKVTVKQLKEDYFKKIECFDSVEISGVEDRFNASLGTYHDLLKIIKDKDFLDNEENEDILEDIVLTLTLFEDREMIEERLKTYAHLFDDKVMKQLKRRRYTGWGRLSRKLINGIRDKQSGKTILDFLKSDGFANRNFMQLIHDDSLTFKEDIQKAQVSGQGDSLHEHIANLAGSPAIKKGILQTVKVVDELVKVMGRHKPENIVIEMARENQTTQKGQKNSRERMKRIEEGIKELGSQILKEHPVENTQLQNEKLYLYYLQNGRDMYVDQELDINRLSDYDVDHIVPQSFLKDDSIDNKVLTRSDKARGKSDNVPSEEVVKKMKNYWRQLLNAKLITQRKFDNLTKAERGGLSELDKAGFIKRQLVETRQITKHVAQILDSRMNTKYDENDKLIREVKVITLKSKLVSDFRKDFQFYKVREINNYHHAHDAYLNAVVGTALIKKYPKLESEFVYGDYKVYDVRKMIAKSEQEIGKATAKYFFYSNIMNFFKTEITLANGEIRKRPLIETNGETGEIVWDKGRDFATVRKVLSMPQVNIVKKTEVQTGGFSKESILPKRNSDKLIARKKDWDPKKYGGFDSPTVAYSVLVVAKVEKGKSKKLKSVKELLGITIMERSSFEKNPIDFLEAKGYKEVKKDLIIKLPKYSLFELENGRKRMLASAGELQKGNELALPSKYVNFLYLASHYEKLKGSPEDNEQKQLFVEQHKHYLDEIIEQISEFSKRVILADANLDKVLSAYNKHRDKPIREQAENIIHLFTLTNLGAPAAFKYFDTTIDRKRYTSTKEVLDATLIHQSITGLYETRIDLSQLGGDGGPAPAPAPAPAPAPGGLDDEYRLYSPLVKPDQNIQFWLEQFPQAWAETAGMGLAKQVPPQVIQLKASATPVSVRQYPLSKEAQEGIRPHVQRLIQQGILVPVQSPWNTPLLPVRKPGTNDYRPVQDLREVNKRVQDIHPTVPNPYNLLCALPPQRSWYTVLDLKDAFFCLRLHPTSQPLFAFEWRDPGTGRTGQLTWTRLPQGFKNSPTIFNEALHRDLANFRIQHPQVTLLQYVDDLLLAGATKQDCLEGTKALLLELSDLGYRASAKKAQICRREVTYLGYSLRDGQRWLTEARKKTVVQIPAPTTAKQVREFLGKAGFCRLFIPGFATLAAPLYPLTKPKGEFSWAPEHQKAFDAIKKALLSAPALALPDVTKPFTLYVDERKGVARGVLTQTLGPWRRPVAYLSKKLDPVASGWPVCLKAIAAVAILVKDADKLTLGQNITVIAPHALENIVRQPPDRWMTNARMTHYQSLLLTERVTFAPPAALNPATLLPEETDEPVTHDCHQLLIEETGVRKDLTDIPLTGEVLTWFTDGSSYVVEGKRMAGAAVVDGTRTIWASSLPEGTSAQKAELMALTQALRLAEGKSINIYTDSRYAFATAHVHGAIYKQRGWLTSAGREIKNKEEILSLLEALHLPKRLAIIHCPGHQKAKDPISRGNQMADRVAKQAAQGVNLLPAGKRTADGSEFEKRTADGSEFESPKKKAKVE

SEQ ID NO: 55 - protein, 2087 aa, synthetic construct
MPAAKRVKLDGGDKKYSIGLDIGTNSVGWAVITDEYKVPSKKFKVLGNTDRHSIKKNLIGALLFDSGETAEATRLKRTARRRYTRRKNRICYLQEIFSNEMAKVDDSFFHRLEESFLVEEDKKHERHPIFGNIVDEVAYHEKYPTIYHLRKKLVDSTDKADLRLIYLALAHMIKFRGHFLIEGDLNPDNSDVDKLFIQLVQTYNQLFEENPINASGVDAKAILSARLSKSRRLENLIAQLPGEKKNGLFGNLIALSLGLTPNFKSNFDLAEDAKLQLSKDTYDDDLDNLLAQIGDQYADLFLAAKNLSDAILLSDILRVNTEITKAPLSASMIKRYDEHHQDLTLLKALVRQQLPEKYKEIFFDQSKNGYAGYIDGGASQEEFYKFIKPILEKMDGTEELLVKLNREDLLRKQRTFDNGSIPHQIHLGELHAILRRQEDFYPFLKDNREKIEKILTFRIPYYVGPLARGNSRFAWMTRKSEETITPWNFEEVVDKGASAQSFIERMTNFDKNLPNEKVLPKHSLLYEYFTVYNELTKVKYVTEGMRKPAFLSGEQKKAIVDLLFKTNRKVTVKQLKEDYFKKIECFDSVEISGVEDRFNASLGTYHDLLKIIKDKDFLDNEENEDILEDIVLTLTLFEDREMIEERLKTYAHLFDDKVMKQLKRRRYTGWGRLSRKLINGIRDKQSGKTILDFLKSDGFANRNFMQLIHDDSLTFKEDIQKAQVSGQGDSLHEHIANLAGSPAIKKGILQTVKVVDELVKVMGRHKPENIVIEMARENQTTQKGQKNSRERMKRIEEGIKELGSQILKEHPVENTQLQNEKLYLYYLQNGRDMYVDQELDINRLSDYDVDHIVPQSFLKDDSIDNKVLTRSDKARGKSDNVPSEEVVKKMKNYWRQLLNAKLITQRKFDNLTKAERGGLSELDKAGFIKRQLVETRQITKHVAQILDSRMNTKYDENDKLIREVKVITLKSKLVSDFRKDFQFYKVREINNYHHAHDAYLNAVVGTALIKKYPKLESEFVYGDYKVYDVRKMIAKSEQEIGKATAKYFFYSNIMNFFKTEITLANGEIRKRPLIETNGETGEIVWDKGRDFATVRKVLSMPQVNIVKKTEVQTGGFSKESILPKRNSDKLIARKKDWDPKKYGGFDSPTVAYSVLVVAKVEKGKSKKLKSVKELLGITIMERSSFEKNPIDFLEAKGYKEVKKDLIIKLPKYSLFELENGRKRMLASAGELQKGNELALPSKYVNFLYLASHYEKLKGSPEDNEQKQLFVEQHKHYLDEIIEQISEFSKRVILADANLDKVLSAYNKHRDKPIREQAENIIHLFTLTNLGAPAAFKYFDTTIDRKRYTSTKEVLDATLIHQSITGLYETRIDLSQLGGDGGGGGGSGGGGSGGLDDEYRLYSPLVKPDQNIQFWLEQFPQAWAETAGMGLAKQVPPQVIQLKASATPVSVRQYPLSKEAQEGIRPHVQRLIQQGILVPVQSPWNTPLLPVRKPGTNDYRPVQDLREVNKRVQDIHPTVPNPYNLLCALPPQRSWYTVLDLKDAFFCLRLHPTSQPLFAFEWRDPGTGRTGQLTWTRLPQGFKNSPTIFNEALHRDLANFRIQHPQVTLLQYVDDLLLAGATKQDCLEGTKALLLELSDLGYRASAKKAQICRREVTYLGYSLRDGQRWLTEARKKTVVQIPAPTTAKQVREFLGKAGFCRLFIPGFATLAAPLYPLTKPKGEFSWAPEHQKAFDAIKKALLSAPALALPDVTKPFTLYVDERKGVARGVLTQTLGPWRRPVAYLSKKLDPVASGWPVCLKAIAAVAILVKDADKLTLGQNITVIAPHALENIVRQPPDRWMTNARMTHYQSLLLTERVTFAPPAALNPATLLPEETDEPVTHDCHQLLIEETGVRKDLTDIPLTGEVLTWFTDGSSYVVEGKRMAGAAVVDGTRTIWASSLPEGTSAQKAELMALTQALRLAEGKSINIYTDSRYAFATAHVHGAIYKQRGWLTSAGREIKNKEEILSLLEALHLPKRLAIIHCPGHQKAKDPISRGNQMADRVAKQAAQGVNLLPAGKRTADGSEFEKRTADGSEFESPKKKAKVE

SEQ ID NO: 56 - protein, 2092 aa, synthetic construct
MPAAKRVKLDGGDKKYSIGLDIGTNSVGWAVITDEYKVPSKKFKVLGNTDRHSIKKNLIGALLFDSGETAEATRLKRTARRRYTRRKNRICYLQEIFSNEMAKVDDSFFHRLEESFLVEEDKKHERHPIFGNIVDEVAYHEKYPTIYHLRKKLVDSTDKADLRLIYLALAHMIKFRGHFLIEGDLNPDNSDVDKLFIQLVQTYNQLFEENPINASGVDAKAILSARLSKSRRLENLIAQLPGEKKNGLFGNLIALSLGLTPNFKSNFDLAEDAKLQLSKDTYDDDLDNLLAQIGDQYADLFLAAKNLSDAILLSDILRVNTEITKAPLSASMIKRYDEHHQDLTLLKALVRQQLPEKYKEIFFDQSKNGYAGYIDGGASQEEFYKFIKPILEKMDGTEELLVKLNREDLLRKQRTFDNGSIPHQIHLGELHAILRRQEDFYPFLKDNREKIEKILTFRIPYYVGPLARGNSRFAWMTRKSEETITPWNFEEVVDKGASAQSFIERMTNFDKNLPNEKVLPKHSLLYEYFTVYNELTKVKYVTEGMRKPAFLSGEQKKAIVDLLFKTNRKVTVKQLKEDYFKKIECFDSVEISGVEDRFNASLGTYHDLLKIIKDKDFLDNEENEDILEDIVLTLTLFEDREMIEERLKTYAHLFDDKVMKQLKRRRYTGWGRLSRKLINGIRDKQSGKTILDFLKSDGFANRNFMQLIHDDSLTFKEDIQKAQVSGQGDSLHEHIANLAGSPAIKKGILQTVKVVDELVKVMGRHKPENIVIEMARENQTTQKGQKNSRERMKRIEEGIKELGSQILKEHPVENTQLQNEKLYLYYLQNGRDMYVDQELDINRLSDYDVDHIVPQSFLKDDSIDNKVLTRSDKARGKSDNVPSEEVVKKMKNYWRQLLNAKLITQRKFDNLTKAERGGLSELDKAGFIKRQLVETRQITKHVAQILDSRMNTKYDENDKLIREVKVITLKSKLVSDFRKDFQFYKVREINNYHHAHDAYLNAVVGTALIKKYPKLESEFVYGDYKVYDVRKMIAKSEQEIGKATAKYFFYSNIMNFFKTEITLANGEIRKRPLIETNGETGEIVWDKGRDFATVRKVLSMPQVNIVKKTEVQTGGFSKESILPKRNSDKLIARKKDWDPKKYGGFDSPTVAYSVLVVAKVEKGKSKKLKSVKELLGITIMERSSFEKNPIDFLEAKGYKEVKKDLIIKLPKYSLFELENGRKRMLASAGELQKGNELALPSKYVNFLYLASHYEKLKGSPEDNEQKQLFVEQHKHYLDEIIEQISEFSKRVILADANLDKVLSAYNKHRDKPIREQAENIIHLFTLTNLGAPAAFKYFDTTIDRKRYTSTKEVLDATLIHQSITGLYETRIDLSQLGGDGGEAAAKGGGGSEAAAKGGLDDEYRLYSPLVKPDQNIQFWLEQFPQAWAETAGMGLAKQVPPQVIQLKASATPVSVRQYPLSKEAQEGIRPHVQRLIQQGILVPVQSPWNTPLLPVRKPGTNDYRPVQDLREVNKRVQDIHPTVPNPYNLLCALPPQRSWYTVLDLKDAFFCLRLHPTSQPLFAFEWRDPGTGRTGQLTWTRLPQGFKNSPTIFNEALHRDLANFRIQHPQVTLLQYVDDLLLAGATKQDCLEGTKALLLELSDLGYRASAKKAQICRREVTYLGYSLRDGQRWLTEARKKTVVQIPAPTTAKQVREFLGKAGFCRLFIPGFATLAAPLYPLTKPKGEFSWAPEHQKAFDAIKKALLSAPALALPDVTKPFTLYVDERKGVARGVLTQTLGPWRRPVAYLSKKLDPVASGWPVCLKAIAAVAILVKDADKLTLGQNITVIAPHALENIVRQPPDRWMTNARMTHYQSLLLTERVTFAPPAALNPATLLPEETDEPVTHDCHQLLIEETGVRKDLTDIPLTGEVLTWFTDGSSYVVEGKRMAGAAVVDGTRTIWASSLPEGTSAQKAELMALTQALRLAEGKSINIYTDSRYAFATAHVHGAIYKQRGWLTSAGREIKNKEEILSLLEALHLPKRLAIIHCPGHQKAKDPISRGNQMADRVAKQAAQGVNLLPAGKRTADGSEFEKRTADGSEFESPKKKAKVE

SEQ ID NO: 57 - protein, 2085 aa, synthetic construct
MPAAKRVKLDGGDKKYSIGLDIGTNSVGWAVITDEYKVPSKKFKVLGNTDRHSIKKNLIGALLFDSGETAEATRLKRTARRRYTRRKNRICYLQEIFSNEMAKVDDSFFHRLEESFLVEEDKKHERHPIFGNIVDEVAYHEKYPTIYHLRKKLVDSTDKADLRLIYLALAHMIKFRGHFLIEGDLNPDNSDVDKLFIQLVQTYNQLFEENPINASGVDAKAILSARLSKSRRLENLIAQLPGEKKNGLFGNLIALSLGLTPNFKSNFDLAEDAKLQLSKDTYDDDLDNLLAQIGDQYADLFLAAKNLSDAILLSDILRVNTEITKAPLSASMIKRYDEHHQDLTLLKALVRQQLPEKYKEIFFDQSKNGYAGYIDGGASQEEFYKFIKPILEKMDGTEELLVKLNREDLLRKQRTFDNGSIPHQIHLGELHAILRRQEDFYPFLKDNREKIEKILTFRIPYYVGPLARGNSRFAWMTRKSEETITPWNFEEVVDKGASAQSFIERMTNFDKNLPNEKVLPKHSLLYEYFTVYNELTKVKYVTEGMRKPAFLSGEQKKAIVDLLFKTNRKVTVKQLKEDYFKKIECFDSVEISGVEDRFNASLGTYHDLLKIIKDKDFLDNEENEDILEDIVLTLTLFEDREMIEERLKTYAHLFDDKVMKQLKRRRYTGWGRLSRKLINGIRDKQSGKTILDFLKSDGFANRNFMQLIHDDSLTFKEDIQKAQVSGQGDSLHEHIANLAGSPAIKKGILQTVKVVDELVKVMGRHKPENIVIEMARENQTTQKGQKNSRERMKRIEEGIKELGSQILKEHPVENTQLQNEKLYLYYLQNGRDMYVDQELDINRLSDYDVDHIVPQSFLKDDSIDNKVLTRSDKARGKSDNVPSEEVVKKMKNYWRQLLNAKLITQRKFDNLTKAERGGLSELDKAGFIKRQLVETRQITKHVAQILDSRMNTKYDENDKLIREVKVITLKSKLVSDFRKDFQFYKVREINNYHHAHDAYLNAVVGTALIKKYPKLESEFVYGDYKVYDVRKMIAKSEQEIGKATAKYFFYSNIMNFFKTEITLANGEIRKRPLIETNGETGEIVWDKGRDFATVRKVLSMPQVNIVKKTEVQTGGFSKESILPKRNSDKLIARKKDWDPKKYGGFDSPTVAYSVLVVAKVEKGKSKKLKSVKELLGITIMERSSFEKNPIDFLEAKGYKEVKKDLIIKLPKYSLFELENGRKRMLASAGELQKGNELALPSKYVNFLYLASHYEKLKGSPEDNEQKQLFVEQHKHYLDEIIEQISEFSKRVILADANLDKVLSAYNKHRDKPIREQAENIIHLFTLTNLGAPAAFKYFDTTIDRKRYTSTKEVLDATLIHQSITGLYETRIDLSQLGGDGGGGGGGGGGGGLDDEYRLYSPLVKPDQNIQFWLEQFPQAWAETAGMGLAKQVPPQVIQLKASATPVSVRQYPLSKEAQEGIRPHVQRLIQQGILVPVQSPWNTPLLPVRKPGTNDYRPVQDLREVNKRVQDIHPTVPNPYNLLCALPPQRSWYTVLDLKDAFFCLRLHPTSQPLFAFEWRDPGTGRTGQLTWTRLPQGFKNSPTIFNEALHRDLANFRIQHPQVTLLQYVDDLLLAGATKQDCLEGTKALLLELSDLGYRASAKKAQICRREVTYLGYSLRDGQRWLTEARKKTVVQIPAPTTAKQVREFLGKAGFCRLFIPGFATLAAPLYPLTKPKGEFSWAPEHQKAFDAIKKALLSAPALALPDVTKPFTLYVDERKGVARGVLTQTLGPWRRPVAYLSKKLDPVASGWPVCLKAIAAVAILVKDADKLTLGQNITVIAPHALENIVRQPPDRWMTNARMTHYQSLLLTERVTFAPPAALNPATLLPEETDEPVTHDCHQLLIEETGVRKDLTDIPLTGEVLTWFTDGSSYVVEGKRMAGAAVVDGTRTIWASSLPEGTSAQKAELMALTQALRLAEGKSINIYTDSRYAFATAHVHGAIYKQRGWLTSAGREIKNKEEILSLLEALHLPKRLAIIHCPGHQKAKDPISRGNQMADRVAKQAAQGVNLLPAGKRTADGSEFEKRTADGSEFESPKKKAKVE

SEQ ID NO: 58 - protein, 2086 aa, synthetic construct
MPAAKRVKLDGGDKKYSIGLDIGTNSVGWAVITDEYKVPSKKFKVLGNTDRHSIKKNLIGALLFDSGETAEATRLKRTARRRYTRRKNRICYLQEIFSNEMAKVDDSFFHRLEESFLVEEDKKHERHPIFGNIVDEVAYHEKYPTIYHLRKKLVDSTDKADLRLIYLALAHMIKFRGHFLIEGDLNPDNSDVDKLFIQLVQTYNQLFEENPINASGVDAKAILSARLSKSRRLENLIAQLPGEKKNGLFGNLIALSLGLTPNFKSNFDLAEDAKLQLSKDTYDDDLDNLLAQIGDQYADLFLAAKNLSDAILLSDILRVNTEITKAPLSASMIKRYDEHHQDLTLLKALVRQQLPEKYKEIFFDQSKNGYAGYIDGGASQEEFYKFIKPILEKMDGTEELLVKLNREDLLRKQRTFDNGSIPHQIHLGELHAILRRQEDFYPFLKDNREKIEKILTFRIPYYVGPLARGNSRFAWMTRKSEETITPWNFEEVVDKGASAQSFIERMTNFDKNLPNEKVLPKHSLLYEYFTVYNELTKVKYVTEGMRKPAFLSGEQKKAIVDLLFKTNRKVTVKQLKEDYFKKIECFDSVEISGVEDRFNASLGTYHDLLKIIKDKDFLDNEENEDILEDIVLTLTLFEDREMIEERLKTYAHLFDDKVMKQLKRRRYTGWGRLSRKLINGIRDKQSGKTILDFLKSDGFANRNFMQLIHDDSLTFKEDIQKAQVSGQGDSLHEHIANLAGSPAIKKGILQTVKVVDELVKVMGRHKPENIVIEMARENQTTQKGQKNSRERMKRIEEGIKELGSQILKEHPVENTQLQNEKLYLYYLQNGRDMYVDQELDINRLSDYDVDHIVPQSFLKDDSIDNKVLTRSDKARGKSDNVPSEEVVKKMKNYWRQLLNAKLITQRKFDNLTKAERGGLSELDKAGFIKRQLVETRQITKHVAQILDSRMNTKYDENDKLIREVKVITLKSKLVSDFRKDFQFYKVREINNYHHAHDAYLNAVVGTALIKKYPKLESEFVYGDYKVYDVRKMIAKSEQEIGKATAKYFFYSNIMNFFKTEITLANGEIRKRPLIETNGETGEIVWDKGRDFATVRKVLSMPQVNIVKKTEVQTGGFSKESILPKRNSDKLIARKKDWDPKKYGGFDSPTVAYSVLVVAKVEKGKSKKLKSVKELLGITIMERSSFEKNPIDFLEAKGYKEVKKDLIIKLPKYSLFELENGRKRMLASAGELQKGNELALPSKYVNFLYLASHYEKLKGSPEDNEQKQLFVEQHKHYLDEIIEQISEFSKRVILADANLDKVLSAYNKHRDKPIREQAENIIHLFTLTNLGAPAAFKYFDTTIDRKRYTSTKEVLDATLIHQSITGLYETRIDLSQLGGDGGGGSPAPGGGGGLDDEYRLYSPLVKPDQNIQFWLEQFPQAWAETAGMGLAKQVPPQVIQLKASATPVSVRQYPLSKEAQEGIRPHVQRLIQQGILVPVQSPWNTPLLPVRKPGTNDYRPVQDLREVNKRVQDIHPTVPNPYNLLCALPPQRSWYTVLDLKDAFFCLRLHPTSQPLFAFEWRDPGTGRTGQLTWTRLPQGFKNSPTIFNEALHRDLANFRIQHPQVTLLQYVDDLLLAGATKQDCLEGTKALLLELSDLGYRASAKKAQICRREVTYLGYSLRDGQRWLTEARKKTVVQIPAPTTAKQVREFLGKAGFCRLFIPGFATLAAPLYPLTKPKGEFSWAPEHQKAFDAIKKALLSAPALALPDVTKPFTLYVDERKGVARGVLTQTLGPWRRPVAYLSKKLDPVASGWPVCLKAIAAVAILVKDADKLTLGQNITVIAPHALENIVRQPPDRWMTNARMTHYQSLLLTERVTFAPPAALNPATLLPEETDEPVTHDCHQLLIEETGVRKDLTDIPLTGEVLTWFTDGSSYVVEGKRMAGAAVVDGTRTIWASSLPEGTSAQKAELMALTQALRLAEGKSINIYTDSRYAFATAHVHGAIYKQRGWLTSAGREIKNKEEILSLLEALHLPKRLAIIHCPGHQKAKDPISRGNQMADRVAKQAAQGVNLLPAGKRTADGSEFEKRTADGSEFESPKKKAKVE

SEQ ID NO: 59 - protein, 2083 aa, synthetic construct
MPAAKRVKLDGGDKKYSIGLDIGTNSVGWAVITDEYKVPSKKFKVLGNTDRHSIKKNLIGALLFDSGETAEATRLKRTARRRYTRRKNRICYLQEIFSNEMAKVDDSFFHRLEESFLVEEDKKHERHPIFGNIVDEVAYHEKYPTIYHLRKKLVDSTDKADLRLIYLALAHMIKFRGHFLIEGDLNPDNSDVDKLFIQLVQTYNQLFEENPINASGVDAKAILSARLSKSRRLENLIAQLPGEKKNGLFGNLIALSLGLTPNFKSNFDLAEDAKLQLSKDTYDDDLDNLLAQIGDQYADLFLAAKNLSDAILLSDILRVNTEITKAPLSASMIKRYDEHHQDLTLLKALVRQQLPEKYKEIFFDQSKNGYAGYIDGGASQEEFYKFIKPILEKMDGTEELLVKLNREDLLRKQRTFDNGSIPHQIHLGELHAILRRQEDFYPFLKDNREKIEKILTFRIPYYVGPLARGNSRFAWMTRKSEETITPWNFEEVVDKGASAQSFIERMTNFDKNLPNEKVLPKHSLLYEYFTVYNELTKVKYVTEGMRKPAFLSGEQKKAIVDLLFKTNRKVTVKQLKEDYFKKIECFDSVEISGVEDRFNASLGTYHDLLKIIKDKDFLDNEENEDILEDIVLTLTLFEDREMIEERLKTYAHLFDDKVMKQLKRRRYTGWGRLSRKLINGIRDKQSGKTILDFLKSDGFANRNFMQLIHDDSLTFKEDIQKAQVSGQGDSLHEHIANLAGSPAIKKGILQTVKVVDELVKVMGRHKPENIVIEMARENQTTQKGQKNSRERMKRIEEGIKELGSQILKEHPVENTQLQNEKLYLYYLQNGRDMYVDQELDINRLSDYDVDHIVPQSFLKDDSIDNKVLTRSDKARGKSDNVPSEEVVKKMKNYWRQLLNAKLITQRKFDNLTKAERGGLSELDKAGFIKRQLVETRQITKHVAQILDSRMNTKYDENDKLIREVKVITLKSKLVSDFRKDFQFYKVREINNYHHAHDAYLNAVVGTALIKKYPKLESEFVYGDYKVYDVRKMIAKSEQEIGKATAKYFFYSNIMNFFKTEITLANGEIRKRPLIETNGETGEIVWDKGRDFATVRKVLSMPQVNIVKKTEVQTGGFSKESILPKRNSDKLIARKKDWDPKKYGGFDSPTVAYSVLVVAKVEKGKSKKLKSVKELLGITIMERSSFEKNPIDFLEAKGYKEVKKDLIIKLPKYSLFELENGRKRMLASAGELQKGNELALPSKYVNFLYLASHYEKLKGSPEDNEQKQLFVEQHKHYLDEIIEQISEFSKRVILADANLDKVLSAYNKHRDKPIREQAENIIHLFTLTNLGAPAAFKYFDTTIDRKRYTSTKEVLDATLIHQSITGLYETRIDLSQLGGDGGGGGGGGGGLDDEYRLYSPLVKPDQNIQFWLEQFPQAWAETAGMGLAKQVPPQVIQLKASATPVSVRQYPLSKEAQEGIRPHVQRLIQQGILVPVQSPWNTPLLPVRKPGTNDYRPVQDLREVNKRVQDIHPTVPNPYNLLCALPPQRSWYTVLDLKDAFFCLRLHPTSQPLFAFEWRDPGTGRTGQLTWTRLPQGFKNSPTIFNEALHRDLANFRIQHPQVTLLQYVDDLLLAGATKQDCLEGTKALLLELSDLGYRASAKKAQICRREVTYLGYSLRDGQRWLTEARKKTVVQIPAPTTAKQVREFLGKAGFCRLFIPGFATLAAPLYPLTKPKGEFSWAPEHQKAFDAIKKALLSAPALALPDVTKPFTLYVDERKGVARGVLTQTLGPWRRPVAYLSKKLDPVASGWPVCLKAIAAVAILVKDADKLTLGQNITVIAPHALENIVRQPPDRWMTNARMTHYQSLLLTERVTFAPPAALNPATLLPEETDEPVTHDCHQLLIEETGVRKDLTDIPLTGEVLTWFTDGSSYVVEGKRMAGAAVVDGTRTIWASSLPEGTSAQKAELMALTQALRLAEGKSINIYTDSRYAFATAHVHGAIYKQRGWLTSAGREIKNKEEILSLLEALHLPKRLAIIHCPGHQKAKDPISRGNQMADRVAKQAAQGVNLLPAGKRTADGSEFEKRTADGSEFESPKKKAKVE

SEQ ID NO: 60 - protein, 2086 aa, synthetic construct
MPAAKRVKLDGGDKKYSIGLDIGTNSVGWAVITDEYKVPSKKFKVLGNTDRHSIKKNLIGALLFDSGETAEATRLKRTARRRYTRRKNRICYLQEIFSNEMAKVDDSFFHRLEESFLVEEDKKHERHPIFGNIVDEVAYHEKYPTIYHLRKKLVDSTDKADLRLIYLALAHMIKFRGHFLIEGDLNPDNSDVDKLFIQLVQTYNQLFEENPINASGVDAKAILSARLSKSRRLENLIAQLPGEKKNGLFGNLIALSLGLTPNFKSNFDLAEDAKLQLSKDTYDDDLDNLLAQIGDQYADLFLAAKNLSDAILLSDILRVNTEITKAPLSASMIKRYDEHHQDLTLLKALVRQQLPEKYKEIFFDQSKNGYAGYIDGGASQEEFYKFIKPILEKMDGTEELLVKLNREDLLRKQRTFDNGSIPHQIHLGELHAILRRQEDFYPFLKDNREKIEKILTFRIPYYVGPLARGNSRFAWMTRKSEETITPWNFEEVVDKGASAQSFIERMTNFDKNLPNEKVLPKHSLLYEYFTVYNELTKVKYVTEGMRKPAFLSGEQKKAIVDLLFKTNRKVTVKQLKEDYFKKIECFDSVEISGVEDRFNASLGTYHDLLKIIKDKDFLDNEENEDILEDIVLTLTLFEDREMIEERLKTYAHLFDDKVMKQLKRRRYTGWGRLSRKLINGIRDKQSGKTILDFLKSDGFANRNFMQLIHDDSLTFKEDIQKAQVSGQGDSLHEHIANLAGSPAIKKGILQTVKVVDELVKVMGRHKPENIVIEMARENQTTQKGQKNSRERMKRIEEGIKELGSQILKEHPVENTQLQNEKLYLYYLQNGRDMYVDQELDINRLSDYDVDHIVPQSFLKDDSIDNKVLTRSDKARGKSDNVPSEEVVKKMKNYWRQLLNAKLITQRKFDNLTKAERGGLSELDKAGFIKRQLVETRQITKHVAQILDSRMNTKYDENDKLIREVKVITLKSKLVSDFRKDFQFYKVREINNYHHAHDAYLNAVVGTALIKKYPKLESEFVYGDYKVYDVRKMIAKSEQEIGKATAKYFFYSNIMNFFKTEITLANGEIRKRPLIETNGETGEIVWDKGRDFATVRKVLSMPQVNIVKKTEVQTGGFSKESILPKRNSDKLIARKKDWDPKKYGGFDSPTVAYSVLVVAKVEKGKSKKLKSVKELLGITIMERSSFEKNPIDFLEAKGYKEVKKDLIIKLPKYSLFELENGRKRMLASAGELQKGNELALPSKYVNFLYLASHYEKLKGSPEDNEQKQLFVEQHKHYLDEIIEQISEFSKRVILADANLDKVLSAYNKHRDKPIREQAENIIHLFTLTNLGAPAAFKYFDTTIDRKRYTSTKEVLDATLIHQSITGLYETRIDLSQLGGDGGPAPGGSGSSGGLDDEYRLYSPLVKPDQNIQFWLEQFPQAWAETAGMGLAKQVPPQVIQLKASATPVSVRQYPLSKEAQEGIRPHVQRLIQQGILVPVQSPWNTPLLPVRKPGTNDYRPVQDLREVNKRVQDIHPTVPNPYNLLCALPPQRSWYTVLDLKDAFFCLRLHPTSQPLFAFEWRDPGTGRTGQLTWTRLPQGFKNSPTIFNEALHRDLANFRIQHPQVTLLQYVDDLLLAGATKQDCLEGTKALLLELSDLGYRASAKKAQICRREVTYLGYSLRDGQRWLTEARKKTVVQIPAPTTAKQVREFLGKAGFCRLFIPGFATLAAPLYPLTKPKGEFSWAPEHQKAFDAIKKALLSAPALALPDVTKPFTLYVDERKGVARGVLTQTLGPWRRPVAYLSKKLDPVASGWPVCLKAIAAVAILVKDADKLTLGQNITVIAPHALENIVRQPPDRWMTNARMTHYQSLLLTERVTFAPPAALNPATLLPEETDEPVTHDCHQLLIEETGVRKDLTDIPLTGEVLTWFTDGSSYVVEGKRMAGAAVVDGTRTIWASSLPEGTSAQKAELMALTQALRLAEGKSINIYTDSRYAFATAHVHGAIYKQRGWLTSAGREIKNKEEILSLLEALHLPKRLAIIHCPGHQKAKDPISRGNQMADRVAKQAAQGVNLLPAGKRTADGSEFEKRTADGSEFESPKKKAKVE

SEQ ID NO: 61 - protein, 2083 aa, synthetic construct
MPAAKRVKLDGGDKKYSIGLDIGTNSVGWAVITDEYKVPSKKFKVLGNTDRHSIKKNLIGALLFDSGETAEATRLKRTARRRYTRRKNRICYLQEIFSNEMAKVDDSFFHRLEESFLVEEDKKHERHPIFGNIVDEVAYHEKYPTIYHLRKKLVDSTDKADLRLIYLALAHMIKFRGHFLIEGDLNPDNSDVDKLFIQLVQTYNQLFEENPINASGVDAKAILSARLSKSRRLENLIAQLPGEKKNGLFGNLIALSLGLTPNFKSNFDLAEDAKLQLSKDTYDDDLDNLLAQIGDQYADLFLAAKNLSDAILLSDILRVNTEITKAPLSASMIKRYDEHHQDLTLLKALVRQQLPEKYKEIFFDQSKNGYAGYIDGGASQEEFYKFIKPILEKMDGTEELLVKLNREDLLRKQRTFDNGSIPHQIHLGELHAILRRQEDFYPFLKDNREKIEKILTFRIPYYVGPLARGNSRFAWMTRKSEETITPWNFEEVVDKGASAQSFIERMTNFDKNLPNEKVLPKHSLLYEYFTVYNELTKVKYVTEGMRKPAFLSGEQKKAIVDLLFKTNRKVTVKQLKEDYFKKIECFDSVEISGVEDRFNASLGTYHDLLKIIKDKDFLDNEENEDILEDIVLTLTLFEDREMIEERLKTYAHLFDDKVMKQLKRRRYTGWGRLSRKLINGIRDKQSGKTILDFLKSDGFANRNFMQLIHDDSLTFKEDIQKAQVSGQGDSLHEHIANLAGSPAIKKGILQTVKVVDELVKVMGRHKPENIVIEMARENQTTQKGQKNSRERMKRIEEGIKELGSQILKEHPVENTQLQNEKLYLYYLQNGRDMYVDQELDINRLSDYDVDHIVPQSFLKDDSIDNKVLTRSDKARGKSDNVPSEEVVKKMKNYWRQLLNAKLITQRKFDNLTKAERGGLSELDKAGFIKRQLVETRQITKHVAQILDSRMNTKYDENDKLIREVKVITLKSKLVSDFRKDFQFYKVREINNYHHAHDAYLNAVVGTALIKKYPKLESEFVYGDYKVYDVRKMIAKSEQEIGKATAKYFFYSNIMNFFKTEITLANGEIRKRPLIETNGETGEIVWDKGRDFATVRKVLSMPQVNIVKKTEVQTGGFSKESILPKRNSDKLIARKKDWDPKKYGGFDSPTVAYSVLVVAKVEKGKSKKLKSVKELLGITIMERSSFEKNPIDFLEAKGYKEVKKDLIIKLPKYSLFELENGRKRMLASAGELQKGNELALPSKYVNFLYLASHYEKLKGSPEDNEQKQLFVEQHKHYLDEIIEQISEFSKRVILADANLDKVLSAYNKHRDKPIREQAENIIHLFTLTNLGAPAAFKYFDTTIDRKRYTSTKEVLDATLIHQSITGLYETRIDLSQLGGDGGPAPGSSGGLDDEYRLYSPLVKPDQNIQFWLEQFPQAWAETAGMGLAKQVPPQVIQLKASATPVSVRQYPLSKEAQEGIRPHVQRLIQQGILVPVQSPWNTPLLPVRKPGTNDYRPVQDLREVNKRVQDIHPTVPNPYNLLCALPPQRSWYTVLDLKDAFFCLRLHPTSQPLFAFEWRDPGTGRTGQLTWTRLPQGFKNSPTIFNEALHRDLANFRIQHPQVTLLQYVDDLLLAGATKQDCLEGTKALLLELSDLGYRASAKKAQICRREVTYLGYSLRDGQRWLTEARKKTVVQIPAPTTAKQVREFLGKAGFCRLFIPGFATLAAPLYPLTKPKGEFSWAPEHQKAFDAIKKALLSAPALALPDVTKPFTLYVDERKGVARGVLTQTLGPWRRPVAYLSKKLDPVASGWPVCLKAIAAVAILVKDADKLTLGQNITVIAPHALENIVRQPPDRWMTNARMTHYQSLLLTERVTFAPPAALNPATLLPEETDEPVTHDCHQLLIEETGVRKDLTDIPLTGEVLTWFTDGSSYVVEGKRMAGAAVVDGTRTIWASSLPEGTSAQKAELMALTQALRLAEGKSINIYTDSRYAFATAHVHGAIYKQRGWLTSAGREIKNKEEILSLLEALHLPKRLAIIHCPGHQKAKDPISRGNQMADRVAKQAAQGVNLLPAGKRTADGSEFEKRTADGSEFESPKKKAKVE

SEQ ID NO: 62 - protein, 2088 aa, synthetic construct
MPAAKRVKLDGGDKKYSIGLDIGTNSVGWAVITDEYKVPSKKFKVLGNTDRHSIKKNLIGALLFDSGETAEATRLKRTARRRYTRRKNRICYLQEIFSNEMAKVDDSFFHRLEESFLVEEDKKHERHPIFGNIVDEVAYHEKYPTIYHLRKKLVDSTDKADLRLIYLALAHMIKFRGHFLIEGDLNPDNSDVDKLFIQLVQTYNQLFEENPINASGVDAKAILSARLSKSRRLENLIAQLPGEKKNGLFGNLIALSLGLTPNFKSNFDLAEDAKLQLSKDTYDDDLDNLLAQIGDQYADLFLAAKNLSDAILLSDILRVNTEITKAPLSASMIKRYDEHHQDLTLLKALVRQQLPEKYKEIFFDQSKNGYAGYIDGGASQEEFYKFIKPILEKMDGTEELLVKLNREDLLRKQRTFDNGSIPHQIHLGELHAILRRQEDFYPFLKDNREKIEKILTFRIPYYVGPLARGNSRFAWMTRKSEETITPWNFEEVVDKGASAQSFIERMTNFDKNLPNEKVLPKHSLLYEYFTVYNELTKVKYVTEGMRKPAFLSGEQKKAIVDLLFKTNRKVTVKQLKEDYFKKIECFDSVEISGVEDRFNASLGTYHDLLKIIKDKDFLDNEENEDILEDIVLTLTLFEDREMIEERLKTYAHLFDDKVMKQLKRRRYTGWGRLSRKLINGIRDKQSGKTILDFLKSDGFANRNFMQLIHDDSLTFKEDIQKAQVSGQGDSLHEHIANLAGSPAIKKGILQTVKVVDELVKVMGRHKPENIVIEMARENQTTQKGQKNSRERMKRIEEGIKELGSQILKEHPVENTQLQNEKLYLYYLQNGRDMYVDQELDINRLSDYDVDHIVPQSFLKDDSIDNKVLTRSDKARGKSDNVPSEEVVKKMKNYWRQLLNAKLITQRKFDNLTKAERGGLSELDKAGFIKRQLVETRQITKHVAQILDSRMNTKYDENDKLIREVKVITLKSKLVSDFRKDFQFYKVREINNYHHAHDAYLNAVVGTALIKKYPKLESEFVYGDYKVYDVRKMIAKSEQEIGKATAKYFFYSNIMNFFKTEITLANGEIRKRPLIETNGETGEIVWDKGRDFATVRKVLSMPQVNIVKKTEVQTGGFSKESILPKRNSDKLIARKKDWDPKKYGGFDSPTVAYSVLVVAKVEKGKSKKLKSVKELLGITIMERSSFEKNPIDFLEAKGYKEVKKDLIIKLPKYSLFELENGRKRMLASAGELQKGNELALPSKYVNFLYLASHYEKLKGSPEDNEQKQLFVEQHKHYLDEIIEQISEFSKRVILADANLDKVLSAYNKHRDKPIREQAENIIHLFTLTNLGAPAAFKYFDTTIDRKRYTSTKEVLDATLIHQSITGLYETRIDLSQLGGDGGPAPAPAPAPAPGGLDDEYRLYSPLVKPDQNIQFWLEQFPQAWAETAGMGLAKQVPPQVIQLKASATPVSVRQYPLSKEAQEGIRPHVQRLIQQGILVPVQSPWNTPLLPVRKPGTNDYRPVQDLREVNKRVQDIHPTVPNPYNLLCALPPQRSWYTVLDLKDAFFCLRLHPTSQPLFAFEWRDPGTGRTGQLTWTRLPQGFKNSPTIFNEALHRDLANFRIQHPQVTLLQYVDDLLLAGATKQDCLEGTKALLLELSDLGYRASAKKAQICRREVTYLGYSLRDGQRWLTEARKKTVVQIPAPTTAKQVREFLGKAGFCRLFIPGFATLAAPLYPLTKPKGEFSWAPEHQKAFDAIKKALLSAPALALPDVTKPFTLYVDERKGVARGVLTQTLGPWRRPVAYLSKKLDPVASGWPVCLKAIAAVAILVKDADKLTLGQNITVIAPHALENIVRQPPDRWMTNARMTHYQSLLLTERVTFAPPAALNPATLLPEETDEPVTHDCHQLLIEETGVRKDLTDIPLTGEVLTWFTDGSSYVVEGKRMAGAAVVDGTRTIWASSLPEGTSAQKAELMALTQALRLAEGKSINIYTDSRYAFATAHVHGAIYKQRGWLTSAGREIKNKEEILSLLEALHLPKRLAIIHCPGHQKAKDPISRGNQMADRVAKQAAQGVNLLPAGKRTADGSEFEKRTADGSEFESPKKKAKVE

SEQ ID NO: 63 - protein, 2088 aa, synthetic construct
MPAAKRVKLDGGDKKYSIGLDIGTNSVGWAVITDEYKVPSKKFKVLGNTDRHSIKKNLIGALLFDSGETAEATRLKRTARRRYTRRKNRICYLQEIFSNEMAKVDDSFFHRLEESFLVEEDKKHERHPIFGNIVDEVAYHEKYPTIYHLRKKLVDSTDKADLRLIYLALAHMIKFRGHFLIEGDLNPDNSDVDKLFIQLVQTYNQLFEENPINASGVDAKAILSARLSKSRRLENLIAQLPGEKKNGLFGNLIALSLGLTPNFKSNFDLAEDAKLQLSKDTYDDDLDNLLAQIGDQYADLFLAAKNLSDAILLSDILRVNTEITKAPLSASMIKRYDEHHQDLTLLKALVRQQLPEKYKEIFFDQSKNGYAGYIDGGASQEEFYKFIKPILEKMDGTEELLVKLNREDLLRKQRTFDNGSIPHQIHLGELHAILRRQEDFYPFLKDNREKIEKILTFRIPYYVGPLARGNSRFAWMTRKSEETITPWNFEEVVDKGASAQSFIERMTNFDKNLPNEKVLPKHSLLYEYFTVYNELTKVKYVTEGMRKPAFLSGEQKKAIVDLLFKTNRKVTVKQLKEDYFKKIECFDSVEISGVEDRFNASLGTYHDLLKIIKDKDFLDNEENEDILEDIVLTLTLFEDREMIEERLKTYAHLFDDKVMKQLKRRRYTGWGRLSRKLINGIRDKQSGKTILDFLKSDGFANRNFMQLIHDDSLTFKEDIQKAQVSGQGDSLHEHIANLAGSPAIKKGILQTVKVVDELVKVMGRHKPENIVIEMARENQTTQKGQKNSRERMKRIEEGIKELGSQILKEHPVENTQLQNEKLYLYYLQNGRDMYVDQELDINRLSDYDVDHIVPQSFLKDDSIDNKVLTRSDKARGKSDNVPSEEVVKKMKNYWRQLLNAKLITQRKFDNLTKAERGGLSELDKAGFIKRQLVETRQITKHVAQILDSRMNTKYDENDKLIREVKVITLKSKLVSDFRKDFQFYKVREINNYHHAHDAYLNAVVGTALIKKYPKLESEFVYGDYKVYDVRKMIAKSEQEIGKATAKYFFYSNIMNFFKTEITLANGEIRKRPLIETNGETGEIVWDKGRDFATVRKVLSMPQVNIVKKTEVQTGGFSKESILPKRNSDKLIARKKDWDPKKYGGFDSPTVAYSVLVVAKVEKGKSKKLKSVKELLGITIMERSSFEKNPIDFLEAKGYKEVKKDLIIKLPKYSLFELENGRKRMLASAGELQKGNELALPSKYVNFLYLASHYEKLKGSPEDNEQKQLFVEQHKHYLDEIIEQISEFSKRVILADANLDKVLSAYNKHRDKPIREQAENIIHLFTLTNLGAPAAFKYFDTTIDRKRYTSTKEVLDATLIHQSITGLYETRIDLSQLGGDGGGGGEAAAKPAPGGLDDEYRLYSPLVKPDQNIQFWLEQFPQAWAETAGMGLAKQVPPQVIQLKASATPVSVRQYPLSKEAQEGIRPHVQRLIQQGILVPVQSPWNTPLLPVRKPGTNDYRPVQDLREVNKRVQDIHPTVPNPYNLLCALPPQRSWYTVLDLKDAFFCLRLHPTSQPLFAFEWRDPGTGRTGQLTWTRLPQGFKNSPTIFNEALHRDLANFRIQHPQVTLLQYVDDLLLAGATKQDCLEGTKALLLELSDLGYRASAKKAQICRREVTYLGYSLRDGQRWLTEARKKTVVQIPAPTTAKQVREFLGKAGFCRLFIPGFATLAAPLYPLTKPKGEFSWAPEHQKAFDAIKKALLSAPALALPDVTKPFTLYVDERKGVARGVLTQTLGPWRRPVAYLSKKLDPVASGWPVCLKAIAAVAILVKDADKLTLGQNITVIAPHALENIVRQPPDRWMTNARMTHYQSLLLTERVTFAPPAALNPATLLPEETDEPVTHDCHQLLIEETGVRKDLTDIPLTGEVLTWFTDGSSYVVEGKRMAGAAVVDGTRTIWASSLPEGTSAQKAELMALTQALRLAEGKSINIYTDSRYAFATAHVHGAIYKQRGWLTSAGREIKNKEEILSLLEALHLPKRLAIIHCPGHQKAKDPISRGNQMADRVAKQAAQGVNLLPAGKRTADGSEFEKRTADGSEFESPKKKAKVE

SEQ ID NO: 64 - protein, 2086 aa, synthetic construct
MPAAKRVKLDGGDKKYSIGLDIGTNSVGWAVITDEYKVPSKKFKVLGNTDRHSIKKNLIGALLFDSGETAEATRLKRTARRRYTRRKNRICYLQEIFSNEMAKVDDSFFHRLEESFLVEEDKKHERHPIFGNIVDEVAYHEKYPTIYHLRKKLVDSTDKADLRLIYLALAHMIKFRGHFLIEGDLNPDNSDVDKLFIQLVQTYNQLFEENPINASGVDAKAILSARLSKSRRLENLIAQLPGEKKNGLFGNLIALSLGLTPNFKSNFDLAEDAKLQLSKDTYDDDLDNLLAQIGDQYADLFLAAKNLSDAILLSDILRVNTEITKAPLSASMIKRYDEHHQDLTLLKALVRQQLPEKYKEIFFDQSKNGYAGYIDGGASQEEFYKFIKPILEKMDGTEELLVKLNREDLLRKQRTFDNGSIPHQIHLGELHAILRRQEDFYPFLKDNREKIEKILTFRIPYYVGPLARGNSRFAWMTRKSEETITPWNFEEVVDKGASAQSFIERMTNFDKNLPNEKVLPKHSLLYEYFTVYNELTKVKYVTEGMRKPAFLSGEQKKAIVDLLFKTNRKVTVKQLKEDYFKKIECFDSVEISGVEDRFNASLGTYHDLLKIIKDKDFLDNEENEDILEDIVLTLTLFEDREMIEERLKTYAHLFDDKVMKQLKRRRYTGWGRLSRKLINGIRDKQSGKTILDFLKSDGFANRNFMQLIHDDSLTFKEDIQKAQVSGQGDSLHEHIANLAGSPAIKKGILQTVKVVDELVKVMGRHKPENIVIEMARENQTTQKGQKNSRERMKRIEEGIKELGSQILKEHPVENTQLQNEKLYLYYLQNGRDMYVDQELDINRLSDYDVDHIVPQSFLKDDSIDNKVLTRSDKARGKSDNVPSEEVVKKMKNYWRQLLNAKLITQRKFDNLTKAERGGLSELDKAGFIKRQLVETRQITKHVAQILDSRMNTKYDENDKLIREVKVITLKSKLVSDFRKDFQFYKVREINNYHHAHDAYLNAVVGTALIKKYPKLESEFVYGDYKVYDVRKMIAKSEQEIGKATAKYFFYSNIMNFFKTEITLANGEIRKRPLIETNGETGEIVWDKGRDFATVRKVLSMPQVNIVKKTEVQTGGFSKESILPKRNSDKLIARKKDWDPKKYGGFDSPTVAYSVLVVAKVEKGKSKKLKSVKELLGITIMERSSFEKNPIDFLEAKGYKEVKKDLIIKLPKYSLFELENGRKRMLASAGELQKGNELALPSKYVNFLYLASHYEKLKGSPEDNEQKQLFVEQHKHYLDEIIEQISEFSKRVILADANLDKVLSAYNKHRDKPIREQAENIIHLFTLTNLGAPAAFKYFDTTIDRKRYTSTKEVLDATLIHQSITGLYETRIDLSQLGGDGGGSSGGSPAPGGLDDEYRLYSPLVKPDQNIQFWLEQFPQAWAETAGMGLAKQVPPQVIQLKASATPVSVRQYPLSKEAQEGIRPHVQRLIQQGILVPVQSPWNTPLLPVRKPGTNDYRPVQDLREVNKRVQDIHPTVPNPYNLLCALPPQRSWYTVLDLKDAFFCLRLHPTSQPLFAFEWRDPGTGRTGQLTWTRLPQGFKNSPTIFNEALHRDLANFRIQHPQVTLLQYVDDLLLAGATKQDCLEGTKALLLELSDLGYRASAKKAQICRREVTYLGYSLRDGQRWLTEARKKTVVQIPAPTTAKQVREFLGKAGFCRLFIPGFATLAAPLYPLTKPKGEFSWAPEHQKAFDAIKKALLSAPALALPDVTKPFTLYVDERKGVARGVLTQTLGPWRRPVAYLSKKLDPVASGWPVCLKAIAAVAILVKDADKLTLGQNITVIAPHALENIVRQPPDRWMTNARMTHYQSLLLTERVTFAPPAALNPATLLPEETDEPVTHDCHQLLIEETGVRKDLTDIPLTGEVLTWFTDGSSYVVEGKRMAGAAVVDGTRTIWASSLPEGTSAQKAELMALTQALRLAEGKSINIYTDSRYAFATAHVHGAIYKQRGWLTSAGREIKNKEEILSLLEALHLPKRLAIIHCPGHQKAKDPISRGNQMADRVAKQAAQGVNLLPAGKRTADGSEFEKRTADGSEFESPKKKAKVE

SEQ ID NO: 65 - protein, 2088 aa, synthetic construct
MPAAKRVKLDGGDKKYSIGLDIGTNSVGWAVITDEYKVPSKKFKVLGNTDRHSIKKNLIGALLFDSGETAEATRLKRTARRRYTRRKNRICYLQEIFSNEMAKVDDSFFHRLEESFLVEEDKKHERHPIFGNIVDEVAYHEKYPTIYHLRKKLVDSTDKADLRLIYLALAHMIKFRGHFLIEGDLNPDNSDVDKLFIQLVQTYNQLFEENPINASGVDAKAILSARLSKSRRLENLIAQLPGEKKNGLFGNLIALSLGLTPNFKSNFDLAEDAKLQLSKDTYDDDLDNLLAQIGDQYADLFLAAKNLSDAILLSDILRVNTEITKAPLSASMIKRYDEHHQDLTLLKALVRQQLPEKYKEIFFDQSKNGYAGYIDGGASQEEFYKFIKPILEKMDGTEELLVKLNREDLLRKQRTFDNGSIPHQIHLGELHAILRRQEDFYPFLKDNREKIEKILTFRIPYYVGPLARGNSRFAWMTRKSEETITPWNFEEVVDKGASAQSFIERMTNFDKNLPNEKVLPKHSLLYEYFTVYNELTKVKYVTEGMRKPAFLSGEQKKAIVDLLFKTNRKVTVKQLKEDYFKKIECFDSVEISGVEDRFNASLGTYHDLLKIIKDKDFLDNEENEDILEDIVLTLTLFEDREMIEERLKTYAHLFDDKVMKQLKRRRYTGWGRLSRKLINGIRDKQSGKTILDFLKSDGFANRNFMQLIHDDSLTFKEDIQKAQVSGQGDSLHEHIANLAGSPAIKKGILQTVKVVDELVKVMGRHKPENIVIEMARENQTTQKGQKNSRERMKRIEEGIKELGSQILKEHPVENTQLQNEKLYLYYLQNGRDMYVDQELDINRLSDYDVDHIVPQSFLKDDSIDNKVLTRSDKARGKSDNVPSEEVVKKMKNYWRQLLNAKLITQRKFDNLTKAERGGLSELDKAGFIKRQLVETRQITKHVAQILDSRMNTKYDENDKLIREVKVITLKSKLVSDFRKDFQFYKVREINNYHHAHDAYLNAVVGTALIKKYPKLESEFVYGDYKVYDVRKMIAKSEQEIGKATAKYFFYSNIMNFFKTEITLANGEIRKRPLIETNGETGEIVWDKGRDFATVRKVLSMPQVNIVKKTEVQTGGFSKESILPKRNSDKLIARKKDWDPKKYGGFDSPTVAYSVLVVAKVEKGKSKKLKSVKELLGITIMERSSFEKNPIDFLEAKGYKEVKKDLIIKLPKYSLFELENGRKRMLASAGELQKGNELALPSKYVNFLYLASHYEKLKGSPEDNEQKQLFVEQHKHYLDEIIEQISEFSKRVILADANLDKVLSAYNKHRDKPIREQAENIIHLFTLTNLGAPAAFKYFDTTIDRKRYTSTKEVLDATLIHQSITGLYETRIDLSQLGGDGGGGGEAAAKGGSGGLDDEYRLYSPLVKPDQNIQFWLEQFPQAWAETAGMGLAKQVPPQVIQLKASATPVSVRQYPLSKEAQEGIRPHVQRLIQQGILVPVQSPWNTPLLPVRKPGTNDYRPVQDLREVNKRVQDIHPTVPNPYNLLCALPPQRSWYTVLDLKDAFFCLRLHPTSQPLFAFEWRDPGTGRTGQLTWTRLPQGFKNSPTIFNEALHRDLANFRIQHPQVTLLQYVDDLLLAGATKQDCLEGTKALLLELSDLGYRASAKKAQICRREVTYLGYSLRDGQRWLTEARKKTVVQIPAPTTAKQVREFLGKAGFCRLFIPGFATLAAPLYPLTKPKGEFSWAPEHQKAFDAIKKALLSAPALALPDVTKPFTLYVDERKGVARGVLTQTLGPWRRPVAYLSKKLDPVASGWPVCLKAIAAVAILVKDADKLTLGQNITVIAPHALENIVRQPPDRWMTNARMTHYQSLLLTERVTFAPPAALNPATLLPEETDEPVTHDCHQLLIEETGVRKDLTDIPLTGEVLTWFTDGSSYVVEGKRMAGAAVVDGTRTIWASSLPEGTSAQKAELMALTQALRLAEGKSINIYTDSRYAFATAHVHGAIYKQRGWLTSAGREIKNKEEILSLLEALHLPKRLAIIHCPGHQKAKDPISRGNQMADRVAKQAAQGVNLLPAGKRTADGSEFEKRTADGSEFESPKKKAKVE

SEQ ID NO: 66 - protein, 2081 aa, synthetic construct
MPAAKRVKLDGGDKKYSIGLDIGTNSVGWAVITDEYKVPSKKFKVLGNTDRHSIKKNLIGALLFDSGETAEATRLKRTARRRYTRRKNRICYLQEIFSNEMAKVDDSFFHRLEESFLVEEDKKHERHPIFGNIVDEVAYHEKYPTIYHLRKKLVDSTDKADLRLIYLALAHMIKFRGHFLIEGDLNPDNSDVDKLFIQLVQTYNQLFEENPINASGVDAKAILSARLSKSRRLENLIAQLPGEKKNGLFGNLIALSLGLTPNFKSNFDLAEDAKLQLSKDTYDDDLDNLLAQIGDQYADLFLAAKNLSDAILLSDILRVNTEITKAPLSASMIKRYDEHHQDLTLLKALVRQQLPEKYKEIFFDQSKNGYAGYIDGGASQEEFYKFIKPILEKMDGTEELLVKLNREDLLRKQRTFDNGSIPHQIHLGELHAILRRQEDFYPFLKDNREKIEKILTFRIPYYVGPLARGNSRFAWMTRKSEETITPWNFEEVVDKGASAQSFIERMTNFDKNLPNEKVLPKHSLLYEYFTVYNELTKVKYVTEGMRKPAFLSGEQKKAIVDLLFKTNRKVTVKQLKEDYFKKIECFDSVEISGVEDRFNASLGTYHDLLKIIKDKDFLDNEENEDILEDIVLTLTLFEDREMIEERLKTYAHLFDDKVMKQLKRRRYTGWGRLSRKLINGIRDKQSGKTILDFLKSDGFANRNFMQLIHDDSLTFKEDIQKAQVSGQGDSLHEHIANLAGSPAIKKGILQTVKVVDELVKVMGRHKPENIVIEMARENQTTQKGQKNSRERMKRIEEGIKELGSQILKEHPVENTQLQNEKLYLYYLQNGRDMYVDQELDINRLSDYDVDHIVPQSFLKDDSIDNKVLTRSDKARGKSDNVPSEEVVKKMKNYWRQLLNAKLITQRKFDNLTKAERGGLSELDKAGFIKRQLVETRQITKHVAQILDSRMNTKYDENDKLIREVKVITLKSKLVSDFRKDFQFYKVREINNYHHAHDAYLNAVVGTALIKKYPKLESEFVYGDYKVYDVRKMIAKSEQEIGKATAKYFFYSNIMNFFKTEITLANGEIRKRPLIETNGETGEIVWDKGRDFATVRKVLSMPQVNIVKKTEVQTGGFSKESILPKRNSDKLIARKKDWDPKKYGGFDSPTVAYSVLVVAKVEKGKSKKLKSVKELLGITIMERSSFEKNPIDFLEAKGYKEVKKDLIIKLPKYSLFELENGRKRMLASAGELQKGNELALPSKYVNFLYLASHYEKLKGSPEDNEQKQLFVEQHKHYLDEIIEQISEFSKRVILADANLDKVLSAYNKHRDKPIREQAENIIHLFTLTNLGAPAAFKYFDTTIDRKRYTSTKEVLDATLIHQSITGLYETRIDLSQLGGDGGGGGGGGLDDEYRLYSPLVKPDQNIQFWLEQFPQAWAETAGMGLAKQVPPQVIQLKASATPVSVRQYPLSKEAQEGIRPHVQRLIQQGILVPVQSPWNTPLLPVRKPGTNDYRPVQDLREVNKRVQDIHPTVPNPYNLLCALPPQRSWYTVLDLKDAFFCLRLHPTSQPLFAFEWRDPGTGRTGQLTWTRLPQGFKNSPTIFNEALHRDLANFRIQHPQVTLLQYVDDLLLAGATKQDCLEGTKALLLELSDLGYRASAKKAQICRREVTYLGYSLRDGQRWLTEARKKTVVQIPAPTTAKQVREFLGKAGFCRLFIPGFATLAAPLYPLTKPKGEFSWAPEHQKAFDAIKKALLSAPALALPDVTKPFTLYVDERKGVARGVLTQTLGPWRRPVAYLSKKLDPVASGWPVCLKAIAAVAILVKDADKLTLGQNITVIAPHALENIVRQPPDRWMTNARMTHYQSLLLTERVTFAPPAALNPATLLPEETDEPVTHDCHQLLIEETGVRKDLTDIPLTGEVLTWFTDGSSYVVEGKRMAGAAVVDGTRTIWASSLPEGTSAQKAELMALTQALRLAEGKSINIYTDSRYAFATAHVHGAIYKQRGWLTSAGREIKNKEEILSLLEALHLPKRLAIIHCPGHQKAKDPISRGNQMADRVAKQAAQGVNLLPAGKRTADGSEFEKRTADGSEFESPKKKAKVE

SEQ ID NO: 67 - protein, 2089 aa, synthetic construct
MPAAKRVKLDGGDKKYSIGLDIGTNSVGWAVITDEYKVPSKKFKVLGNTDRHSIKKNLIGALLFDSGETAEATRLKRTARRRYTRRKNRICYLQEIFSNEMAKVDDSFFHRLEESFLVEEDKKHERHPIFGNIVDEVAYHEKYPTIYHLRKKLVDSTDKADLRLIYLALAHMIKFRGHFLIEGDLNPDNSDVDKLFIQLVQTYNQLFEENPINASGVDAKAILSARLSKSRRLENLIAQLPGEKKNGLFGNLIALSLGLTPNFKSNFDLAEDAKLQLSKDTYDDDLDNLLAQIGDQYADLFLAAKNLSDAILLSDILRVNTEITKAPLSASMIKRYDEHHQDLTLLKALVRQQLPEKYKEIFFDQSKNGYAGYIDGGASQEEFYKFIKPILEKMDGTEELLVKLNREDLLRKQRTFDNGSIPHQIHLGELHAILRRQEDFYPFLKDNREKIEKILTFRIPYYVGPLARGNSRFAWMTRKSEETITPWNFEEVVDKGASAQSFIERMTNFDKNLPNEKVLPKHSLLYEYFTVYNELTKVKYVTEGMRKPAFLSGEQKKAIVDLLFKTNRKVTVKQLKEDYFKKIECFDSVEISGVEDRFNASLGTYHDLLKIIKDKDFLDNEENEDILEDIVLTLTLFEDREMIEERLKTYAHLFDDKVMKQLKRRRYTGWGRLSRKLINGIRDKQSGKTILDFLKSDGFANRNFMQLIHDDSLTFKEDIQKAQVSGQGDSLHEHIANLAGSPAIKKGILQTVKVVDELVKVMGRHKPENIVIEMARENQTTQKGQKNSRERMKRIEEGIKELGSQILKEHPVENTQLQNEKLYLYYLQNGRDMYVDQELDINRLSDYDVDHIVPQSFLKDDSIDNKVLTRSDKARGKSDNVPSEEVVKKMKNYWRQLLNAKLITQRKFDNLTKAERGGLSELDKAGFIKRQLVETRQITKHVAQILDSRMNTKYDENDKLIREVKVITLKSKLVSDFRKDFQFYKVREINNYHHAHDAYLNAVVGTALIKKYPKLESEFVYGDYKVYDVRKMIAKSEQEIGKATAKYFFYSNIMNFFKTEITLANGEIRKRPLIETNGETGEIVWDKGRDFATVRKVLSMPQVNIVKKTEVQTGGFSKESILPKRNSDKLIARKKDWDPKKYGGFDSPTVAYSVLVVAKVEKGKSKKLKSVKELLGITIMERSSFEKNPIDFLEAKGYKEVKKDLIIKLPKYSLFELENGRKRMLASAGELQKGNELALPSKYVNFLYLASHYEKLKGSPEDNEQKQLFVEQHKHYLDEIIEQISEFSKRVILADANLDKVLSAYNKHRDKPIREQAENIIHLFTLTNLGAPAAFKYFDTTIDRKRYTSTKEVLDATLIHQSITGLYETRIDLSQLGGDGGGGSGGSGGSGGSGGLDDEYRLYSPLVKPDQNIQFWLEQFPQAWAETAGMGLAKQVPPQVIQLKASATPVSVRQYPLSKEAQEGIRPHVQRLIQQGILVPVQSPWNTPLLPVRKPGTNDYRPVQDLREVNKRVQDIHPTVPNPYNLLCALPPQRSWYTVLDLKDAFFCLRLHPTSQPLFAFEWRDPGTGRTGQLTWTRLPQGFKNSPTIFNEALHRDLANFRIQHPQVTLLQYVDDLLLAGATKQDCLEGTKALLLELSDLGYRASAKKAQICRREVTYLGYSLRDGQRWLTEARKKTVVQIPAPTTAKQVREFLGKAGFCRLFIPGFATLAAPLYPLTKPKGEFSWAPEHQKAFDAIKKALLSAPALALPDVTKPFTLYVDERKGVARGVLTQTLGPWRRPVAYLSKKLDPVASGWPVCLKAIAAVAILVKDADKLTLGQNITVIAPHALENIVRQPPDRWMTNARMTHYQSLLLTERVTFAPPAALNPATLLPEETDEPVTHDCHQLLIEETGVRKDLTDIPLTGEVLTWFTDGSSYVVEGKRMAGAAVVDGTRTIWASSLPEGTSAQKAELMALTQALRLAEGKSINIYTDSRYAFATAHVHGAIYKQRGWLTSAGREIKNKEEILSLLEALHLPKRLAIIHCPGHQKAKDPISRGNQMADRVAKQAAQGVNLLPAGKRTADGSEFEKRTADGSEFESPKKKAKVE

SEQ ID NO: 68 - protein, 2088 aa, synthetic construct
MPAAKRVKLDGGDKKYSIGLDIGTNSVGWAVITDEYKVPSKKFKVLGNTDRHSIKKNLIGALLFDSGETAEATRLKRTARRRYTRRKNRICYLQEIFSNEMAKVDDSFFHRLEESFLVEEDKKHERHPIFGNIVDEVAYHEKYPTIYHLRKKLVDSTDKADLRLIYLALAHMIKFRGHFLIEGDLNPDNSDVDKLFIQLVQTYNQLFEENPINASGVDAKAILSARLSKSRRLENLIAQLPGEKKNGLFGNLIALSLGLTPNFKSNFDLAEDAKLQLSKDTYDDDLDNLLAQIGDQYADLFLAAKNLSDAILLSDILRVNTEITKAPLSASMIKRYDEHHQDLTLLKALVRQQLPEKYKEIFFDQSKNGYAGYIDGGASQEEFYKFIKPILEKMDGTEELLVKLNREDLLRKQRTFDNGSIPHQIHLGELHAILRRQEDFYPFLKDNREKIEKILTFRIPYYVGPLARGNSRFAWMTRKSEETITPWNFEEVVDKGASAQSFIERMTNFDKNLPNEKVLPKHSLLYEYFTVYNELTKVKYVTEGMRKPAFLSGEQKKAIVDLLFKTNRKVTVKQLKEDYFKKIECFDSVEISGVEDRFNASLGTYHDLLKIIKDKDFLDNEENEDILEDIVLTLTLFEDREMIEERLKTYAHLFDDKVMKQLKRRRYTGWGRLSRKLINGIRDKQSGKTILDFLKSDGFANRNFMQLIHDDSLTFKEDIQKAQVSGQGDSLHEHIANLAGSPAIKKGILQTVKVVDELVKVMGRHKPENIVIEMARENQTTQKGQKNSRERMKRIEEGIKELGSQILKEHPVENTQLQNEKLYLYYLQNGRDMYVDQELDINRLSDYDVDHIVPQSFLKDDSIDNKVLTRSDKARGKSDNVPSEEVVKKMKNYWRQLLNAKLITQRKFDNLTKAERGGLSELDKAGFIKRQLVETRQITKHVAQILDSRMNTKYDENDKLIREVKVITLKSKLVSDFRKDFQFYKVREINNYHHAHDAYLNAVVGTALIKKYPKLESEFVYGDYKVYDVRKMIAKSEQEIGKATAKYFFYSNIMNFFKTEITLANGEIRKRPLIETNGETGEIVWDKGRDFATVRKVLSMPQVNIVKKTEVQTGGFSKESILPKRNSDKLIARKKDWDPKKYGGFDSPTVAYSVLVVAKVEKGKSKKLKSVKELLGITIMERSSFEKNPIDFLEAKGYKEVKKDLIIKLPKYSLFELENGRKRMLASAGELQKGNELALPSKYVNFLYLASHYEKLKGSPEDNEQKQLFVEQHKHYLDEIIEQISEFSKRVILADANLDKVLSAYNKHRDKPIREQAENIIHLFTLTNLGAPAAFKYFDTTIDRKRYTSTKEVLDATLIHQSITGLYETRIDLSQLGGDGGGGGGGSEAAAKGGLDDEYRLYSPLVKPDQNIQFWLEQFPQAWAETAGMGLAKQVPPQVIQLKASATPVSVRQYPLSKEAQEGIRPHVQRLIQQGILVPVQSPWNTPLLPVRKPGTNDYRPVQDLREVNKRVQDIHPTVPNPYNLLCALPPQRSWYTVLDLKDAFFCLRLHPTSQPLFAFEWRDPGTGRTGQLTWTRLPQGFKNSPTIFNEALHRDLANFRIQHPQVTLLQYVDDLLLAGATKQDCLEGTKALLLELSDLGYRASAKKAQICRREVTYLGYSLRDGQRWLTEARKKTVVQIPAPTTAKQVREFLGKAGFCRLFIPGFATLAAPLYPLTKPKGEFSWAPEHQKAFDAIKKALLSAPALALPDVTKPFTLYVDERKGVARGVLTQTLGPWRRPVAYLSKKLDPVASGWPVCLKAIAAVAILVKDADKLTLGQNITVIAPHALENIVRQPPDRWMTNARMTHYQSLLLTERVTFAPPAALNPATLLPEETDEPVTHDCHQLLIEETGVRKDLTDIPLTGEVLTWFTDGSSYVVEGKRMAGAAVVDGTRTIWASSLPEGTSAQKAELMALTQALRLAEGKSINIYTDSRYAFATAHVHGAIYKQRGWLTSAGREIKNKEEILSLLEALHLPKRLAIIHCPGHQKAKDPISRGNQMADRVAKQAAQGVNLLPAGKRTADGSEFEKRTADGSEFESPKKKAKVE

SEQ ID NO: 69 - protein, 2086 aa, synthetic construct
MPAAKRVKLDGGDKKYSIGLDIGTNSVGWAVITDEYKVPSKKFKVLGNTDRHSIKKNLIGALLFDSGETAEATRLKRTARRRYTRRKNRICYLQEIFSNEMAKVDDSFFHRLEESFLVEEDKKHERHPIFGNIVDEVAYHEKYPTIYHLRKKLVDSTDKADLRLIYLALAHMIKFRGHFLIEGDLNPDNSDVDKLFIQLVQTYNQLFEENPINASGVDAKAILSARLSKSRRLENLIAQLPGEKKNGLFGNLIALSLGLTPNFKSNFDLAEDAKLQLSKDTYDDDLDNLLAQIGDQYADLFLAAKNLSDAILLSDILRVNTEITKAPLSASMIKRYDEHHQDLTLLKALVRQQLPEKYKEIFFDQSKNGYAGYIDGGASQEEFYKFIKPILEKMDGTEELLVKLNREDLLRKQRTFDNGSIPHQIHLGELHAILRRQEDFYPFLKDNREKIEKILTFRIPYYVGPLARGNSRFAWMTRKSEETITPWNFEEVVDKGASAQSFIERMTNFDKNLPNEKVLPKHSLLYEYFTVYNELTKVKYVTEGMRKPAFLSGEQKKAIVDLLFKTNRKVTVKQLKEDYFKKIECFDSVEISGVEDRFNASLGTYHDLLKIIKDKDFLDNEENEDILEDIVLTLTLFEDREMIEERLKTYAHLFDDKVMKQLKRRRYTGWGRLSRKLINGIRDKQSGKTILDFLKSDGFANRNFMQLIHDDSLTFKEDIQKAQVSGQGDSLHEHIANLAGSPAIKKGILQTVKVVDELVKVMGRHKPENIVIEMARENQTTQKGQKNSRERMKRIEEGIKELGSQILKEHPVENTQLQNEKLYLYYLQNGRDMYVDQELDINRLSDYDVDHIVPQSFLKDDSIDNKVLTRSDKARGKSDNVPSEEVVKKMKNYWRQLLNAKLITQRKFDNLTKAERGGLSELDKAGFIKRQLVETRQITKHVAQILDSRMNTKYDENDKLIREVKVITLKSKLVSDFRKDFQFYKVREINNYHHAHDAYLNAVVGTALIKKYPKLESEFVYGDYKVYDVRKMIAKSEQEIGKATAKYFFYSNIMNFFKTEITLANGEIRKRPLIETNGETGEIVWDKGRDFATVRKVLSMPQVNIVKKTEVQTGGFSKESILPKRNSDKLIARKKDWDPKKYGGFDSPTVAYSVLVVAKVEKGKSKKLKSVKELLGITIMERSSFEKNPIDFLEAKGYKEVKKDLIIKLPKYSLFELENGRKRMLASAGELQKGNELALPSKYVNFLYLASHYEKLKGSPEDNEQKQLFVEQHKHYLDEIIEQISEFSKRVILADANLDKVLSAYNKHRDKPIREQAENIIHLFTLTNLGAPAAFKYFDTTIDRKRYTSTKEVLDATLIHQSITGLYETRIDLSQLGGDGGGSSPAPGGSGGLDDEYRLYSPLVKPDQNIQFWLEQFPQAWAETAGMGLAKQVPPQVIQLKASATPVSVRQYPLSKEAQEGIRPHVQRLIQQGILVPVQSPWNTPLLPVRKPGTNDYRPVQDLREVNKRVQDIHPTVPNPYNLLCALPPQRSWYTVLDLKDAFFCLRLHPTSQPLFAFEWRDPGTGRTGQLTWTRLPQGFKNSPTIFNEALHRDLANFRIQHPQVTLLQYVDDLLLAGATKQDCLEGTKALLLELSDLGYRASAKKAQICRREVTYLGYSLRDGQRWLTEARKKTVVQIPAPTTAKQVREFLGKAGFCRLFIPGFATLAAPLYPLTKPKGEFSWAPEHQKAFDAIKKALLSAPALALPDVTKPFTLYVDERKGVARGVLTQTLGPWRRPVAYLSKKLDPVASGWPVCLKAIAAVAILVKDADKLTLGQNITVIAPHALENIVRQPPDRWMTNARMTHYQSLLLTERVTFAPPAALNPATLLPEETDEPVTHDCHQLLIEETGVRKDLTDIPLTGEVLTWFTDGSSYVVEGKRMAGAAVVDGTRTIWASSLPEGTSAQKAELMALTQALRLAEGKSINIYTDSRYAFATAHVHGAIYKQRGWLTSAGREIKNKEEILSLLEALHLPKRLAIIHCPGHQKAKDPISRGNQMADRVAKQAAQGVNLLPAGKRTADGSEFEKRTADGSEFESPKKKAKVE

SEQ ID NO: 70 - protein, 2082 aa, synthetic construct
MPAAKRVKLDGGDKKYSIGLDIGTNSVGWAVITDEYKVPSKKFKVLGNTDRHSIKKNLIGALLFDSGETAEATRLKRTARRRYTRRKNRICYLQEIFSNEMAKVDDSFFHRLEESFLVEEDKKHERHPIFGNIVDEVAYHEKYPTIYHLRKKLVDSTDKADLRLIYLALAHMIKFRGHFLIEGDLNPDNSDVDKLFIQLVQTYNQLFEENPINASGVDAKAILSARLSKSRRLENLIAQLPGEKKNGLFGNLIALSLGLTPNFKSNFDLAEDAKLQLSKDTYDDDLDNLLAQIGDQYADLFLAAKNLSDAILLSDILRVNTEITKAPLSASMIKRYDEHHQDLTLLKALVRQQLPEKYKEIFFDQSKNGYAGYIDGGASQEEFYKFIKPILEKMDGTEELLVKLNREDLLRKQRTFDNGSIPHQIHLGELHAILRRQEDFYPFLKDNREKIEKILTFRIPYYVGPLARGNSRFAWMTRKSEETITPWNFEEVVDKGASAQSFIERMTNFDKNLPNEKVLPKHSLLYEYFTVYNELTKVKYVTEGMRKPAFLSGEQKKAIVDLLFKTNRKVTVKQLKEDYFKKIECFDSVEISGVEDRFNASLGTYHDLLKIIKDKDFLDNEENEDILEDIVLTLTLFEDREMIEERLKTYAHLFDDKVMKQLKRRRYTGWGRLSRKLINGIRDKQSGKTILDFLKSDGFANRNFMQLIHDDSLTFKEDIQKAQVSGQGDSLHEHIANLAGSPAIKKGILQTVKVVDELVKVMGRHKPENIVIEMARENQTTQKGQKNSRERMKRIEEGIKELGSQILKEHPVENTQLQNEKLYLYYLQNGRDMYVDQELDINRLSDYDVDHIVPQSFLKDDSIDNKVLTRSDKARGKSDNVPSEEVVKKMKNYWRQLLNAKLITQRKFDNLTKAERGGLSELDKAGFIKRQLVETRQITKHVAQILDSRMNTKYDENDKLIREVKVITLKSKLVSDFRKDFQFYKVREINNYHHAHDAYLNAVVGTALIKKYPKLESEFVYGDYKVYDVRKMIAKSEQEIGKATAKYFFYSNIMNFFKTEITLANGEIRKRPLIETNGETGEIVWDKGRDFATVRKVLSMPQVNIVKKTEVQTGGFSKESILPKRNSDKLIARKKDWDPKKYGGFDSPTVAYSVLVVAKVEKGKSKKLKSVKELLGITIMERSSFEKNPIDFLEAKGYKEVKKDLIIKLPKYSLFELENGRKRMLASAGELQKGNELALPSKYVNFLYLASHYEKLKGSPEDNEQKQLFVEQHKHYLDEIIEQISEFSKRVILADANLDKVLSAYNKHRDKPIREQAENIIHLFTLTNLGAPAAFKYFDTTIDRKRYTSTKEVLDATLIHQSITGLYETRIDLSQLGGDGGGGGGGGGLDDEYRLYSPLVKPDQNIQFWLEQFPQAWAETAGMGLAKQVPPQVIQLKASATPVSVRQYPLSKEAQEGIRPHVQRLIQQGILVPVQSPWNTPLLPVRKPGTNDYRPVQDLREVNKRVQDIHPTVPNPYNLLCALPPQRSWYTVLDLKDAFFCLRLHPTSQPLFAFEWRDPGTGRTGQLTWTRLPQGFKNSPTIFNEALHRDLANFRIQHPQVTLLQYVDDLLLAGATKQDCLEGTKALLLELSDLGYRASAKKAQICRREVTYLGYSLRDGQRWLTEARKKTVVQIPAPTTAKQVREFLGKAGFCRLFIPGFATLAAPLYPLTKPKGEFSWAPEHQKAFDAIKKALLSAPALALPDVTKPFTLYVDERKGVARGVLTQTLGPWRRPVAYLSKKLDPVASGWPVCLKAIAAVAILVKDADKLTLGQNITVIAPHALENIVRQPPDRWMTNARMTHYQSLLLTERVTFAPPAALNPATLLPEETDEPVTHDCHQLLIEETGVRKDLTDIPLTGEVLTWFTDGSSYVVEGKRMAGAAVVDGTRTIWASSLPEGTSAQKAELMALTQALRLAEGKSINIYTDSRYAFATAHVHGAIYKQRGWLTSAGREIKNKEEILSLLEALHLPKRLAIIHCPGHQKAKDPISRGNQMADRVAKQAAQGVNLLPAGKRTADGSEFEKRTADGSEFESPKKKAKVE

SEQ ID NO: 71 - protein, 2088 aa, synthetic construct
MPAAKRVKLDGGDKKYSIGLDIGTNSVGWAVITDEYKVPSKKFKVLGNTDRHSIKKNLIGALLFDSGETAEATRLKRTARRRYTRRKNRICYLQEIFSNEMAKVDDSFFHRLEESFLVEEDKKHERHPIFGNIVDEVAYHEKYPTIYHLRKKLVDSTDKADLRLIYLALAHMIKFRGHFLIEGDLNPDNSDVDKLFIQLVQTYNQLFEENPINASGVDAKAILSARLSKSRRLENLIAQLPGEKKNGLFGNLIALSLGLTPNFKSNFDLAEDAKLQLSKDTYDDDLDNLLAQIGDQYADLFLAAKNLSDAILLSDILRVNTEITKAPLSASMIKRYDEHHQDLTLLKALVRQQLPEKYKEIFFDQSKNGYAGYIDGGASQEEFYKFIKPILEKMDGTEELLVKLNREDLLRKQRTFDNGSIPHQIHLGELHAILRRQEDFYPFLKDNREKIEKILTFRIPYYVGPLARGNSRFAWMTRKSEETITPWNFEEVVDKGASAQSFIERMTNFDKNLPNEKVLPKHSLLYEYFTVYNELTKVKYVTEGMRKPAFLSGEQKKAIVDLLFKTNRKVTVKQLKEDYFKKIECFDSVEISGVEDRFNASLGTYHDLLKIIKDKDFLDNEENEDILEDIVLTLTLFEDREMIEERLKTYAHLFDDKVMKQLKRRRYTGWGRLSRKLINGIRDKQSGKTILDFLKSDGFANRNFMQLIHDDSLTFKEDIQKAQVSGQGDSLHEHIANLAGSPAIKKGILQTVKVVDELVKVMGRHKPENIVIEMARENQTTQKGQKNSRERMKRIEEGIKELGSQILKEHPVENTQLQNEKLYLYYLQNGRDMYVDQELDINRLSDYDVDHIVPQSFLKDDSIDNKVLTRSDKARGKSDNVPSEEVVKKMKNYWRQLLNAKLITQRKFDNLTKAERGGLSELDKAGFIKRQLVETRQITKHVAQILDSRMNTKYDENDKLIREVKVITLKSKLVSDFRKDFQFYKVREINNYHHAHDAYLNAVVGTALIKKYPKLESEFVYGDYKVYDVRKMIAKSEQEIGKATAKYFFYSNIMNFFKTEITLANGEIRKRPLIETNGETGEIVWDKGRDFATVRKVLSMPQVNIVKKTEVQTGGFSKESILPKRNSDKLIARKKDWDPKKYGGFDSPTVAYSVLVVAKVEKGKSKKLKSVKELLGITIMERSSFEKNPIDFLEAKGYKEVKKDLIIKLPKYSLFELENGRKRMLASAGELQKGNELALPSKYVNFLYLASHYEKLKGSPEDNEQKQLFVEQHKHYLDEIIEQISEFSKRVILADANLDKVLSAYNKHRDKPIREQAENIIHLFTLTNLGAPAAFKYFDTTIDRKRYTSTKEVLDATLIHQSITGLYETRIDLSQLGGDGGEAAAKGGSGSSGGLDDEYRLYSPLVKPDQNIQFWLEQFPQAWAETAGMGLAKQVPPQVIQLKASATPVSVRQYPLSKEAQEGIRPHVQRLIQQGILVPVQSPWNTPLLPVRKPGTNDYRPVQDLREVNKRVQDIHPTVPNPYNLLCALPPQRSWYTVLDLKDAFFCLRLHPTSQPLFAFEWRDPGTGRTGQLTWTRLPQGFKNSPTIFNEALHRDLANFRIQHPQVTLLQYVDDLLLAGATKQDCLEGTKALLLELSDLGYRASAKKAQICRREVTYLGYSLRDGQRWLTEARKKTVVQIPAPTTAKQVREFLGKAGFCRLFIPGFATLAAPLYPLTKPKGEFSWAPEHQKAFDAIKKALLSAPALALPDVTKPFTLYVDERKGVARGVLTQTLGPWRRPVAYLSKKLDPVASGWPVCLKAIAAVAILVKDADKLTLGQNITVIAPHALENIVRQPPDRWMTNARMTHYQSLLLTERVTFAPPAALNPATLLPEETDEPVTHDCHQLLIEETGVRKDLTDIPLTGEVLTWFTDGSSYVVEGKRMAGAAVVDGTRTIWASSLPEGTSAQKAELMALTQALRLAEGKSINIYTDSRYAFATAHVHGAIYKQRGWLTSAGREIKNKEEILSLLEALHLPKRLAIIHCPGHQKAKDPISRGNQMADRVAKQAAQGVNLLPAGKRTADGSEFEKRTADGSEFESPKKKAKVE

SEQ ID NO: 72 - protein, 2088 aa, synthetic construct
MPAAKRVKLDGGDKKYSIGLDIGTNSVGWAVITDEYKVPSKKFKVLGNTDRHSIKKNLIGALLFDSGETAEATRLKRTARRRYTRRKNRICYLQEIFSNEMAKVDDSFFHRLEESFLVEEDKKHERHPIFGNIVDEVAYHEKYPTIYHLRKKLVDSTDKADLRLIYLALAHMIKFRGHFLIEGDLNPDNSDVDKLFIQLVQTYNQLFEENPINASGVDAKAILSARLSKSRRLENLIAQLPGEKKNGLFGNLIALSLGLTPNFKSNFDLAEDAKLQLSKDTYDDDLDNLLAQIGDQYADLFLAAKNLSDAILLSDILRVNTEITKAPLSASMIKRYDEHHQDLTLLKALVRQQLPEKYKEIFFDQSKNGYAGYIDGGASQEEFYKFIKPILEKMDGTEELLVKLNREDLLRKQRTFDNGSIPHQIHLGELHAILRRQEDFYPFLKDNREKIEKILTFRIPYYVGPLARGNSRFAWMTRKSEETITPWNFEEVVDKGASAQSFIERMTNFDKNLPNEKVLPKHSLLYEYFTVYNELTKVKYVTEGMRKPAFLSGEQKKAIVDLLFKTNRKVTVKQLKEDYFKKIECFDSVEISGVEDRFNASLGTYHDLLKIIKDKDFLDNEENEDILEDIVLTLTLFEDREMIEERLKTYAHLFDDKVMKQLKRRRYTGWGRLSRKLINGIRDKQSGKTILDFLKSDGFANRNFMQLIHDDSLTFKEDIQKAQVSGQGDSLHEHIANLAGSPAIKKGILQTVKVVDELVKVMGRHKPENIVIEMARENQTTQKGQKNSRERMKRIEEGIKELGSQILKEHPVENTQLQNEKLYLYYLQNGRDMYVDQELDINRLSDYDVDHIVPQSFLKDDSIDNKVLTRSDKARGKSDNVPSEEVVKKMKNYWRQLLNAKLITQRKFDNLTKAERGGLSELDKAGFIKRQLVETRQITKHVAQILDSRMNTKYDENDKLIREVKVITLKSKLVSDFRKDFQFYKVREINNYHHAHDAYLNAVVGTALIKKYPKLESEFVYGDYKVYDVRKMIAKSEQEIGKATAKYFFYSNIMNFFKTEITLANGEIRKRPLIETNGETGEIVWDKGRDFATVRKVLSMPQVNIVKKTEVQTGGFSKESILPKRNSDKLIARKKDWDPKKYGGFDSPTVAYSVLVVAKVEKGKSKKLKSVKELLGITIMERSSFEKNPIDFLEAKGYKEVKKDLIIKLPKYSLFELENGRKRMLASAGELQKGNELALPSKYVNFLYLASHYEKLKGSPEDNEQKQLFVEQHKHYLDEIIEQISEFSKRVILADANLDKVLSAYNKHRDKPIREQAENIIHLFTLTNLGAPAAFKYFDTTIDRKRYTSTKEVLDATLIHQSITGLYETRIDLSQLGGDGGEAAAKGGSGGGGGLDDEYRLYSPLVKPDQNIQFWLEQFPQAWAETAGMGLAKQVPPQVIQLKASATPVSVRQYPLSKEAQEGIRPHVQRLIQQGILVPVQSPWNTPLLPVRKPGTNDYRPVQDLREVNKRVQDIHPTVPNPYNLLCALPPQRSWYTVLDLKDAFFCLRLHPTSQPLFAFEWRDPGTGRTGQLTWTRLPQGFKNSPTIFNEALHRDLANFRIQHPQVTLLQYVDDLLLAGATKQDCLEGTKALLLELSDLGYRASAKKAQICRREVTYLGYSLRDGQRWLTEARKKTVVQIPAPTTAKQVREFLGKAGFCRLFIPGFATLAAPLYPLTKPKGEFSWAPEHQKAFDAIKKALLSAPALALPDVTKPFTLYVDERKGVARGVLTQTLGPWRRPVAYLSKKLDPVASGWPVCLKAIAAVAILVKDADKLTLGQNITVIAPHALENIVRQPPDRWMTNARMTHYQSLLLTERVTFAPPAALNPATLLPEETDEPVTHDCHQLLIEETGVRKDLTDIPLTGEVLTWFTDGSSYVVEGKRMAGAAVVDGTRTIWASSLPEGTSAQKAELMALTQALRLAEGKSINIYTDSRYAFATAHVHGAIYKQRGWLTSAGREIKNKEEILSLLEALHLPKRLAIIHCPGHQKAKDPISRGNQMADRVAKQAAQGVNLLPAGKRTADGSEFEKRTADGSEFESPKKKAKVE

SEQ ID NO: 73 - protein, 2086 aa, synthetic construct
MPAAKRVKLDGGDKKYSIGLDIGTNSVGWAVITDEYKVPSKKFKVLGNTDRHSIKKNLIGALLFDSGETAEATRLKRTARRRYTRRKNRICYLQEIFSNEMAKVDDSFFHRLEESFLVEEDKKHERHPIFGNIVDEVAYHEKYPTIYHLRKKLVDSTDKADLRLIYLALAHMIKFRGHFLIEGDLNPDNSDVDKLFIQLVQTYNQLFEENPINASGVDAKAILSARLSKSRRLENLIAQLPGEKKNGLFGNLIALSLGLTPNFKSNFDLAEDAKLQLSKDTYDDDLDNLLAQIGDQYADLFLAAKNLSDAILLSDILRVNTEITKAPLSASMIKRYDEHHQDLTLLKALVRQQLPEKYKEIFFDQSKNGYAGYIDGGASQEEFYKFIKPILEKMDGTEELLVKLNREDLLRKQRTFDNGSIPHQIHLGELHAILRRQEDFYPFLKDNREKIEKILTFRIPYYVGPLARGNSRFAWMTRKSEETITPWNFEEVVDKGASAQSFIERMTNFDKNLPNEKVLPKHSLLYEYFTVYNELTKVKYVTEGMRKPAFLSGEQKKAIVDLLFKTNRKVTVKQLKEDYFKKIECFDSVEISGVEDRFNASLGTYHDLLKIIKDKDFLDNEENEDILEDIVLTLTLFEDREMIEERLKTYAHLFDDKVMKQLKRRRYTGWGRLSRKLINGIRDKQSGKTILDFLKSDGFANRNFMQLIHDDSLTFKEDIQKAQVSGQGDSLHEHIANLAGSPAIKKGILQTVKVVDELVKVMGRHKPENIVIEMARENQTTQKGQKNSRERMKRIEEGIKELGSQILKEHPVENTQLQNEKLYLYYLQNGRDMYVDQELDINRLSDYDVDHIVPQSFLKDDSIDNKVLTRSDKARGKSDNVPSEEVVKKMKNYWRQLLNAKLITQRKFDNLTKAERGGLSELDKAGFIKRQLVETRQITKHVAQILDSRMNTKYDENDKLIREVKVITLKSKLVSDFRKDFQFYKVREINNYHHAHDAYLNAVVGTALIKKYPKLESEFVYGDYKVYDVRKMIAKSEQEIGKATAKYFFYSNIMNFFKTEITLANGEIRKRPLIETNGETGEIVWDKGRDFATVRKVLSMPQVNIVKKTEVQTGGFSKESILPKRNSDKLIARKKDWDPKKYGGFDSPTVAYSVLVVAKVEKGKSKKLKSVKELLGITIMERSSFEKNPIDFLEAKGYKEVKKDLIIKLPKYSLFELENGRKRMLASAGELQKGNELALPSKYVNFLYLASHYEKLKGSPEDNEQKQLFVEQHKHYLDEIIEQISEFSKRVILADANLDKVLSAYNKHRDKPIREQAENIIHLFTLTNLGAPAAFKYFDTTIDRKRYTSTKEVLDATLIHQSITGLYETRIDLSQLGGDGGGSSPAPGGGGGLDDEYRLYSPLVKPDQNIQFWLEQFPQAWAETAGMGLAKQVPPQVIQLKASATPVSVRQYPLSKEAQEGIRPHVQRLIQQGILVPVQSPWNTPLLPVRKPGTNDYRPVQDLREVNKRVQDIHPTVPNPYNLLCALPPQRSWYTVLDLKDAFFCLRLHPTSQPLFAFEWRDPGTGRTGQLTWTRLPQGFKNSPTIFNEALHRDLANFRIQHPQVTLLQYVDDLLLAGATKQDCLEGTKALLLELSDLGYRASAKKAQICRREVTYLGYSLRDGQRWLTEARKKTVVQIPAPTTAKQVREFLGKAGFCRLFIPGFATLAAPLYPLTKPKGEFSWAPEHQKAFDAIKKALLSAPALALPDVTKPFTLYVDERKGVARGVLTQTLGPWRRPVAYLSKKLDPVASGWPVCLKAIAAVAILVKDADKLTLGQNITVIAPHALENIVRQPPDRWMTNARMTHYQSLLLTERVTFAPPAALNPATLLPEETDEPVTHDCHQLLIEETGVRKDLTDIPLTGEVLTWFTDGSSYVVEGKRMAGAAVVDGTRTIWASSLPEGTSAQKAELMALTQALRLAEGKSINIYTDSRYAFATAHVHGAIYKQRGWLTSAGREIKNKEEILSLLEALHLPKRLAIIHCPGHQKAKDPISRGNQMADRVAKQAAQGVNLLPAGKRTADGSEFEKRTADGSEFESPKKKAKVE

SEQ ID NO: 74 - protein, 2089 aa, synthetic construct
MPAAKRVKLDGGDKKYSIGLDIGTNSVGWAVITDEYKVPSKKFKVLGNTDRHSIKKNLIGALLFDSGETAEATRLKRTARRRYTRRKNRICYLQEIFSNEMAKVDDSFFHRLEESFLVEEDKKHERHPIFGNIVDEVAYHEKYPTIYHLRKKLVDSTDKADLRLIYLALAHMIKFRGHFLIEGDLNPDNSDVDKLFIQLVQTYNQLFEENPINASGVDAKAILSARLSKSRRLENLIAQLPGEKKNGLFGNLIALSLGLTPNFKSNFDLAEDAKLQLSKDTYDDDLDNLLAQIGDQYADLFLAAKNLSDAILLSDILRVNTEITKAPLSASMIKRYDEHHQDLTLLKALVRQQLPEKYKEIFFDQSKNGYAGYIDGGASQEEFYKFIKPILEKMDGTEELLVKLNREDLLRKQRTFDNGSIPHQIHLGELHAILRRQEDFYPFLKDNREKIEKILTFRIPYYVGPLARGNSRFAWMTRKSEETITPWNFEEVVDKGASAQSFIERMTNFDKNLPNEKVLPKHSLLYEYFTVYNELTKVKYVTEGMRKPAFLSGEQKKAIVDLLFKTNRKVTVKQLKEDYFKKIECFDSVEISGVEDRFNASLGTYHDLLKIIKDKDFLDNEENEDILEDIVLTLTLFEDREMIEERLKTYAHLFDDKVMKQLKRRRYTGWGRLSRKLINGIRDKQSGKTILDFLKSDGFANRNFMQLIHDDSLTFKEDIQKAQVSGQGDSLHEHIANLAGSPAIKKGILQTVKVVDELVKVMGRHKPENIVIEMARENQTTQKGQKNSRERMKRIEEGIKELGSQILKEHPVENTQLQNEKLYLYYLQNGRDMYVDQELDINRLSDYDVDHIVPQSFLKDDSIDNKVLTRSDKARGKSDNVPSEEVVKKMKNYWRQLLNAKLITQRKFDNLTKAERGGLSELDKAGFIKRQLVETRQITKHVAQILDSRMNTKYDENDKLIREVKVITLKSKLVSDFRKDFQFYKVREINNYHHAHDAYLNAVVGTALIKKYPKLESEFVYGDYKVYDVRKMIAKSEQEIGKATAKYFFYSNIMNFFKTEITLANGEIRKRPLIETNGETGEIVWDKGRDFATVRKVLSMPQVNIVKKTEVQTGGFSKESILPKRNSDKLIARKKDWDPKKYGGFDSPTVAYSVLVVAKVEKGKSKKLKSVKELLGITIMERSSFEKNPIDFLEAKGYKEVKKDLIIKLPKYSLFELENGRKRMLASAGELQKGNELALPSKYVNFLYLASHYEKLKGSPEDNEQKQLFVEQHKHYLDEIIEQISEFSKRVILADANLDKVLSAYNKHRDKPIREQAENIIHLFTLTNLGAPAAFKYFDTTIDRKRYTSTKEVLDATLIHQSITGLYETRIDLSQLGGDGGGSAGSAAGSGEFGGLDDEYRLYSPLVKPDQNIQFWLEQFPQAWAETAGMGLAKQVPPQVIQLKASATPVSVRQYPLSKEAQEGIRPHVQRLIQQGILVPVQSPWNTPLLPVRKPGTNDYRPVQDLREVNKRVQDIHPTVPNPYNLLCALPPQRSWYTVLDLKDAFFCLRLHPTSQPLFAFEWRDPGTGRTGQLTWTRLPQGFKNSPTIFNEALHRDLANFRIQHPQVTLLQYVDDLLLAGATKQDCLEGTKALLLELSDLGYRASAKKAQICRREVTYLGYSLRDGQRWLTEARKKTVVQIPAPTTAKQVREFLGKAGFCRLFIPGFATLAAPLYPLTKPKGEFSWAPEHQKAFDAIKKALLSAPALALPDVTKPFTLYVDERKGVARGVLTQTLGPWRRPVAYLSKKLDPVASGWPVCLKAIAAVAILVKDADKLTLGQNITVIAPHALENIVRQPPDRWMTNARMTHYQSLLLTERVTFAPPAALNPATLLPEETDEPVTHDCHQLLIEETGVRKDLTDIPLTGEVLTWFTDGSSYVVEGKRMAGAAVVDGTRTIWASSLPEGTSAQKAELMALTQALRLAEGKSINIYTDSRYAFATAHVHGAIYKQRGWLTSAGREIKNKEEILSLLEALHLPKRLAIIHCPGHQKAKDPISRGNQMADRVAKQAAQGVNLLPAGKRTADGSEFEKRTADGSEFESPKKKAKVE

SEQ ID NO: 75 - protein, 2092 aa, synthetic construct
MPAAKRVKLDGGDKKYSIGLDIGTNSVGWAVITDEYKVPSKKFKVLGNTDRHSIKKNLIGALLFDSGETAEATRLKRTARRRYTRRKNRICYLQEIFSNEMAKVDDSFFHRLEESFLVEEDKKHERHPIFGNIVDEVAYHEKYPTIYHLRKKLVDSTDKADLRLIYLALAHMIKFRGHFLIEGDLNPDNSDVDKLFIQLVQTYNQLFEENPINASGVDAKAILSARLSKSRRLENLIAQLPGEKKNGLFGNLIALSLGLTPNFKSNFDLAEDAKLQLSKDTYDDDLDNLLAQIGDQYADLFLAAKNLSDAILLSDILRVNTEITKAPLSASMIKRYDEHHQDLTLLKALVRQQLPEKYKEIFFDQSKNGYAGYIDGGASQEEFYKFIKPILEKMDGTEELLVKLNREDLLRKQRTFDNGSIPHQIHLGELHAILRRQEDFYPFLKDNREKIEKILTFRIPYYVGPLARGNSRFAWMTRKSEETITPWNFEEVVDKGASAQSFIERMTNFDKNLPNEKVLPKHSLLYEYFTVYNELTKVKYVTEGMRKPAFLSGEQKKAIVDLLFKTNRKVTVKQLKEDYFKKIECFDSVEISGVEDRFNASLGTYHDLLKIIKDKDFLDNEENEDILEDIVLTLTLFEDREMIEERLKTYAHLFDDKVMKQLKRRRYTGWGRLSRKLINGIRDKQSGKTILDFLKSDGFANRNFMQLIHDDSLTFKEDIQKAQVSGQGDSLHEHIANLAGSPAIKKGILQTVKVVDELVKVMGRHKPENIVIEMARENQTTQKGQKNSRERMKRIEEGIKELGSQILKEHPVENTQLQNEKLYLYYLQNGRDMYVDQELDINRLSDYDVDHIVPQSFLKDDSIDNKVLTRSDKARGKSDNVPSEEVVKKMKNYWRQLLNAKLITQRKFDNLTKAERGGLSELDKAGFIKRQLVETRQITKHVAQILDSRMNTKYDENDKLIREVKVITLKSKLVSDFRKDFQFYKVREINNYHHAHDAYLNAVVGTALIKKYPKLESEFVYGDYKVYDVRKMIAKSEQEIGKATAKYFFYSNIMNFFKTEITLANGEIRKRPLIETNGETGEIVWDKGRDFATVRKVLSMPQVNIVKKTEVQTGGFSKESILPKRNSDKLIARKKDWDPKKYGGFDSPTVAYSVLVVAKVEKGKSKKLKSVKELLGITIMERSSFEKNPIDFLEAKGYKEVKKDLIIKLPKYSLFELENGRKRMLASAGELQKGNELALPSKYVNFLYLASHYEKLKGSPEDNEQKQLFVEQHKHYLDEIIEQISEFSKRVILADANLDKVLSAYNKHRDKPIREQAENIIHLFTLTNLGAPAAFKYFDTTIDRKRYTSTKEVLDATLIHQSITGLYETRIDLSQLGGDGGGGGGSEAAAKGGGGSGGLDDEYRLYSPLVKPDQNIQFWLEQFPQAWAETAGMGLAKQVPPQVIQLKASATPVSVRQYPLSKEAQEGIRPHVQRLIQQGILVPVQSPWNTPLLPVRKPGTNDYRPVQDLREVNKRVQDIHPTVPNPYNLLCALPPQRSWYTVLDLKDAFFCLRLHPTSQPLFAFEWRDPGTGRTGQLTWTRLPQGFKNSPTIFNEALHRDLANFRIQHPQVTLLQYVDDLLLAGATKQDCLEGTKALLLELSDLGYRASAKKAQICRREVTYLGYSLRDGQRWLTEARKKTVVQIPAPTTAKQVREFLGKAGFCRLFIPGFATLAAPLYPLTKPKGEFSWAPEHQKAFDAIKKALLSAPALALPDVTKPFTLYVDERKGVARGVLTQTLGPWRRPVAYLSKKLDPVASGWPVCLKAIAAVAILVKDADKLTLGQNITVIAPHALENIVRQPPDRWMTNARMTHYQSLLLTERVTFAPPAALNPATLLPEETDEPVTHDCHQLLIEETGVRKDLTDIPLTGEVLTWFTDGSSYVVEGKRMAGAAVVDGTRTIWASSLPEGTSAQKAELMALTQALRLAEGKSINIYTDSRYAFATAHVHGAIYKQRGWLTSAGREIKNKEEILSLLEALHLPKRLAIIHCPGHQKAKDPISRGNQMADRVAKQAAQGVNLLPAGKRTADGSEFEKRTADGSEFESPKKKAKVE

SEQ ID NO: 76 - protein, 2083 aa, synthetic construct
MPAAKRVKLDGGDKKYSIGLDIGTNSVGWAVITDEYKVPSKKFKVLGNTDRHSIKKNLIGALLFDSGETAEATRLKRTARRRYTRRKNRICYLQEIFSNEMAKVDDSFFHRLEESFLVEEDKKHERHPIFGNIVDEVAYHEKYPTIYHLRKKLVDSTDKADLRLIYLALAHMIKFRGHFLIEGDLNPDNSDVDKLFIQLVQTYNQLFEENPINASGVDAKAILSARLSKSRRLENLIAQLPGEKKNGLFGNLIALSLGLTPNFKSNFDLAEDAKLQLSKDTYDDDLDNLLAQIGDQYADLFLAAKNLSDAILLSDILRVNTEITKAPLSASMIKRYDEHHQDLTLLKALVRQQLPEKYKEIFFDQSKNGYAGYIDGGASQEEFYKFIKPILEKMDGTEELLVKLNREDLLRKQRTFDNGSIPHQIHLGELHAILRRQEDFYPFLKDNREKIEKILTFRIPYYVGPLARGNSRFAWMTRKSEETITPWNFEEVVDKGASAQSFIERMTNFDKNLPNEKVLPKHSLLYEYFTVYNELTKVKYVTEGMRKPAFLSGEQKKAIVDLLFKTNRKVTVKQLKEDYFKKIECFDSVEISGVEDRFNASLGTYHDLLKIIKDKDFLDNEENEDILEDIVLTLTLFEDREMIEERLKTYAHLFDDKVMKQLKRRRYTGWGRLSRKLINGIRDKQSGKTILDFLKSDGFANRNFMQLIHDDSLTFKEDIQKAQVSGQGDSLHEHIANLAGSPAIKKGILQTVKVVDELVKVMGRHKPENIVIEMARENQTTQKGQKNSRERMKRIEEGIKELGSQILKEHPVENTQLQNEKLYLYYLQNGRDMYVDQELDINRLSDYDVDHIVPQSFLKDDSIDNKVLTRSDKARGKSDNVPSEEVVKKMKNYWRQLLNAKLITQRKFDNLTKAERGGLSELDKAGFIKRQLVETRQITKHVAQILDSRMNTKYDENDKLIREVKVITLKSKLVSDFRKDFQFYKVREINNYHHAHDAYLNAVVGTALIKKYPKLESEFVYGDYKVYDVRKMIAKSEQEIGKATAKYFFYSNIMNFFKTEITLANGEIRKRPLIETNGETGEIVWDKGRDFATVRKVLSMPQVNIVKKTEVQTGGFSKESILPKRNSDKLIARKKDWDPKKYGGFDSPTVAYSVLVVAKVEKGKSKKLKSVKELLGITIMERSSFEKNPIDFLEAKGYKEVKKDLIIKLPKYSLFELENGRKRMLASAGELQKGNELALPSKYVNFLYLASHYEKLKGSPEDNEQKQLFVEQHKHYLDEIIEQISEFSKRVILADANLDKVLSAYNKHRDKPIREQAENIIHLFTLTNLGAPAAFKYFDTTIDRKRYTSTKEVLDATLIHQSITGLYETRIDLSQLGGDGGGGGPAPGGLDDEYRLYSPLVKPDQNIQFWLEQFPQAWAETAGMGLAKQVPPQVIQLKASATPVSVRQYPLSKEAQEGIRPHVQRLIQQGILVPVQSPWNTPLLPVRKPGTNDYRPVQDLREVNKRVQDIHPTVPNPYNLLCALPPQRSWYTVLDLKDAFFCLRLHPTSQPLFAFEWRDPGTGRTGQLTWTRLPQGFKNSPTIFNEALHRDLANFRIQHPQVTLLQYVDDLLLAGATKQDCLEGTKALLLELSDLGYRASAKKAQICRREVTYLGYSLRDGQRWLTEARKKTVVQIPAPTTAKQVREFLGKAGFCRLFIPGFATLAAPLYPLTKPKGEFSWAPEHQKAFDAIKKALLSAPALALPDVTKPFTLYVDERKGVARGVLTQTLGPWRRPVAYLSKKLDPVASGWPVCLKAIAAVAILVKDADKLTLGQNITVIAPHALENIVRQPPDRWMTNARMTHYQSLLLTERVTFAPPAALNPATLLPEETDEPVTHDCHQLLIEETGVRKDLTDIPLTGEVLTWFTDGSSYVVEGKRMAGAAVVDGTRTIWASSLPEGTSAQKAELMALTQALRLAEGKSINIYTDSRYAFATAHVHGAIYKQRGWLTSAGREIKNKEEILSLLEALHLPKRLAIIHCPGHQKAKDPISRGNQMADRVAKQAAQGVNLLPAGKRTADGSEFEKRTADGSEFESPKKKAKVE

SEQ ID NO: 77 - protein, 2084 aa, synthetic construct
MPAAKRVKLDGGDKKYSIGLDIGTNSVGWAVITDEYKVPSKKFKVLGNTDRHSIKKNLIGALLFDSGETAEATRLKRTARRRYTRRKNRICYLQEIFSNEMAKVDDSFFHRLEESFLVEEDKKHERHPIFGNIVDEVAYHEKYPTIYHLRKKLVDSTDKADLRLIYLALAHMIKFRGHFLIEGDLNPDNSDVDKLFIQLVQTYNQLFEENPINASGVDAKAILSARLSKSRRLENLIAQLPGEKKNGLFGNLIALSLGLTPNFKSNFDLAEDAKLQLSKDTYDDDLDNLLAQIGDQYADLFLAAKNLSDAILLSDILRVNTEITKAPLSASMIKRYDEHHQDLTLLKALVRQQLPEKYKEIFFDQSKNGYAGYIDGGASQEEFYKFIKPILEKMDGTEELLVKLNREDLLRKQRTFDNGSIPHQIHLGELHAILRRQEDFYPFLKDNREKIEKILTFRIPYYVGPLARGNSRFAWMTRKSEETITPWNFEEVVDKGASAQSFIERMTNFDKNLPNEKVLPKHSLLYEYFTVYNELTKVKYVTEGMRKPAFLSGEQKKAIVDLLFKTNRKVTVKQLKEDYFKKIECFDSVEISGVEDRFNASLGTYHDLLKIIKDKDFLDNEENEDILEDIVLTLTLFEDREMIEERLKTYAHLFDDKVMKQLKRRRYTGWGRLSRKLINGIRDKQSGKTILDFLKSDGFANRNFMQLIHDDSLTFKEDIQKAQVSGQGDSLHEHIANLAGSPAIKKGILQTVKVVDELVKVMGRHKPENIVIEMARENQTTQKGQKNSRERMKRIEEGIKELGSQILKEHPVENTQLQNEKLYLYYLQNGRDMYVDQELDINRLSDYDVDHIVPQSFLKDDSIDNKVLTRSDKARGKSDNVPSEEVVKKMKNYWRQLLNAKLITQRKFDNLTKAERGGLSELDKAGFIKRQLVETRQITKHVAQILDSRMNTKYDENDKLIREVKVITLKSKLVSDFRKDFQFYKVREINNYHHAHDAYLNAVVGTALIKKYPKLESEFVYGDYKVYDVRKMIAKSEQEIGKATAKYFFYSNIMNFFKTEITLANGEIRKRPLIETNGETGEIVWDKGRDFATVRKVLSMPQVNIVKKTEVQTGGFSKESILPKRNSDKLIARKKDWDPKKYGGFDSPTVAYSVLVVAKVEKGKSKKLKSVKELLGITIMERSSFEKNPIDFLEAKGYKEVKKDLIIKLPKYSLFELENGRKRMLASAGELQKGNELALPSKYVNFLYLASHYEKLKGSPEDNEQKQLFVEQHKHYLDEIIEQISEFSKRVILADANLDKVLSAYNKHRDKPIREQAENIIHLFTLTNLGAPAAFKYFDTTIDRKRYTSTKEVLDATLIHQSITGLYETRIDLSQLGGDGGGGGGGGGGGLDDEYRLYSPLVKPDQNIQFWLEQFPQAWAETAGMGLAKQVPPQVIQLKASATPVSVRQYPLSKEAQEGIRPHVQRLIQQGILVPVQSPWNTPLLPVRKPGTNDYRPVQDLREVNKRVQDIHPTVPNPYNLLCALPPQRSWYTVLDLKDAFFCLRLHPTSQPLFAFEWRDPGTGRTGQLTWTRLPQGFKNSPTIFNEALHRDLANFRIQHPQVTLLQYVDDLLLAGATKQDCLEGTKALLLELSDLGYRASAKKAQICRREVTYLGYSLRDGQRWLTEARKKTVVQIPAPTTAKQVREFLGKAGFCRLFIPGFATLAAPLYPLTKPKGEFSWAPEHQKAFDAIKKALLSAPALALPDVTKPFTLYVDERKGVARGVLTQTLGPWRRPVAYLSKKLDPVASGWPVCLKAIAAVAILVKDADKLTLGQNITVIAPHALENIVRQPPDRWMTNARMTHYQSLLLTERVTFAPPAALNPATLLPEETDEPVTHDCHQLLIEETGVRKDLTDIPLTGEVLTWFTDGSSYVVEGKRMAGAAVVDGTRTIWASSLPEGTSAQKAELMALTQALRLAEGKSINIYTDSRYAFATAHVHGAIYKQRGWLTSAGREIKNKEEILSLLEALHLPKRLAIIHCPGHQKAKDPISRGNQMADRVAKQAAQGVNLLPAGKRTADGSEFEKRTADGSEFESPKKKAKVE

SEQ ID NO: 78 - protein, 2083 aa, synthetic construct
MPAAKRVKLDGGDKKYSIGLDIGTNSVGWAVITDEYKVPSKKFKVLGNTDRHSIKKNLIGALLFDSGETAEATRLKRTARRRYTRRKNRICYLQEIFSNEMAKVDDSFFHRLEESFLVEEDKKHERHPIFGNIVDEVAYHEKYPTIYHLRKKLVDSTDKADLRLIYLALAHMIKFRGHFLIEGDLNPDNSDVDKLFIQLVQTYNQLFEENPINASGVDAKAILSARLSKSRRLENLIAQLPGEKKNGLFGNLIALSLGLTPNFKSNFDLAEDAKLQLSKDTYDDDLDNLLAQIGDQYADLFLAAKNLSDAILLSDILRVNTEITKAPLSASMIKRYDEHHQDLTLLKALVRQQLPEKYKEIFFDQSKNGYAGYIDGGASQEEFYKFIKPILEKMDGTEELLVKLNREDLLRKQRTFDNGSIPHQIHLGELHAILRRQEDFYPFLKDNREKIEKILTFRIPYYVGPLARGNSRFAWMTRKSEETITPWNFEEVVDKGASAQSFIERMTNFDKNLPNEKVLPKHSLLYEYFTVYNELTKVKYVTEGMRKPAFLSGEQKKAIVDLLFKTNRKVTVKQLKEDYFKKIECFDSVEISGVEDRFNASLGTYHDLLKIIKDKDFLDNEENEDILEDIVLTLTLFEDREMIEERLKTYAHLFDDKVMKQLKRRRYTGWGRLSRKLINGIRDKQSGKTILDFLKSDGFANRNFMQLIHDDSLTFKEDIQKAQVSGQGDSLHEHIANLAGSPAIKKGILQTVKVVDELVKVMGRHKPENIVIEMARENQTTQKGQKNSRERMKRIEEGIKELGSQILKEHPVENTQLQNEKLYLYYLQNGRDMYVDQELDINRLSDYDVDHIVPQSFLKDDSIDNKVLTRSDKARGKSDNVPSEEVVKKMKNYWRQLLNAKLITQRKFDNLTKAERGGLSELDKAGFIKRQLVETRQITKHVAQILDSRMNTKYDENDKLIREVKVITLKSKLVSDFRKDFQFYKVREINNYHHAHDAYLNAVVGTALIKKYPKLESEFVYGDYKVYDVRKMIAKSEQEIGKATAKYFFYSNIMNFFKTEITLANGEIRKRPLIETNGETGEIVWDKGRDFATVRKVLSMPQVNIVKKTEVQTGGFSKESILPKRNSDKLIARKKDWDPKKYGGFDSPTVAYSVLVVAKVEKGKSKKLKSVKELLGITIMERSSFEKNPIDFLEAKGYKEVKKDLIIKLPKYSLFELENGRKRMLASAGELQKGNELALPSKYVNFLYLASHYEKLKGSPEDNEQKQLFVEQHKHYLDEIIEQISEFSKRVILADANLDKVLSAYNKHRDKPIREQAENIIHLFTLTNLGAPAAFKYFDTTIDRKRYTSTKEVLDATLIHQSITGLYETRIDLSQLGGDGGGGSPAPGGLDDEYRLYSPLVKPDQNIQFWLEQFPQAWAETAGMGLAKQVPPQVIQLKASATPVSVRQYPLSKEAQEGIRPHVQRLIQQGILVPVQSPWNTPLLPVRKPGTNDYRPVQDLREVNKRVQDIHPTVPNPYNLLCALPPQRSWYTVLDLKDAFFCLRLHPTSQPLFAFEWRDPGTGRTGQLTWTRLPQGFKNSPTIFNEALHRDLANFRIQHPQVTLLQYVDDLLLAGATKQDCLEGTKALLLELSDLGYRASAKKAQICRREVTYLGYSLRDGQRWLTEARKKTVVQIPAPTTAKQVREFLGKAGFCRLFIPGFATLAAPLYPLTKPKGEFSWAPEHQKAFDAIKKALLSAPALALPDVTKPFTLYVDERKGVARGVLTQTLGPWRRPVAYLSKKLDPVASGWPVCLKAIAAVAILVKDADKLTLGQNITVIAPHALENIVRQPPDRWMTNARMTHYQSLLLTERVTFAPPAALNPATLLPEETDEPVTHDCHQLLIEETGVRKDLTDIPLTGEVLTWFTDGSSYVVEGKRMAGAAVVDGTRTIWASSLPEGTSAQKAELMALTQALRLAEGKSINIYTDSRYAFATAHVHGAIYKQRGWLTSAGREIKNKEEILSLLEALHLPKRLAIIHCPGHQKAKDPISRGNQMADRVAKQAAQGVNLLPAGKRTADGSEFEKRTADGSEFESPKKKAKVE

SEQ ID NO: 79 - protein, 2083 aa, synthetic construct
MPAAKRVKLDGGDKKYSIGLDIGTNSVGWAVITDEYKVPSKKFKVLGNTDRHSIKKNLIGALLFDSGETAEATRLKRTARRRYTRRKNRICYLQEIFSNEMAKVDDSFFHRLEESFLVEEDKKHERHPIFGNIVDEVAYHEKYPTIYHLRKKLVDSTDKADLRLIYLALAHMIKFRGHFLIEGDLNPDNSDVDKLFIQLVQTYNQLFEENPINASGVDAKAILSARLSKSRRLENLIAQLPGEKKNGLFGNLIALSLGLTPNFKSNFDLAEDAKLQLSKDTYDDDLDNLLAQIGDQYADLFLAAKNLSDAILLSDILRVNTEITKAPLSASMIKRYDEHHQDLTLLKALVRQQLPEKYKEIFFDQSKNGYAGYIDGGASQEEFYKFIKPILEKMDGTEELLVKLNREDLLRKQRTFDNGSIPHQIHLGELHAILRRQEDFYPFLKDNREKIEKILTFRIPYYVGPLARGNSRFAWMTRKSEETITPWNFEEVVDKGASAQSFIERMTNFDKNLPNEKVLPKHSLLYEYFTVYNELTKVKYVTEGMRKPAFLSGEQKKAIVDLLFKTNRKVTVKQLKEDYFKKIECFDSVEISGVEDRFNASLGTYHDLLKIIKDKDFLDNEENEDILEDIVLTLTLFEDREMIEERLKTYAHLFDDKVMKQLKRRRYTGWGRLSRKLINGIRDKQSGKTILDFLKSDGFANRNFMQLIHDDSLTFKEDIQKAQVSGQGDSLHEHIANLAGSPAIKKGILQTVKVVDELVKVMGRHKPENIVIEMARENQTTQKGQKNSRERMKRIEEGIKELGSQILKEHPVENTQLQNEKLYLYYLQNGRDMYVDQELDINRLSDYDVDHIVPQSFLKDDSIDNKVLTRSDKARGKSDNVPSEEVVKKMKNYWRQLLNAKLITQRKFDNLTKAERGGLSELDKAGFIKRQLVETRQITKHVAQILDSRMNTKYDENDKLIREVKVITLKSKLVSDFRKDFQFYKVREINNYHHAHDAYLNAVVGTALIKKYPKLESEFVYGDYKVYDVRKMIAKSEQEIGKATAKYFFYSNIMNFFKTEITLANGEIRKRPLIETNGETGEIVWDKGRDFATVRKVLSMPQVNIVKKTEVQTGGFSKESILPKRNSDKLIARKKDWDPKKYGGFDSPTVAYSVLVVAKVEKGKSKKLKSVKELLGITIMERSSFEKNPIDFLEAKGYKEVKKDLIIKLPKYSLFELENGRKRMLASAGELQKGNELALPSKYVNFLYLASHYEKLKGSPEDNEQKQLFVEQHKHYLDEIIEQISEFSKRVILADANLDKVLSAYNKHRDKPIREQAENIIHLFTLTNLGAPAAFKYFDTTIDRKRYTSTKEVLDATLIHQSITGLYETRIDLSQLGGDGGPAPGGGGGLDDEYRLYSPLVKPDQNIQFWLEQFPQAWAETAGMGLAKQVPPQVIQLKASATPVSVRQYPLSKEAQEGIRPHVQRLIQQGILVPVQSPWNTPLLPVRKPGTNDYRPVQDLREVNKRVQDIHPTVPNPYNLLCALPPQRSWYTVLDLKDAFFCLRLHPTSQPLFAFEWRDPGTGRTGQLTWTRLPQGFKNSPTIFNEALHRDLANFRIQHPQVTLLQYVDDLLLAGATKQDCLEGTKALLLELSDLGYRASAKKAQICRREVTYLGYSLRDGQRWLTEARKKTVVQIPAPTTAKQVREFLGKAGFCRLFIPGFATLAAPLYPLTKPKGEFSWAPEHQKAFDAIKKALLSAPALALPDVTKPFTLYVDERKGVARGVLTQTLGPWRRPVAYLSKKLDPVASGWPVCLKAIAAVAILVKDADKLTLGQNITVIAPHALENIVRQPPDRWMTNARMTHYQSLLLTERVTFAPPAALNPATLLPEETDEPVTHDCHQLLIEETGVRKDLTDIPLTGEVLTWFTDGSSYVVEGKRMAGAAVVDGTRTIWASSLPEGTSAQKAELMALTQALRLAEGKSINIYTDSRYAFATAHVHGAIYKQRGWLTSAGREIKNKEEILSLLEALHLPKRLAIIHCPGHQKAKDPISRGNQMADRVAKQAAQGVNLLPAGKRTADGSEFEKRTADGSEFESPKKKAKVE

SEQ ID NO: 80 - protein, 2088 aa, synthetic construct
MPAAKRVKLDGGDKKYSIGLDIGTNSVGWAVITDEYKVPSKKFKVLGNTDRHSIKKNLIGALLFDSGETAEATRLKRTARRRYTRRKNRICYLQEIFSNEMAKVDDSFFHRLEESFLVEEDKKHERHPIFGNIVDEVAYHEKYPTIYHLRKKLVDSTDKADLRLIYLALAHMIKFRGHFLIEGDLNPDNSDVDKLFIQLVQTYNQLFEENPINASGVDAKAILSARLSKSRRLENLIAQLPGEKKNGLFGNLIALSLGLTPNFKSNFDLAEDAKLQLSKDTYDDDLDNLLAQIGDQYADLFLAAKNLSDAILLSDILRVNTEITKAPLSASMIKRYDEHHQDLTLLKALVRQQLPEKYKEIFFDQSKNGYAGYIDGGASQEEFYKFIKPILEKMDGTEELLVKLNREDLLRKQRTFDNGSIPHQIHLGELHAILRRQEDFYPFLKDNREKIEKILTFRIPYYVGPLARGNSRFAWMTRKSEETITPWNFEEVVDKGASAQSFIERMTNFDKNLPNEKVLPKHSLLYEYFTVYNELTKVKYVTEGMRKPAFLSGEQKKAIVDLLFKTNRKVTVKQLKEDYFKKIECFDSVEISGVEDRFNASLGTYHDLLKIIKDKDFLDNEENEDILEDIVLTLTLFEDREMIEERLKTYAHLFDDKVMKQLKRRRYTGWGRLSRKLINGIRDKQSGKTILDFLKSDGFANRNFMQLIHDDSLTFKEDIQKAQVSGQGDSLHEHIANLAGSPAIKKGILQTVKVVDELVKVMGRHKPENIVIEMARENQTTQKGQKNSRERMKRIEEGIKELGSQILKEHPVENTQLQNEKLYLYYLQNGRDMYVDQELDINRLSDYDVDHIVPQSFLKDDSIDNKVLTRSDKARGKSDNVPSEEVVKKMKNYWRQLLNAKLITQRKFDNLTKAERGGLSELDKAGFIKRQLVETRQITKHVAQILDSRMNTKYDENDKLIREVKVITLKSKLVSDFRKDFQFYKVREINNYHHAHDAYLNAVVGTALIKKYPKLESEFVYGDYKVYDVRKMIAKSEQEIGKATAKYFFYSNIMNFFKTEITLANGEIRKRPLIETNGETGEIVWDKGRDFATVRKVLSMPQVNIVKKTEVQTGGFSKESILPKRNSDKLIARKKDWDPKKYGGFDSPTVAYSVLVVAKVEKGKSKKLKSVKELLGITIMERSSFEKNPIDFLEAKGYKEVKKDLIIKLPKYSLFELENGRKRMLASAGELQKGNELALPSKYVNFLYLASHYEKLKGSPEDNEQKQLFVEQHKHYLDEIIEQISEFSKRVILADANLDKVLSAYNKHRDKPIREQAENIIHLFTLTNLGAPAAFKYFDTTIDRKRYTSTKEVLDATLIHQSITGLYETRIDLSQLGGDGGGGSGSSEAAAKGGLDDEYRLYSPLVKPDQNIQFWLEQFPQAWAETAGMGLAKQVPPQVIQLKASATPVSVRQYPLSKEAQEGIRPHVQRLIQQGILVPVQSPWNTPLLPVRKPGTNDYRPVQDLREVNKRVQDIHPTVPNPYNLLCALPPQRSWYTVLDLKDAFFCLRLHPTSQPLFAFEWRDPGTGRTGQLTWTRLPQGFKNSPTIFNEALHRDLANFRIQHPQVTLLQYVDDLLLAGATKQDCLEGTKALLLELSDLGYRASAKKAQICRREVTYLGYSLRDGQRWLTEARKKTVVQIPAPTTAKQVREFLGKAGFCRLFIPGFATLAAPLYPLTKPKGEFSWAPEHQKAFDAIKKALLSAPALALPDVTKPFTLYVDERKGVARGVLTQTLGPWRRPVAYLSKKLDPVASGWPVCLKAIAAVAILVKDADKLTLGQNITVIAPHALENIVRQPPDRWMTNARMTHYQSLLLTERVTFAPPAALNPATLLPEETDEPVTHDCHQLLIEETGVRKDLTDIPLTGEVLTWFTDGSSYVVEGKRMAGAAVVDGTRTIWASSLPEGTSAQKAELMALTQALRLAEGKSINIYTDSRYAFATAHVHGAIYKQRGWLTSAGREIKNKEEILSLLEALHLPKRLAIIHCPGHQKAKDPISRGNQMADRVAKQAAQGVNLLPAGKRTADGSEFEKRTADGSEFESPKKKAKVE

SEQ ID NO: 81 - protein, 2083 aa, synthetic construct
MPAAKRVKLDGGDKKYSIGLDIGTNSVGWAVITDEYKVPSKKFKVLGNTDRHSIKKNLIGALLFDSGETAEATRLKRTARRRYTRRKNRICYLQEIFSNEMAKVDDSFFHRLEESFLVEEDKKHERHPIFGNIVDEVAYHEKYPTIYHLRKKLVDSTDKADLRLIYLALAHMIKFRGHFLIEGDLNPDNSDVDKLFIQLVQTYNQLFEENPINASGVDAKAILSARLSKSRRLENLIAQLPGEKKNGLFGNLIALSLGLTPNFKSNFDLAEDAKLQLSKDTYDDDLDNLLAQIGDQYADLFLAAKNLSDAILLSDILRVNTEITKAPLSASMIKRYDEHHQDLTLLKALVRQQLPEKYKEIFFDQSKNGYAGYIDGGASQEEFYKFIKPILEKMDGTEELLVKLNREDLLRKQRTFDNGSIPHQIHLGELHAILRRQEDFYPFLKDNREKIEKILTFRIPYYVGPLARGNSRFAWMTRKSEETITPWNFEEVVDKGASAQSFIERMTNFDKNLPNEKVLPKHSLLYEYFTVYNELTKVKYVTEGMRKPAFLSGEQKKAIVDLLFKTNRKVTVKQLKEDYFKKIECFDSVEISGVEDRFNASLGTYHDLLKIIKDKDFLDNEENEDILEDIVLTLTLFEDREMIEERLKTYAHLFDDKVMKQLKRRRYTGWGRLSRKLINGIRDKQSGKTILDFLKSDGFANRNFMQLIHDDSLTFKEDIQKAQVSGQGDSLHEHIANLAGSPAIKKGILQTVKVVDELVKVMGRHKPENIVIEMARENQTTQKGQKNSRERMKRIEEGIKELGSQILKEHPVENTQLQNEKLYLYYLQNGRDMYVDQELDINRLSDYDVDHIVPQSFLKDDSIDNKVLTRSDKARGKSDNVPSEEVVKKMKNYWRQLLNAKLITQRKFDNLTKAERGGLSELDKAGFIKRQLVETRQITKHVAQILDSRMNTKYDENDKLIREVKVITLKSKLVSDFRKDFQFYKVREINNYHHAHDAYLNAVVGTALIKKYPKLESEFVYGDYKVYDVRKMIAKSEQEIGKATAKYFFYSNIMNFFKTEITLANGEIRKRPLIETNGETGEIVWDKGRDFATVRKVLSMPQVNIVKKTEVQTGGFSKESILPKRNSDKLIARKKDWDPKKYGGFDSPTVAYSVLVVAKVEKGKSKKLKSVKELLGITIMERSSFEKNPIDFLEAKGYKEVKKDLIIKLPKYSLFELENGRKRMLASAGELQKGNELALPSKYVNFLYLASHYEKLKGSPEDNEQKQLFVEQHKHYLDEIIEQISEFSKRVILADANLDKVLSAYNKHRDKPIREQAENIIHLFTLTNLGAPAAFKYFDTTIDRKRYTSTKEVLDATLIHQSITGLYETRIDLSQLGGDGGGSSGGGGGLDDEYRLYSPLVKPDQNIQFWLEQFPQAWAETAGMGLAKQVPPQVIQLKASATPVSVRQYPLSKEAQEGIRPHVQRLIQQGILVPVQSPWNTPLLPVRKPGTNDYRPVQDLREVNKRVQDIHPTVPNPYNLLCALPPQRSWYTVLDLKDAFFCLRLHPTSQPLFAFEWRDPGTGRTGQLTWTRLPQGFKNSPTIFNEALHRDLANFRIQHPQVTLLQYVDDLLLAGATKQDCLEGTKALLLELSDLGYRASAKKAQICRREVTYLGYSLRDGQRWLTEARKKTVVQIPAPTTAKQVREFLGKAGFCRLFIPGFATLAAPLYPLTKPKGEFSWAPEHQKAFDAIKKALLSAPALALPDVTKPFTLYVDERKGVARGVLTQTLGPWRRPVAYLSKKLDPVASGWPVCLKAIAAVAILVKDADKLTLGQNITVIAPHALENIVRQPPDRWMTNARMTHYQSLLLTERVTFAPPAALNPATLLPEETDEPVTHDCHQLLIEETGVRKDLTDIPLTGEVLTWFTDGSSYVVEGKRMAGAAVVDGTRTIWASSLPEGTSAQKAELMALTQALRLAEGKSINIYTDSRYAFATAHVHGAIYKQRGWLTSAGREIKNKEEILSLLEALHLPKRLAIIHCPGHQKAKDPISRGNQMADRVAKQAAQGVNLLPAGKRTADGSEFEKRTADGSEFESPKKKAKVE

SEQ ID NO: 82 - protein, 2086 aa, synthetic construct
MPAAKRVKLDGGDKKYSIGLDIGTNSVGWAVITDEYKVPSKKFKVLGNTDRHSIKKNLIGALLFDSGETAEATRLKRTARRRYTRRKNRICYLQEIFSNEMAKVDDSFFHRLEESFLVEEDKKHERHPIFGNIVDEVAYHEKYPTIYHLRKKLVDSTDKADLRLIYLALAHMIKFRGHFLIEGDLNPDNSDVDKLFIQLVQTYNQLFEENPINASGVDAKAILSARLSKSRRLENLIAQLPGEKKNGLFGNLIALSLGLTPNFKSNFDLAEDAKLQLSKDTYDDDLDNLLAQIGDQYADLFLAAKNLSDAILLSDILRVNTEITKAPLSASMIKRYDEHHQDLTLLKALVRQQLPEKYKEIFFDQSKNGYAGYIDGGASQEEFYKFIKPILEKMDGTEELLVKLNREDLLRKQRTFDNGSIPHQIHLGELHAILRRQEDFYPFLKDNREKIEKILTFRIPYYVGPLARGNSRFAWMTRKSEETITPWNFEEVVDKGASAQSFIERMTNFDKNLPNEKVLPKHSLLYEYFTVYNELTKVKYVTEGMRKPAFLSGEQKKAIVDLLFKTNRKVTVKQLKEDYFKKIECFDSVEISGVEDRFNASLGTYHDLLKIIKDKDFLDNEENEDILEDIVLTLTLFEDREMIEERLKTYAHLFDDKVMKQLKRRRYTGWGRLSRKLINGIRDKQSGKTILDFLKSDGFANRNFMQLIHDDSLTFKEDIQKAQVSGQGDSLHEHIANLAGSPAIKKGILQTVKVVDELVKVMGRHKPENIVIEMARENQTTQKGQKNSRERMKRIEEGIKELGSQILKEHPVENTQLQNEKLYLYYLQNGRDMYVDQELDINRLSDYDVDHIVPQSFLKDDSIDNKVLTRSDKARGKSDNVPSEEVVKKMKNYWRQLLNAKLITQRKFDNLTKAERGGLSELDKAGFIKRQLVETRQITKHVAQILDSRMNTKYDENDKLIREVKVITLKSKLVSDFRKDFQFYKVREINNYHHAHDAYLNAVVGTALIKKYPKLESEFVYGDYKVYDVRKMIAKSEQEIGKATAKYFFYSNIMNFFKTEITLANGEIRKRPLIETNGETGEIVWDKGRDFATVRKVLSMPQVNIVKKTEVQTGGFSKESILPKRNSDKLIARKKDWDPKKYGGFDSPTVAYSVLVVAKVEKGKSKKLKSVKELLGITIMERSSFEKNPIDFLEAKGYKEVKKDLIIKLPKYSLFELENGRKRMLASAGELQKGNELALPSKYVNFLYLASHYEKLKGSPEDNEQKQLFVEQHKHYLDEIIEQISEFSKRVILADANLDKVLSAYNKHRDKPIREQAENIIHLFTLTNLGAPAAFKYFDTTIDRKRYTSTKEVLDATLIHQSITGLYETRIDLSQLGGDGGPAPGSSGGSGGLDDEYRLYSPLVKPDQNIQFWLEQFPQAWAETAGMGLAKQVPPQVIQLKASATPVSVRQYPLSKEAQEGIRPHVQRLIQQGILVPVQSPWNTPLLPVRKPGTNDYRPVQDLREVNKRVQDIHPTVPNPYNLLCALPPQRSWYTVLDLKDAFFCLRLHPTSQPLFAFEWRDPGTGRTGQLTWTRLPQGFKNSPTIFNEALHRDLANFRIQHPQVTLLQYVDDLLLAGATKQDCLEGTKALLLELSDLGYRASAKKAQICRREVTYLGYSLRDGQRWLTEARKKTVVQIPAPTTAKQVREFLGKAGFCRLFIPGFATLAAPLYPLTKPKGEFSWAPEHQKAFDAIKKALLSAPALALPDVTKPFTLYVDERKGVARGVLTQTLGPWRRPVAYLSKKLDPVASGWPVCLKAIAAVAILVKDADKLTLGQNITVIAPHALENIVRQPPDRWMTNARMTHYQSLLLTERVTFAPPAALNPATLLPEETDEPVTHDCHQLLIEETGVRKDLTDIPLTGEVLTWFTDGSSYVVEGKRMAGAAVVDGTRTIWASSLPEGTSAQKAELMALTQALRLAEGKSINIYTDSRYAFATAHVHGAIYKQRGWLTSAGREIKNKEEILSLLEALHLPKRLAIIHCPGHQKAKDPISRGNQMADRVAKQAAQGVNLLPAGKRTADGSEFEKRTADGSEFESPKKKAKVE

SEQ ID NO: 83 - protein, 2088 aa, synthetic construct
MPAAKRVKLDGGDKKYSIGLDIGTNSVGWAVITDEYKVPSKKFKVLGNTDRHSIKKNLIGALLFDSGETAEATRLKRTARRRYTRRKNRICYLQEIFSNEMAKVDDSFFHRLEESFLVEEDKKHERHPIFGNIVDEVAYHEKYPTIYHLRKKLVDSTDKADLRLIYLALAHMIKFRGHFLIEGDLNPDNSDVDKLFIQLVQTYNQLFEENPINASGVDAKAILSARLSKSRRLENLIAQLPGEKKNGLFGNLIALSLGLTPNFKSNFDLAEDAKLQLSKDTYDDDLDNLLAQIGDQYADLFLAAKNLSDAILLSDILRVNTEITKAPLSASMIKRYDEHHQDLTLLKALVRQQLPEKYKEIFFDQSKNGYAGYIDGGASQEEFYKFIKPILEKMDGTEELLVKLNREDLLRKQRTFDNGSIPHQIHLGELHAILRRQEDFYPFLKDNREKIEKILTFRIPYYVGPLARGNSRFAWMTRKSEETITPWNFEEVVDKGASAQSFIERMTNFDKNLPNEKVLPKHSLLYEYFTVYNELTKVKYVTEGMRKPAFLSGEQKKAIVDLLFKTNRKVTVKQLKEDYFKKIECFDSVEISGVEDRFNASLGTYHDLLKIIKDKDFLDNEENEDILEDIVLTLTLFEDREMIEERLKTYAHLFDDKVMKQLKRRRYTGWGRLSRKLINGIRDKQSGKTILDFLKSDGFANRNFMQLIHDDSLTFKEDIQKAQVSGQGDSLHEHIANLAGSPAIKKGILQTVKVVDELVKVMGRHKPENIVIEMARENQTTQKGQKNSRERMKRIEEGIKELGSQILKEHPVENTQLQNEKLYLYYLQNGRDMYVDQELDINRLSDYDVDHIVPQSFLKDDSIDNKVLTRSDKARGKSDNVPSEEVVKKMKNYWRQLLNAKLITQRKFDNLTKAERGGLSELDKAGFIKRQLVETRQITKHVAQILDSRMNTKYDENDKLIREVKVITLKSKLVSDFRKDFQFYKVREINNYHHAHDAYLNAVVGTALIKKYPKLESEFVYGDYKVYDVRKMIAKSEQEIGKATAKYFFYSNIMNFFKTEITLANGEIRKRPLIETNGETGEIVWDKGRDFATVRKVLSMPQVNIVKKTEVQTGGFSKESILPKRNSDKLIARKKDWDPKKYGGFDSPTVAYSVLVVAKVEKGKSKKLKSVKELLGITIMERSSFEKNPIDFLEAKGYKEVKKDLIIKLPKYSLFELENGRKRMLASAGELQKGNELALPSKYVNFLYLASHYEKLKGSPEDNEQKQLFVEQHKHYLDEIIEQISEFSKRVILADANLDKVLSAYNKHRDKPIREQAENIIHLFTLTNLGAPAAFKYFDTTIDRKRYTSTKEVLDATLIHQSITGLYETRIDLSQLGGDGGEAAAKGSSGGSGGLDDEYRLYSPLVKPDQNIQFWLEQFPQAWAETAGMGLAKQVPPQVIQLKASATPVSVRQYPLSKEAQEGIRPHVQRLIQQGILVPVQSPWNTPLLPVRKPGTNDYRPVQDLREVNKRVQDIHPTVPNPYNLLCALPPQRSWYTVLDLKDAFFCLRLHPTSQPLFAFEWRDPGTGRTGQLTWTRLPQGFKNSPTIFNEALHRDLANFRIQHPQVTLLQYVDDLLLAGATKQDCLEGTKALLLELSDLGYRASAKKAQICRREVTYLGYSLRDGQRWLTEARKKTVVQIPAPTTAKQVREFLGKAGFCRLFIPGFATLAAPLYPLTKPKGEFSWAPEHQKAFDAIKKALLSAPALALPDVTKPFTLYVDERKGVARGVLTQTLGPWRRPVAYLSKKLDPVASGWPVCLKAIAAVAILVKDADKLTLGQNITVIAPHALENIVRQPPDRWMTNARMTHYQSLLLTERVTFAPPAALNPATLLPEETDEPVTHDCHQLLIEETGVRKDLTDIPLTGEVLTWFTDGSSYVVEGKRMAGAAVVDGTRTIWASSLPEGTSAQKAELMALTQALRLAEGKSINIYTDSRYAFATAHVHGAIYKQRGWLTSAGREIKNKEEILSLLEALHLPKRLAIIHCPGHQKAKDPISRGNQMADRVAKQAAQGVNLLPAGKRTADGSEFEKRTADGSEFESPKKKAKVE

SEQ ID NO: 84 - protein, 2082 aa, synthetic construct
MPAAKRVKLDGGDKKYSIGLDIGTNSVGWAVITDEYKVPSKKFKVLGNTDRHSIKKNLIGALLFDSGETAEATRLKRTARRRYTRRKNRICYLQEIFSNEMAKVDDSFFHRLEESFLVEEDKKHERHPIFGNIVDEVAYHEKYPTIYHLRKKLVDSTDKADLRLIYLALAHMIKFRGHFLIEGDLNPDNSDVDKLFIQLVQTYNQLFEENPINASGVDAKAILSARLSKSRRLENLIAQLPGEKKNGLFGNLIALSLGLTPNFKSNFDLAEDAKLQLSKDTYDDDLDNLLAQIGDQYADLFLAAKNLSDAILLSDILRVNTEITKAPLSASMIKRYDEHHQDLTLLKALVRQQLPEKYKEIFFDQSKNGYAGYIDGGASQEEFYKFIKPILEKMDGTEELLVKLNREDLLRKQRTFDNGSIPHQIHLGELHAILRRQEDFYPFLKDNREKIEKILTFRIPYYVGPLARGNSRFAWMTRKSEETITPWNFEEVVDKGASAQSFIERMTNFDKNLPNEKVLPKHSLLYEYFTVYNELTKVKYVTEGMRKPAFLSGEQKKAIVDLLFKTNRKVTVKQLKEDYFKKIECFDSVEISGVEDRFNASLGTYHDLLKIIKDKDFLDNEENEDILEDIVLTLTLFEDREMIEERLKTYAHLFDDKVMKQLKRRRYTGWGRLSRKLINGIRDKQSGKTILDFLKSDGFANRNFMQLIHDDSLTFKEDIQKAQVSGQGDSLHEHIANLAGSPAIKKGILQTVKVVDELVKVMGRHKPENIVIEMARENQTTQKGQKNSRERMKRIEEGIKELGSQILKEHPVENTQLQNEKLYLYYLQNGRDMYVDQELDINRLSDYDVDHIVPQSFLKDDSIDNKVLTRSDKARGKSDNVPSEEVVKKMKNYWRQLLNAKLITQRKFDNLTKAERGGLSELDKAGFIKRQLVETRQITKHVAQILDSRMNTKYDENDKLIREVKVITLKSKLVSDFRKDFQFYKVREINNYHHAHDAYLNAVVGTALIKKYPKLESEFVYGDYKVYDVRKMIAKSEQEIGKATAKYFFYSNIMNFFKTEITLANGEIRKRPLIETNGETGEIVWDKGRDFATVRKVLSMPQVNIVKKTEVQTGGFSKESILPKRNSDKLIARKKDWDPKKYGGFDSPTVAYSVLVVAKVEKGKSKKLKSVKELLGITIMERSSFEKNPIDFLEAKGYKEVKKDLIIKLPKYSLFELENGRKRMLASAGELQKGNELALPSKYVNFLYLASHYEKLKGSPEDNEQKQLFVEQHKHYLDEIIEQISEFSKRVILADANLDKVLSAYNKHRDKPIREQAENIIHLFTLTNLGAPAAFKYFDTTIDRKRYTSTKEVLDATLIHQSITGLYETRIDLSQLGGDGGGGGGSGGLDDEYRLYSPLVKPDQNIQFWLEQFPQAWAETAGMGLAKQVPPQVIQLKASATPVSVRQYPLSKEAQEGIRPHVQRLIQQGILVPVQSPWNTPLLPVRKPGTNDYRPVQDLREVNKRVQDIHPTVPNPYNLLCALPPQRSWYTVLDLKDAFFCLRLHPTSQPLFAFEWRDPGTGRTGQLTWTRLPQGFKNSPTIFNEALHRDLANFRIQHPQVTLLQYVDDLLLAGATKQDCLEGTKALLLELSDLGYRASAKKAQICRREVTYLGYSLRDGQRWLTEARKKTVVQIPAPTTAKQVREFLGKAGFCRLFIPGFATLAAPLYPLTKPKGEFSWAPEHQKAFDAIKKALLSAPALALPDVTKPFTLYVDERKGVARGVLTQTLGPWRRPVAYLSKKLDPVASGWPVCLKAIAAVAILVKDADKLTLGQNITVIAPHALENIVRQPPDRWMTNARMTHYQSLLLTERVTFAPPAALNPATLLPEETDEPVTHDCHQLLIEETGVRKDLTDIPLTGEVLTWFTDGSSYVVEGKRMAGAAVVDGTRTIWASSLPEGTSAQKAELMALTQALRLAEGKSINIYTDSRYAFATAHVHGAIYKQRGWLTSAGREIKNKEEILSLLEALHLPKRLAIIHCPGHQKAKDPISRGNQMADRVAKQAAQGVNLLPAGKRTADGSEFEKRTADGSEFESPKKKAKVE

SEQ ID NO: 85 - protein, 2086 aa, synthetic construct
MPAAKRVKLDGGDKKYSIGLDIGTNSVGWAVITDEYKVPSKKFKVLGNTDRHSIKKNLIGALLFDSGETAEATRLKRTARRRYTRRKNRICYLQEIFSNEMAKVDDSFFHRLEESFLVEEDKKHERHPIFGNIVDEVAYHEKYPTIYHLRKKLVDSTDKADLRLIYLALAHMIKFRGHFLIEGDLNPDNSDVDKLFIQLVQTYNQLFEENPINASGVDAKAILSARLSKSRRLENLIAQLPGEKKNGLFGNLIALSLGLTPNFKSNFDLAEDAKLQLSKDTYDDDLDNLLAQIGDQYADLFLAAKNLSDAILLSDILRVNTEITKAPLSASMIKRYDEHHQDLTLLKALVRQQLPEKYKEIFFDQSKNGYAGYIDGGASQEEFYKFIKPILEKMDGTEELLVKLNREDLLRKQRTFDNGSIPHQIHLGELHAILRRQEDFYPFLKDNREKIEKILTFRIPYYVGPLARGNSRFAWMTRKSEETITPWNFEEVVDKGASAQSFIERMTNFDKNLPNEKVLPKHSLLYEYFTVYNELTKVKYVTEGMRKPAFLSGEQKKAIVDLLFKTNRKVTVKQLKEDYFKKIECFDSVEISGVEDRFNASLGTYHDLLKIIKDKDFLDNEENEDILEDIVLTLTLFEDREMIEERLKTYAHLFDDKVMKQLKRRRYTGWGRLSRKLINGIRDKQSGKTILDFLKSDGFANRNFMQLIHDDSLTFKEDIQKAQVSGQGDSLHEHIANLAGSPAIKKGILQTVKVVDELVKVMGRHKPENIVIEMARENQTTQKGQKNSRERMKRIEEGIKELGSQILKEHPVENTQLQNEKLYLYYLQNGRDMYVDQELDINRLSDYDVDHIVPQSFLKDDSIDNKVLTRSDKARGKSDNVPSEEVVKKMKNYWRQLLNAKLITQRKFDNLTKAERGGLSELDKAGFIKRQLVETRQITKHVAQILDSRMNTKYDENDKLIREVKVITLKSKLVSDFRKDFQFYKVREINNYHHAHDAYLNAVVGTALIKKYPKLESEFVYGDYKVYDVRKMIAKSEQEIGKATAKYFFYSNIMNFFKTEITLANGEIRKRPLIETNGETGEIVWDKGRDFATVRKVLSMPQVNIVKKTEVQTGGFSKESILPKRNSDKLIARKKDWDPKKYGGFDSPTVAYSVLVVAKVEKGKSKKLKSVKELLGITIMERSSFEKNPIDFLEAKGYKEVKKDLIIKLPKYSLFELENGRKRMLASAGELQKGNELALPSKYVNFLYLASHYEKLKGSPEDNEQKQLFVEQHKHYLDEIIEQISEFSKRVILADANLDKVLSAYNKHRDKPIREQAENIIHLFTLTNLGAPAAFKYFDTTIDRKRYTSTKEVLDATLIHQSITGLYETRIDLSQLGGDGGGSSGGSGGGGGLDDEYRLYSPLVKPDQNIQFWLEQFPQAWAETAGMGLAKQVPPQVIQLKASATPVSVRQYPLSKEAQEGIRPHVQRLIQQGILVPVQSPWNTPLLPVRKPGTNDYRPVQDLREVNKRVQDIHPTVPNPYNLLCALPPQRSWYTVLDLKDAFFCLRLHPTSQPLFAFEWRDPGTGRTGQLTWTRLPQGFKNSPTIFNEALHRDLANFRIQHPQVTLLQYVDDLLLAGATKQDCLEGTKALLLELSDLGYRASAKKAQICRREVTYLGYSLRDGQRWLTEARKKTVVQIPAPTTAKQVREFLGKAGFCRLFIPGFATLAAPLYPLTKPKGEFSWAPEHQKAFDAIKKALLSAPALALPDVTKPFTLYVDERKGVARGVLTQTLGPWRRPVAYLSKKLDPVASGWPVCLKAIAAVAILVKDADKLTLGQNITVIAPHALENIVRQPPDRWMTNARMTHYQSLLLTERVTFAPPAALNPATLLPEETDEPVTHDCHQLLIEETGVRKDLTDIPLTGEVLTWFTDGSSYVVEGKRMAGAAVVDGTRTIWASSLPEGTSAQKAELMALTQALRLAEGKSINIYTDSRYAFATAHVHGAIYKQRGWLTSAGREIKNKEEILSLLEALHLPKRLAIIHCPGHQKAKDPISRGNQMADRVAKQAAQGVNLLPAGKRTADGSEFEKRTADGSEFESPKKKAKVE

SEQ ID NO: 86 - protein, 2088 aa, synthetic construct
MPAAKRVKLDGGDKKYSIGLDIGTNSVGWAVITDEYKVPSKKFKVLGNTDRHSIKKNLIGALLFDSGETAEATRLKRTARRRYTRRKNRICYLQEIFSNEMAKVDDSFFHRLEESFLVEEDKKHERHPIFGNIVDEVAYHEKYPTIYHLRKKLVDSTDKADLRLIYLALAHMIKFRGHFLIEGDLNPDNSDVDKLFIQLVQTYNQLFEENPINASGVDAKAILSARLSKSRRLENLIAQLPGEKKNGLFGNLIALSLGLTPNFKSNFDLAEDAKLQLSKDTYDDDLDNLLAQIGDQYADLFLAAKNLSDAILLSDILRVNTEITKAPLSASMIKRYDEHHQDLTLLKALVRQQLPEKYKEIFFDQSKNGYAGYIDGGASQEEFYKFIKPILEKMDGTEELLVKLNREDLLRKQRTFDNGSIPHQIHLGELHAILRRQEDFYPFLKDNREKIEKILTFRIPYYVGPLARGNSRFAWMTRKSEETITPWNFEEVVDKGASAQSFIERMTNFDKNLPNEKVLPKHSLLYEYFTVYNELTKVKYVTEGMRKPAFLSGEQKKAIVDLLFKTNRKVTVKQLKEDYFKKIECFDSVEISGVEDRFNASLGTYHDLLKIIKDKDFLDNEENEDILEDIVLTLTLFEDREMIEERLKTYAHLFDDKVMKQLKRRRYTGWGRLSRKLINGIRDKQSGKTILDFLKSDGFANRNFMQLIHDDSLTFKEDIQKAQVSGQGDSLHEHIANLAGSPAIKKGILQTVKVVDELVKVMGRHKPENIVIEMARENQTTQKGQKNSRERMKRIEEGIKELGSQILKEHPVENTQLQNEKLYLYYLQNGRDMYVDQELDINRLSDYDVDHIVPQSFLKDDSIDNKVLTRSDKARGKSDNVPSEEVVKKMKNYWRQLLNAKLITQRKFDNLTKAERGGLSELDKAGFIKRQLVETRQITKHVAQILDSRMNTKYDENDKLIREVKVITLKSKLVSDFRKDFQFYKVREINNYHHAHDAYLNAVVGTALIKKYPKLESEFVYGDYKVYDVRKMIAKSEQEIGKATAKYFFYSNIMNFFKTEITLANGEIRKRPLIETNGETGEIVWDKGRDFATVRKVLSMPQVNIVKKTEVQTGGFSKESILPKRNSDKLIARKKDWDPKKYGGFDSPTVAYSVLVVAKVEKGKSKKLKSVKELLGITIMERSSFEKNPIDFLEAKGYKEVKKDLIIKLPKYSLFELENGRKRMLASAGELQKGNELALPSKYVNFLYLASHYEKLKGSPEDNEQKQLFVEQHKHYLDEIIEQISEFSKRVILADANLDKVLSAYNKHRDKPIREQAENIIHLFTLTNLGAPAAFKYFDTTIDRKRYTSTKEVLDATLIHQSITGLYETRIDLSQLGGDGGGSSPAPEAAAKGGLDDEYRLYSPLVKPDQNIQFWLEQFPQAWAETAGMGLAKQVPPQVIQLKASATPVSVRQYPLSKEAQEGIRPHVQRLIQQGILVPVQSPWNTPLLPVRKPGTNDYRPVQDLREVNKRVQDIHPTVPNPYNLLCALPPQRSWYTVLDLKDAFFCLRLHPTSQPLFAFEWRDPGTGRTGQLTWTRLPQGFKNSPTIFNEALHRDLANFRIQHPQVTLLQYVDDLLLAGATKQDCLEGTKALLLELSDLGYRASAKKAQICRREVTYLGYSLRDGQRWLTEARKKTVVQIPAPTTAKQVREFLGKAGFCRLFIPGFATLAAPLYPLTKPKGEFSWAPEHQKAFDAIKKALLSAPALALPDVTKPFTLYVDERKGVARGVLTQTLGPWRRPVAYLSKKLDPVASGWPVCLKAIAAVAILVKDADKLTLGQNITVIAPHALENIVRQPPDRWMTNARMTHYQSLLLTERVTFAPPAALNPATLLPEETDEPVTHDCHQLLIEETGVRKDLTDIPLTGEVLTWFTDGSSYVVEGKRMAGAAVVDGTRTIWASSLPEGTSAQKAELMALTQALRLAEGKSINIYTDSRYAFATAHVHGAIYKQRGWLTSAGREIKNKEEILSLLEALHLPKRLAIIHCPGHQKAKDPISRGNQMADRVAKQAAQGVNLLPAGKRTADGSEFEKRTADGSEFESPKKKAKVE

SEQ ID NO: 87 - protein, 2083 aa, synthetic construct
MPAAKRVKLDGGDKKYSIGLDIGTNSVGWAVITDEYKVPSKKFKVLGNTDRHSIKKNLIGALLFDSGETAEATRLKRTARRRYTRRKNRICYLQEIFSNEMAKVDDSFFHRLEESFLVEEDKKHERHPIFGNIVDEVAYHEKYPTIYHLRKKLVDSTDKADLRLIYLALAHMIKFRGHFLIEGDLNPDNSDVDKLFIQLVQTYNQLFEENPINASGVDAKAILSARLSKSRRLENLIAQLPGEKKNGLFGNLIALSLGLTPNFKSNFDLAEDAKLQLSKDTYDDDLDNLLAQIGDQYADLFLAAKNLSDAILLSDILRVNTEITKAPLSASMIKRYDEHHQDLTLLKALVRQQLPEKYKEIFFDQSKNGYAGYIDGGASQEEFYKFIKPILEKMDGTEELLVKLNREDLLRKQRTFDNGSIPHQIHLGELHAILRRQEDFYPFLKDNREKIEKILTFRIPYYVGPLARGNSRFAWMTRKSEETITPWNFEEVVDKGASAQSFIERMTNFDKNLPNEKVLPKHSLLYEYFTVYNELTKVKYVTEGMRKPAFLSGEQKKAIVDLLFKTNRKVTVKQLKEDYFKKIECFDSVEISGVEDRFNASLGTYHDLLKIIKDKDFLDNEENEDILEDIVLTLTLFEDREMIEERLKTYAHLFDDKVMKQLKRRRYTGWGRLSRKLINGIRDKQSGKTILDFLKSDGFANRNFMQLIHDDSLTFKEDIQKAQVSGQGDSLHEHIANLAGSPAIKKGILQTVKVVDELVKVMGRHKPENIVIEMARENQTTQKGQKNSRERMKRIEEGIKELGSQILKEHPVENTQLQNEKLYLYYLQNGRDMYVDQELDINRLSDYDVDHIVPQSFLKDDSIDNKVLTRSDKARGKSDNVPSEEVVKKMKNYWRQLLNAKLITQRKFDNLTKAERGGLSELDKAGFIKRQLVETRQITKHVAQILDSRMNTKYDENDKLIREVKVITLKSKLVSDFRKDFQFYKVREINNYHHAHDAYLNAVVGTALIKKYPKLESEFVYGDYKVYDVRKMIAKSEQEIGKATAKYFFYSNIMNFFKTEITLANGEIRKRPLIETNGETGEIVWDKGRDFATVRKVLSMPQVNIVKKTEVQTGGFSKESILPKRNSDKLIARKKDWDPKKYGGFDSPTVAYSVLVVAKVEKGKSKKLKSVKELLGITIMERSSFEKNPIDFLEAKGYKEVKKDLIIKLPKYSLFELENGRKRMLASAGELQKGNELALPSKYVNFLYLASHYEKLKGSPEDNEQKQLFVEQHKHYLDEIIEQISEFSKRVILADANLDKVLSAYNKHRDKPIREQAENIIHLFTLTNLGAPAAFKYFDTTIDRKRYTSTKEVLDATLIHQSITGLYETRIDLSQLGGDGGGGGGGSGGLDDEYRLYSPLVKPDQNIQFWLEQFPQAWAETAGMGLAKQVPPQVIQLKASATPVSVRQYPLSKEAQEGIRPHVQRLIQQGILVPVQSPWNTPLLPVRKPGTNDYRPVQDLREVNKRVQDIHPTVPNPYNLLCALPPQRSWYTVLDLKDAFFCLRLHPTSQPLFAFEWRDPGTGRTGQLTWTRLPQGFKNSPTIFNEALHRDLANFRIQHPQVTLLQYVDDLLLAGATKQDCLEGTKALLLELSDLGYRASAKKAQICRREVTYLGYSLRDGQRWLTEARKKTVVQIPAPTTAKQVREFLGKAGFCRLFIPGFATLAAPLYPLTKPKGEFSWAPEHQKAFDAIKKALLSAPALALPDVTKPFTLYVDERKGVARGVLTQTLGPWRRPVAYLSKKLDPVASGWPVCLKAIAAVAILVKDADKLTLGQNITVIAPHALENIVRQPPDRWMTNARMTHYQSLLLTERVTFAPPAALNPATLLPEETDEPVTHDCHQLLIEETGVRKDLTDIPLTGEVLTWFTDGSSYVVEGKRMAGAAVVDGTRTIWASSLPEGTSAQKAELMALTQALRLAEGKSINIYTDSRYAFATAHVHGAIYKQRGWLTSAGREIKNKEEILSLLEALHLPKRLAIIHCPGHQKAKDPISRGNQMADRVAKQAAQGVNLLPAGKRTADGSEFEKRTADGSEFESPKKKAKVE

SEQ ID NO: 88 - protein, 2083 aa, synthetic construct
MPAAKRVKLDGGDKKYSIGLDIGTNSVGWAVITDEYKVPSKKFKVLGNTDRHSIKKNLIGALLFDSGETAEATRLKRTARRRYTRRKNRICYLQEIFSNEMAKVDDSFFHRLEESFLVEEDKKHERHPIFGNIVDEVAYHEKYPTIYHLRKKLVDSTDKADLRLIYLALAHMIKFRGHFLIEGDLNPDNSDVDKLFIQLVQTYNQLFEENPINASGVDAKAILSARLSKSRRLENLIAQLPGEKKNGLFGNLIALSLGLTPNFKSNFDLAEDAKLQLSKDTYDDDLDNLLAQIGDQYADLFLAAKNLSDAILLSDILRVNTEITKAPLSASMIKRYDEHHQDLTLLKALVRQQLPEKYKEIFFDQSKNGYAGYIDGGASQEEFYKFIKPILEKMDGTEELLVKLNREDLLRKQRTFDNGSIPHQIHLGELHAILRRQEDFYPFLKDNREKIEKILTFRIPYYVGPLARGNSRFAWMTRKSEETITPWNFEEVVDKGASAQSFIERMTNFDKNLPNEKVLPKHSLLYEYFTVYNELTKVKYVTEGMRKPAFLSGEQKKAIVDLLFKTNRKVTVKQLKEDYFKKIECFDSVEISGVEDRFNASLGTYHDLLKIIKDKDFLDNEENEDILEDIVLTLTLFEDREMIEERLKTYAHLFDDKVMKQLKRRRYTGWGRLSRKLINGIRDKQSGKTILDFLKSDGFANRNFMQLIHDDSLTFKEDIQKAQVSGQGDSLHEHIANLAGSPAIKKGILQTVKVVDELVKVMGRHKPENIVIEMARENQTTQKGQKNSRERMKRIEEGIKELGSQILKEHPVENTQLQNEKLYLYYLQNGRDMYVDQELDINRLSDYDVDHIVPQSFLKDDSIDNKVLTRSDKARGKSDNVPSEEVVKKMKNYWRQLLNAKLITQRKFDNLTKAERGGLSELDKAGFIKRQLVETRQITKHVAQILDSRMNTKYDENDKLIREVKVITLKSKLVSDFRKDFQFYKVREINNYHHAHDAYLNAVVGTALIKKYPKLESEFVYGDYKVYDVRKMIAKSEQEIGKATAKYFFYSNIMNFFKTEITLANGEIRKRPLIETNGETGEIVWDKGRDFATVRKVLSMPQVNIVKKTEVQTGGFSKESILPKRNSDKLIARKKDWDPKKYGGFDSPTVAYSVLVVAKVEKGKSKKLKSVKELLGITIMERSSFEKNPIDFLEAKGYKEVKKDLIIKLPKYSLFELENGRKRMLASAGELQKGNELALPSKYVNFLYLASHYEKLKGSPEDNEQKQLFVEQHKHYLDEIIEQISEFSKRVILADANLDKVLSAYNKHRDKPIREQAENIIHLFTLTNLGAPAAFKYFDTTIDRKRYTSTKEVLDATLIHQSITGLYETRIDLSQLGGDGGGSSGGSGGLDDEYRLYSPLVKPDQNIQFWLEQFPQAWAETAGMGLAKQVPPQVIQLKASATPVSVRQYPLSKEAQEGIRPHVQRLIQQGILVPVQSPWNTPLLPVRKPGTNDYRPVQDLREVNKRVQDIHPTVPNPYNLLCALPPQRSWYTVLDLKDAFFCLRLHPTSQPLFAFEWRDPGTGRTGQLTWTRLPQGFKNSPTIFNEALHRDLANFRIQHPQVTLLQYVDDLLLAGATKQDCLEGTKALLLELSDLGYRASAKKAQICRREVTYLGYSLRDGQRWLTEARKKTVVQIPAPTTAKQVREFLGKAGFCRLFIPGFATLAAPLYPLTKPKGEFSWAPEHQKAFDAIKKALLSAPALALPDVTKPFTLYVDERKGVARGVLTQTLGPWRRPVAYLSKKLDPVASGWPVCLKAIAAVAILVKDADKLTLGQNITVIAPHALENIVRQPPDRWMTNARMTHYQSLLLTERVTFAPPAALNPATLLPEETDEPVTHDCHQLLIEETGVRKDLTDIPLTGEVLTWFTDGSSYVVEGKRMAGAAVVDGTRTIWASSLPEGTSAQKAELMALTQALRLAEGKSINIYTDSRYAFATAHVHGAIYKQRGWLTSAGREIKNKEEILSLLEALHLPKRLAIIHCPGHQKAKDPISRGNQMADRVAKQAAQGVNLLPAGKRTADGSEFEKRTADGSEFESPKKKAKVE

SEQ ID NO: 89 - protein, 2086 aa, synthetic construct
MPAAKRVKLDGGDKKYSIGLDIGTNSVGWAVITDEYKVPSKKFKVLGNTDRHSIKKNLIGALLFDSGETAEATRLKRTARRRYTRRKNRICYLQEIFSNEMAKVDDSFFHRLEESFLVEEDKKHERHPIFGNIVDEVAYHEKYPTIYHLRKKLVDSTDKADLRLIYLALAHMIKFRGHFLIEGDLNPDNSDVDKLFIQLVQTYNQLFEENPINASGVDAKAILSARLSKSRRLENLIAQLPGEKKNGLFGNLIALSLGLTPNFKSNFDLAEDAKLQLSKDTYDDDLDNLLAQIGDQYADLFLAAKNLSDAILLSDILRVNTEITKAPLSASMIKRYDEHHQDLTLLKALVRQQLPEKYKEIFFDQSKNGYAGYIDGGASQEEFYKFIKPILEKMDGTEELLVKLNREDLLRKQRTFDNGSIPHQIHLGELHAILRRQEDFYPFLKDNREKIEKILTFRIPYYVGPLARGNSRFAWMTRKSEETITPWNFEEVVDKGASAQSFIERMTNFDKNLPNEKVLPKHSLLYEYFTVYNELTKVKYVTEGMRKPAFLSGEQKKAIVDLLFKTNRKVTVKQLKEDYFKKIECFDSVEISGVEDRFNASLGTYHDLLKIIKDKDFLDNEENEDILEDIVLTLTLFEDREMIEERLKTYAHLFDDKVMKQLKRRRYTGWGRLSRKLINGIRDKQSGKTILDFLKSDGFANRNFMQLIHDDSLTFKEDIQKAQVSGQGDSLHEHIANLAGSPAIKKGILQTVKVVDELVKVMGRHKPENIVIEMARENQTTQKGQKNSRERMKRIEEGIKELGSQILKEHPVENTQLQNEKLYLYYLQNGRDMYVDQELDINRLSDYDVDHIVPQSFLKDDSIDNKVLTRSDKARGKSDNVPSEEVVKKMKNYWRQLLNAKLITQRKFDNLTKAERGGLSELDKAGFIKRQLVETRQITKHVAQILDSRMNTKYDENDKLIREVKVITLKSKLVSDFRKDFQFYKVREINNYHHAHDAYLNAVVGTALIKKYPKLESEFVYGDYKVYDVRKMIAKSEQEIGKATAKYFFYSNIMNFFKTEITLANGEIRKRPLIETNGETGEIVWDKGRDFATVRKVLSMPQVNIVKKTEVQTGGFSKESILPKRNSDKLIARKKDWDPKKYGGFDSPTVAYSVLVVAKVEKGKSKKLKSVKELLGITIMERSSFEKNPIDFLEAKGYKEVKKDLIIKLPKYSLFELENGRKRMLASAGELQKGNELALPSKYVNFLYLASHYEKLKGSPEDNEQKQLFVEQHKHYLDEIIEQISEFSKRVILADANLDKVLSAYNKHRDKPIREQAENIIHLFTLTNLGAPAAFKYFDTTIDRKRYTSTKEVLDATLIHQSITGLYETRIDLSQLGGDGGPAPGSSGGGGGLDDEYRLYSPLVKPDQNIQFWLEQFPQAWAETAGMGLAKQVPPQVIQLKASATPVSVRQYPLSKEAQEGIRPHVQRLIQQGILVPVQSPWNTPLLPVRKPGTNDYRPVQDLREVNKRVQDIHPTVPNPYNLLCALPPQRSWYTVLDLKDAFFCLRLHPTSQPLFAFEWRDPGTGRTGQLTWTRLPQGFKNSPTIFNEALHRDLANFRIQHPQVTLLQYVDDLLLAGATKQDCLEGTKALLLELSDLGYRASAKKAQICRREVTYLGYSLRDGQRWLTEARKKTVVQIPAPTTAKQVREFLGKAGFCRLFIPGFATLAAPLYPLTKPKGEFSWAPEHQKAFDAIKKALLSAPALALPDVTKPFTLYVDERKGVARGVLTQTLGPWRRPVAYLSKKLDPVASGWPVCLKAIAAVAILVKDADKLTLGQNITVIAPHALENIVRQPPDRWMTNARMTHYQSLLLTERVTFAPPAALNPATLLPEETDEPVTHDCHQLLIEETGVRKDLTDIPLTGEVLTWFTDGSSYVVEGKRMAGAAVVDGTRTIWASSLPEGTSAQKAELMALTQALRLAEGKSINIYTDSRYAFATAHVHGAIYKQRGWLTSAGREIKNKEEILSLLEALHLPKRLAIIHCPGHQKAKDPISRGNQMADRVAKQAAQGVNLLPAGKRTADGSEFEKRTADGSEFESPKKKAKVE

SEQ ID NO: 90 - protein, 2093 aa, synthetic construct
MPAAKRVKLDGGDKKYSIGLDIGTNSVGWAVITDEYKVPSKKFKVLGNTDRHSIKKNLIGALLFDSGETAEATRLKRTARRRYTRRKNRICYLQEIFSNEMAKVDDSFFHRLEESFLVEEDKKHERHPIFGNIVDEVAYHEKYPTIYHLRKKLVDSTDKADLRLIYLALAHMIKFRGHFLIEGDLNPDNSDVDKLFIQLVQTYNQLFEENPINASGVDAKAILSARLSKSRRLENLIAQLPGEKKNGLFGNLIALSLGLTPNFKSNFDLAEDAKLQLSKDTYDDDLDNLLAQIGDQYADLFLAAKNLSDAILLSDILRVNTEITKAPLSASMIKRYDEHHQDLTLLKALVRQQLPEKYKEIFFDQSKNGYAGYIDGGASQEEFYKFIKPILEKMDGTEELLVKLNREDLLRKQRTFDNGSIPHQIHLGELHAILRRQEDFYPFLKDNREKIEKILTFRIPYYVGPLARGNSRFAWMTRKSEETITPWNFEEVVDKGASAQSFIERMTNFDKNLPNEKVLPKHSLLYEYFTVYNELTKVKYVTEGMRKPAFLSGEQKKAIVDLLFKTNRKVTVKQLKEDYFKKIECFDSVEISGVEDRFNASLGTYHDLLKIIKDKDFLDNEENEDILEDIVLTLTLFEDREMIEERLKTYAHLFDDKVMKQLKRRRYTGWGRLSRKLINGIRDKQSGKTILDFLKSDGFANRNFMQLIHDDSLTFKEDIQKAQVSGQGDSLHEHIANLAGSPAIKKGILQTVKVVDELVKVMGRHKPENIVIEMARENQTTQKGQKNSRERMKRIEEGIKELGSQILKEHPVENTQLQNEKLYLYYLQNGRDMYVDQELDINRLSDYDVDHIVPQSFLKDDSIDNKVLTRSDKARGKSDNVPSEEVVKKMKNYWRQLLNAKLITQRKFDNLTKAERGGLSELDKAGFIKRQLVETRQITKHVAQILDSRMNTKYDENDKLIREVKVITLKSKLVSDFRKDFQFYKVREINNYHHAHDAYLNAVVGTALIKKYPKLESEFVYGDYKVYDVRKMIAKSEQEIGKATAKYFFYSNIMNFFKTEITLANGEIRKRPLIETNGETGEIVWDKGRDFATVRKVLSMPQVNIVKKTEVQTGGFSKESILPKRNSDKLIARKKDWDPKKYGGFDSPTVAYSVLVVAKVEKGKSKKLKSVKELLGITIMERSSFEKNPIDFLEAKGYKEVKKDLIIKLPKYSLFELENGRKRMLASAGELQKGNELALPSKYVNFLYLASHYEKLKGSPEDNEQKQLFVEQHKHYLDEIIEQISEFSKRVILADANLDKVLSAYNKHRDKPIREQAENIIHLFTLTNLGAPAAFKYFDTTIDRKRYTSTKEVLDATLIHQSITGLYETRIDLSQLGGDGGSGSETPGTSESATPESGGLDDEYRLYSPLVKPDQNIQFWLEQFPQAWAETAGMGLAKQVPPQVIQLKASATPVSVRQYPLSKEAQEGIRPHVQRLIQQGILVPVQSPWNTPLLPVRKPGTNDYRPVQDLREVNKRVQDIHPTVPNPYNLLCALPPQRSWYTVLDLKDAFFCLRLHPTSQPLFAFEWRDPGTGRTGQLTWTRLPQGFKNSPTIFNEALHRDLANFRIQHPQVTLLQYVDDLLLAGATKQDCLEGTKALLLELSDLGYRASAKKAQICRREVTYLGYSLRDGQRWLTEARKKTVVQIPAPTTAKQVREFLGKAGFCRLFIPGFATLAAPLYPLTKPKGEFSWAPEHQKAFDAIKKALLSAPALALPDVTKPFTLYVDERKGVARGVLTQTLGPWRRPVAYLSKKLDPVASGWPVCLKAIAAVAILVKDADKLTLGQNITVIAPHALENIVRQPPDRWMTNARMTHYQSLLLTERVTFAPPAALNPATLLPEETDEPVTHDCHQLLIEETGVRKDLTDIPLTGEVLTWFTDGSSYVVEGKRMAGAAVVDGTRTIWASSLPEGTSAQKAELMALTQALRLAEGKSINIYTDSRYAFATAHVHGAIYKQRGWLTSAGREIKNKEEILSLLEALHLPKRLAIIHCPGHQKAKDPISRGNQMADRVAKQAAQGVNLLPAGKRTADGSEFEKRTADGSEFESPKKKAKVE

SEQ ID NO: 91 - protein, 2086 aa, synthetic construct
MPAAKRVKLDGGDKKYSIGLDIGTNSVGWAVITDEYKVPSKKFKVLGNTDRHSIKKNLIGALLFDSGETAEATRLKRTARRRYTRRKNRICYLQEIFSNEMAKVDDSFFHRLEESFLVEEDKKHERHPIFGNIVDEVAYHEKYPTIYHLRKKLVDSTDKADLRLIYLALAHMIKFRGHFLIEGDLNPDNSDVDKLFIQLVQTYNQLFEENPINASGVDAKAILSARLSKSRRLENLIAQLPGEKKNGLFGNLIALSLGLTPNFKSNFDLAEDAKLQLSKDTYDDDLDNLLAQIGDQYADLFLAAKNLSDAILLSDILRVNTEITKAPLSASMIKRYDEHHQDLTLLKALVRQQLPEKYKEIFFDQSKNGYAGYIDGGASQEEFYKFIKPILEKMDGTEELLVKLNREDLLRKQRTFDNGSIPHQIHLGELHAILRRQEDFYPFLKDNREKIEKILTFRIPYYVGPLARGNSRFAWMTRKSEETITPWNFEEVVDKGASAQSFIERMTNFDKNLPNEKVLPKHSLLYEYFTVYNELTKVKYVTEGMRKPAFLSGEQKKAIVDLLFKTNRKVTVKQLKEDYFKKIECFDSVEISGVEDRFNASLGTYHDLLKIIKDKDFLDNEENEDILEDIVLTLTLFEDREMIEERLKTYAHLFDDKVMKQLKRRRYTGWGRLSRKLINGIRDKQSGKTILDFLKSDGFANRNFMQLIHDDSLTFKEDIQKAQVSGQGDSLHEHIANLAGSPAIKKGILQTVKVVDELVKVMGRHKPENIVIEMARENQTTQKGQKNSRERMKRIEEGIKELGSQILKEHPVENTQLQNEKLYLYYLQNGRDMYVDQELDINRLSDYDVDHIVPQSFLKDDSIDNKVLTRSDKARGKSDNVPSEEVVKKMKNYWRQLLNAKLITQRKFDNLTKAERGGLSELDKAGFIKRQLVETRQITKHVAQILDSRMNTKYDENDKLIREVKVITLKSKLVSDFRKDFQFYKVREINNYHHAHDAYLNAVVGTALIKKYPKLESEFVYGDYKVYDVRKMIAKSEQEIGKATAKYFFYSNIMNFFKTEITLANGEIRKRPLIETNGETGEIVWDKGRDFATVRKVLSMPQVNIVKKTEVQTGGFSKESILPKRNSDKLIARKKDWDPKKYGGFDSPTVAYSVLVVAKVEKGKSKKLKSVKELLGITIMERSSFEKNPIDFLEAKGYKEVKKDLIIKLPKYSLFELENGRKRMLASAGELQKGNELALPSKYVNFLYLASHYEKLKGSPEDNEQKQLFVEQHKHYLDEIIEQISEFSKRVILADANLDKVLSAYNKHRDKPIREQAENIIHLFTLTNLGAPAAFKYFDTTIDRKRYTSTKEVLDATLIHQSITGLYETRIDLSQLGGDGGGSSGGGPAPGGLDDEYRLYSPLVKPDQNIQFWLEQFPQAWAETAGMGLAKQVPPQVIQLKASATPVSVRQYPLSKEAQEGIRPHVQRLIQQGILVPVQSPWNTPLLPVRKPGTNDYRPVQDLREVNKRVQDIHPTVPNPYNLLCALPPQRSWYTVLDLKDAFFCLRLHPTSQPLFAFEWRDPGTGRTGQLTWTRLPQGFKNSPTIFNEALHRDLANFRIQHPQVTLLQYVDDLLLAGATKQDCLEGTKALLLELSDLGYRASAKKAQICRREVTYLGYSLRDGQRWLTEARKKTVVQIPAPTTAKQVREFLGKAGFCRLFIPGFATLAAPLYPLTKPKGEFSWAPEHQKAFDAIKKALLSAPALALPDVTKPFTLYVDERKGVARGVLTQTLGPWRRPVAYLSKKLDPVASGWPVCLKAIAAVAILVKDADKLTLGQNITVIAPHALENIVRQPPDRWMTNARMTHYQSLLLTERVTFAPPAALNPATLLPEETDEPVTHDCHQLLIEETGVRKDLTDIPLTGEVLTWFTDGSSYVVEGKRMAGAAVVDGTRTIWASSLPEGTSAQKAELMALTQALRLAEGKSINIYTDSRYAFATAHVHGAIYKQRGWLTSAGREIKNKEEILSLLEALHLPKRLAIIHCPGHQKAKDPISRGNQMADRVAKQAAQGVNLLPAGKRTADGSEFEKRTADGSEFESPKKKAKVE

SEQ ID NO: 92 - protein, 2088 aa, synthetic construct
MPAAKRVKLDGGDKKYSIGLDIGTNSVGWAVITDEYKVPSKKFKVLGNTDRHSIKKNLIGALLFDSGETAEATRLKRTARRRYTRRKNRICYLQEIFSNEMAKVDDSFFHRLEESFLVEEDKKHERHPIFGNIVDEVAYHEKYPTIYHLRKKLVDSTDKADLRLIYLALAHMIKFRGHFLIEGDLNPDNSDVDKLFIQLVQTYNQLFEENPINASGVDAKAILSARLSKSRRLENLIAQLPGEKKNGLFGNLIALSLGLTPNFKSNFDLAEDAKLQLSKDTYDDDLDNLLAQIGDQYADLFLAAKNLSDAILLSDILRVNTEITKAPLSASMIKRYDEHHQDLTLLKALVRQQLPEKYKEIFFDQSKNGYAGYIDGGASQEEFYKFIKPILEKMDGTEELLVKLNREDLLRKQRTFDNGSIPHQIHLGELHAILRRQEDFYPFLKDNREKIEKILTFRIPYYVGPLARGNSRFAWMTRKSEETITPWNFEEVVDKGASAQSFIERMTNFDKNLPNEKVLPKHSLLYEYFTVYNELTKVKYVTEGMRKPAFLSGEQKKAIVDLLFKTNRKVTVKQLKEDYFKKIECFDSVEISGVEDRFNASLGTYHDLLKIIKDKDFLDNEENEDILEDIVLTLTLFEDREMIEERLKTYAHLFDDKVMKQLKRRRYTGWGRLSRKLINGIRDKQSGKTILDFLKSDGFANRNFMQLIHDDSLTFKEDIQKAQVSGQGDSLHEHIANLAGSPAIKKGILQTVKVVDELVKVMGRHKPENIVIEMARENQTTQKGQKNSRERMKRIEEGIKELGSQILKEHPVENTQLQNEKLYLYYLQNGRDMYVDQELDINRLSDYDVDHIVPQSFLKDDSIDNKVLTRSDKARGKSDNVPSEEVVKKMKNYWRQLLNAKLITQRKFDNLTKAERGGLSELDKAGFIKRQLVETRQITKHVAQILDSRMNTKYDENDKLIREVKVITLKSKLVSDFRKDFQFYKVREINNYHHAHDAYLNAVVGTALIKKYPKLESEFVYGDYKVYDVRKMIAKSEQEIGKATAKYFFYSNIMNFFKTEITLANGEIRKRPLIETNGETGEIVWDKGRDFATVRKVLSMPQVNIVKKTEVQTGGFSKESILPKRNSDKLIARKKDWDPKKYGGFDSPTVAYSVLVVAKVEKGKSKKLKSVKELLGITIMERSSFEKNPIDFLEAKGYKEVKKDLIIKLPKYSLFELENGRKRMLASAGELQKGNELALPSKYVNFLYLASHYEKLKGSPEDNEQKQLFVEQHKHYLDEIIEQISEFSKRVILADANLDKVLSAYNKHRDKPIREQAENIIHLFTLTNLGAPAAFKYFDTTIDRKRYTSTKEVLDATLIHQSITGLYETRIDLSQLGGDGGGGSEAAAKGSSGGLDDEYRLYSPLVKPDQNIQFWLEQFPQAWAETAGMGLAKQVPPQVIQLKASATPVSVRQYPLSKEAQEGIRPHVQRLIQQGILVPVQSPWNTPLLPVRKPGTNDYRPVQDLREVNKRVQDIHPTVPNPYNLLCALPPQRSWYTVLDLKDAFFCLRLHPTSQPLFAFEWRDPGTGRTGQLTWTRLPQGFKNSPTIFNEALHRDLANFRIQHPQVTLLQYVDDLLLAGATKQDCLEGTKALLLELSDLGYRASAKKAQICRREVTYLGYSLRDGQRWLTEARKKTVVQIPAPTTAKQVREFLGKAGFCRLFIPGFATLAAPLYPLTKPKGEFSWAPEHQKAFDAIKKALLSAPALALPDVTKPFTLYVDERKGVARGVLTQTLGPWRRPVAYLSKKLDPVASGWPVCLKAIAAVAILVKDADKLTLGQNITVIAPHALENIVRQPPDRWMTNARMTHYQSLLLTERVTFAPPAALNPATLLPEETDEPVTHDCHQLLIEETGVRKDLTDIPLTGEVLTWFTDGSSYVVEGKRMAGAAVVDGTRTIWASSLPEGTSAQKAELMALTQALRLAEGKSINIYTDSRYAFATAHVHGAIYKQRGWLTSAGREIKNKEEILSLLEALHLPKRLAIIHCPGHQKAKDPISRGNQMADRVAKQAAQGVNLLPAGKRTADGSEFEKRTADGSEFESPKKKAKVE

SEQ ID NO: 93 - protein, 2088 aa, synthetic construct
MPAAKRVKLDGGDKKYSIGLDIGTNSVGWAVITDEYKVPSKKFKVLGNTDRHSIKKNLIGALLFDSGETAEATRLKRTARRRYTRRKNRICYLQEIFSNEMAKVDDSFFHRLEESFLVEEDKKHERHPIFGNIVDEVAYHEKYPTIYHLRKKLVDSTDKADLRLIYLALAHMIKFRGHFLIEGDLNPDNSDVDKLFIQLVQTYNQLFEENPINASGVDAKAILSARLSKSRRLENLIAQLPGEKKNGLFGNLIALSLGLTPNFKSNFDLAEDAKLQLSKDTYDDDLDNLLAQIGDQYADLFLAAKNLSDAILLSDILRVNTEITKAPLSASMIKRYDEHHQDLTLLKALVRQQLPEKYKEIFFDQSKNGYAGYIDGGASQEEFYKFIKPILEKMDGTEELLVKLNREDLLRKQRTFDNGSIPHQIHLGELHAILRRQEDFYPFLKDNREKIEKILTFRIPYYVGPLARGNSRFAWMTRKSEETITPWNFEEVVDKGASAQSFIERMTNFDKNLPNEKVLPKHSLLYEYFTVYNELTKVKYVTEGMRKPAFLSGEQKKAIVDLLFKTNRKVTVKQLKEDYFKKIECFDSVEISGVEDRFNASLGTYHDLLKIIKDKDFLDNEENEDILEDIVLTLTLFEDREMIEERLKTYAHLFDDKVMKQLKRRRYTGWGRLSRKLINGIRDKQSGKTILDFLKSDGFANRNFMQLIHDDSLTFKEDIQKAQVSGQGDSLHEHIANLAGSPAIKKGILQTVKVVDELVKVMGRHKPENIVIEMARENQTTQKGQKNSRERMKRIEEGIKELGSQILKEHPVENTQLQNEKLYLYYLQNGRDMYVDQELDINRLSDYDVDHIVPQSFLKDDSIDNKVLTRSDKARGKSDNVPSEEVVKKMKNYWRQLLNAKLITQRKFDNLTKAERGGLSELDKAGFIKRQLVETRQITKHVAQILDSRMNTKYDENDKLIREVKVITLKSKLVSDFRKDFQFYKVREINNYHHAHDAYLNAVVGTALIKKYPKLESEFVYGDYKVYDVRKMIAKSEQEIGKATAKYFFYSNIMNFFKTEITLANGEIRKRPLIETNGETGEIVWDKGRDFATVRKVLSMPQVNIVKKTEVQTGGFSKESILPKRNSDKLIARKKDWDPKKYGGFDSPTVAYSVLVVAKVEKGKSKKLKSVKELLGITIMERSSFEKNPIDFLEAKGYKEVKKDLIIKLPKYSLFELENGRKRMLASAGELQKGNELALPSKYVNFLYLASHYEKLKGSPEDNEQKQLFVEQHKHYLDEIIEQISEFSKRVILADANLDKVLSAYNKHRDKPIREQAENIIHLFTLTNLGAPAAFKYFDTTIDRKRYTSTKEVLDATLIHQSITGLYETRIDLSQLGGDGGPAPEAAAKGSSGGLDDEYRLYSPLVKPDQNIQFWLEQFPQAWAETAGMGLAKQVPPQVIQLKASATPVSVRQYPLSKEAQEGIRPHVQRLIQQGILVPVQSPWNTPLLPVRKPGTNDYRPVQDLREVNKRVQDIHPTVPNPYNLLCALPPQRSWYTVLDLKDAFFCLRLHPTSQPLFAFEWRDPGTGRTGQLTWTRLPQGFKNSPTIFNEALHRDLANFRIQHPQVTLLQYVDDLLLAGATKQDCLEGTKALLLELSDLGYRASAKKAQICRREVTYLGYSLRDGQRWLTEARKKTVVQIPAPTTAKQVREFLGKAGFCRLFIPGFATLAAPLYPLTKPKGEFSWAPEHQKAFDAIKKALLSAPALALPDVTKPFTLYVDERKGVARGVLTQTLGPWRRPVAYLSKKLDPVASGWPVCLKAIAAVAILVKDADKLTLGQNITVIAPHALENIVRQPPDRWMTNARMTHYQSLLLTERVTFAPPAALNPATLLPEETDEPVTHDCHQLLIEETGVRKDLTDIPLTGEVLTWFTDGSSYVVEGKRMAGAAVVDGTRTIWASSLPEGTSAQKAELMALTQALRLAEGKSINIYTDSRYAFATAHVHGAIYKQRGWLTSAGREIKNKEEILSLLEALHLPKRLAIIHCPGHQKAKDPISRGNQMADRVAKQAAQGVNLLPAGKRTADGSEFEKRTADGSEFESPKKKAKVE

SEQ ID NO: 94 - protein, 2088 aa, synthetic construct
MPAAKRVKLDGGDKKYSIGLDIGTNSVGWAVITDEYKVPSKKFKVLGNTDRHSIKKNLIGALLFDSGETAEATRLKRTARRRYTRRKNRICYLQEIFSNEMAKVDDSFFHRLEESFLVEEDKKHERHPIFGNIVDEVAYHEKYPTIYHLRKKLVDSTDKADLRLIYLALAHMIKFRGHFLIEGDLNPDNSDVDKLFIQLVQTYNQLFEENPINASGVDAKAILSARLSKSRRLENLIAQLPGEKKNGLFGNLIALSLGLTPNFKSNFDLAEDAKLQLSKDTYDDDLDNLLAQIGDQYADLFLAAKNLSDAILLSDILRVNTEITKAPLSASMIKRYDEHHQDLTLLKALVRQQLPEKYKEIFFDQSKNGYAGYIDGGASQEEFYKFIKPILEKMDGTEELLVKLNREDLLRKQRTFDNGSIPHQIHLGELHAILRRQEDFYPFLKDNREKIEKILTFRIPYYVGPLARGNSRFAWMTRKSEETITPWNFEEVVDKGASAQSFIERMTNFDKNLPNEKVLPKHSLLYEYFTVYNELTKVKYVTEGMRKPAFLSGEQKKAIVDLLFKTNRKVTVKQLKEDYFKKIECFDSVEISGVEDRFNASLGTYHDLLKIIKDKDFLDNEENEDILEDIVLTLTLFEDREMIEERLKTYAHLFDDKVMKQLKRRRYTGWGRLSRKLINGIRDKQSGKTILDFLKSDGFANRNFMQLIHDDSLTFKEDIQKAQVSGQGDSLHEHIANLAGSPAIKKGILQTVKVVDELVKVMGRHKPENIVIEMARENQTTQKGQKNSRERMKRIEEGIKELGSQILKEHPVENTQLQNEKLYLYYLQNGRDMYVDQELDINRLSDYDVDHIVPQSFLKDDSIDNKVLTRSDKARGKSDNVPSEEVVKKMKNYWRQLLNAKLITQRKFDNLTKAERGGLSELDKAGFIKRQLVETRQITKHVAQILDSRMNTKYDENDKLIREVKVITLKSKLVSDFRKDFQFYKVREINNYHHAHDAYLNAVVGTALIKKYPKLESEFVYGDYKVYDVRKMIAKSEQEIGKATAKYFFYSNIMNFFKTEITLANGEIRKRPLIETNGETGEIVWDKGRDFATVRKVLSMPQVNIVKKTEVQTGGFSKESILPKRNSDKLIARKKDWDPKKYGGFDSPTVAYSVLVVAKVEKGKSKKLKSVKELLGITIMERSSFEKNPIDFLEAKGYKEVKKDLIIKLPKYSLFELENGRKRMLASAGELQKGNELALPSKYVNFLYLASHYEKLKGSPEDNEQKQLFVEQHKHYLDEIIEQISEFSKRVILADANLDKVLSAYNKHRDKPIREQAENIIHLFTLTNLGAPAAFKYFDTTIDRKRYTSTKEVLDATLIHQSITGLYETRIDLSQLGGDGGGGSGGGEAAAKGGLDDEYRLYSPLVKPDQNIQFWLEQFPQAWAETAGMGLAKQVPPQVIQLKASATPVSVRQYPLSKEAQEGIRPHVQRLIQQGILVPVQSPWNTPLLPVRKPGTNDYRPVQDLREVNKRVQDIHPTVPNPYNLLCALPPQRSWYTVLDLKDAFFCLRLHPTSQPLFAFEWRDPGTGRTGQLTWTRLPQGFKNSPTIFNEALHRDLANFRIQHPQVTLLQYVDDLLLAGATKQDCLEGTKALLLELSDLGYRASAKKAQICRREVTYLGYSLRDGQRWLTEARKKTVVQIPAPTTAKQVREFLGKAGFCRLFIPGFATLAAPLYPLTKPKGEFSWAPEHQKAFDAIKKALLSAPALALPDVTKPFTLYVDERKGVARGVLTQTLGPWRRPVAYLSKKLDPVASGWPVCLKAIAAVAILVKDADKLTLGQNITVIAPHALENIVRQPPDRWMTNARMTHYQSLLLTERVTFAPPAALNPATLLPEETDEPVTHDCHQLLIEETGVRKDLTDIPLTGEVLTWFTDGSSYVVEGKRMAGAAVVDGTRTIWASSLPEGTSAQKAELMALTQALRLAEGKSINIYTDSRYAFATAHVHGAIYKQRGWLTSAGREIKNKEEILSLLEALHLPKRLAIIHCPGHQKAKDPISRGNQMADRVAKQAAQGVNLLPAGKRTADGSEFEKRTADGSEFESPKKKAKVE

SEQ ID NO: 95 - protein, 2086 aa, synthetic construct
MPAAKRVKLDGGDKKYSIGLDIGTNSVGWAVITDEYKVPSKKFKVLGNTDRHSIKKNLIGALLFDSGETAEATRLKRTARRRYTRRKNRICYLQEIFSNEMAKVDDSFFHRLEESFLVEEDKKHERHPIFGNIVDEVAYHEKYPTIYHLRKKLVDSTDKADLRLIYLALAHMIKFRGHFLIEGDLNPDNSDVDKLFIQLVQTYNQLFEENPINASGVDAKAILSARLSKSRRLENLIAQLPGEKKNGLFGNLIALSLGLTPNFKSNFDLAEDAKLQLSKDTYDDDLDNLLAQIGDQYADLFLAAKNLSDAILLSDILRVNTEITKAPLSASMIKRYDEHHQDLTLLKALVRQQLPEKYKEIFFDQSKNGYAGYIDGGASQEEFYKFIKPILEKMDGTEELLVKLNREDLLRKQRTFDNGSIPHQIHLGELHAILRRQEDFYPFLKDNREKIEKILTFRIPYYVGPLARGNSRFAWMTRKSEETITPWNFEEVVDKGASAQSFIERMTNFDKNLPNEKVLPKHSLLYEYFTVYNELTKVKYVTEGMRKPAFLSGEQKKAIVDLLFKTNRKVTVKQLKEDYFKKIECFDSVEISGVEDRFNASLGTYHDLLKIIKDKDFLDNEENEDILEDIVLTLTLFEDREMIEERLKTYAHLFDDKVMKQLKRRRYTGWGRLSRKLINGIRDKQSGKTILDFLKSDGFANRNFMQLIHDDSLTFKEDIQKAQVSGQGDSLHEHIANLAGSPAIKKGILQTVKVVDELVKVMGRHKPENIVIEMARENQTTQKGQKNSRERMKRIEEGIKELGSQILKEHPVENTQLQNEKLYLYYLQNGRDMYVDQELDINRLSDYDVDHIVPQSFLKDDSIDNKVLTRSDKARGKSDNVPSEEVVKKMKNYWRQLLNAKLITQRKFDNLTKAERGGLSELDKAGFIKRQLVETRQITKHVAQILDSRMNTKYDENDKLIREVKVITLKSKLVSDFRKDFQFYKVREINNYHHAHDAYLNAVVGTALIKKYPKLESEFVYGDYKVYDVRKMIAKSEQEIGKATAKYFFYSNIMNFFKTEITLANGEIRKRPLIETNGETGEIVWDKGRDFATVRKVLSMPQVNIVKKTEVQTGGFSKESILPKRNSDKLIARKKDWDPKKYGGFDSPTVAYSVLVVAKVEKGKSKKLKSVKELLGITIMERSSFEKNPIDFLEAKGYKEVKKDLIIKLPKYSLFELENGRKRMLASAGELQKGNELALPSKYVNFLYLASHYEKLKGSPEDNEQKQLFVEQHKHYLDEIIEQISEFSKRVILADANLDKVLSAYNKHRDKPIREQAENIIHLFTLTNLGAPAAFKYFDTTIDRKRYTSTKEVLDATLIHQSITGLYETRIDLSQLGGDGGGGGGSSGGSGGLDDEYRLYSPLVKPDQNIQFWLEQFPQAWAETAGMGLAKQVPPQVIQLKASATPVSVRQYPLSKEAQEGIRPHVQRLIQQGILVPVQSPWNTPLLPVRKPGTNDYRPVQDLREVNKRVQDIHPTVPNPYNLLCALPPQRSWYTVLDLKDAFFCLRLHPTSQPLFAFEWRDPGTGRTGQLTWTRLPQGFKNSPTIFNEALHRDLANFRIQHPQVTLLQYVDDLLLAGATKQDCLEGTKALLLELSDLGYRASAKKAQICRREVTYLGYSLRDGQRWLTEARKKTVVQIPAPTTAKQVREFLGKAGFCRLFIPGFATLAAPLYPLTKPKGEFSWAPEHQKAFDAIKKALLSAPALALPDVTKPFTLYVDERKGVARGVLTQTLGPWRRPVAYLSKKLDPVASGWPVCLKAIAAVAILVKDADKLTLGQNITVIAPHALENIVRQPPDRWMTNARMTHYQSLLLTERVTFAPPAALNPATLLPEETDEPVTHDCHQLLIEETGVRKDLTDIPLTGEVLTWFTDGSSYVVEGKRMAGAAVVDGTRTIWASSLPEGTSAQKAELMALTQALRLAEGKSINIYTDSRYAFATAHVHGAIYKQRGWLTSAGREIKNKEEILSLLEALHLPKRLAIIHCPGHQKAKDPISRGNQMADRVAKQAAQGVNLLPAGKRTADGSEFEKRTADGSEFESPKKKAKVE

SEQ ID NO: 96 - protein, 2104 aa, synthetic construct
MPAAKRVKLDGGDKKYSIGLDIGTNSVGWAVITDEYKVPSKKFKVLGNTDRHSIKKNLIGALLFDSGETAEATRLKRTARRRYTRRKNRICYLQEIFSNEMAKVDDSFFHRLEESFLVEEDKKHERHPIFGNIVDEVAYHEKYPTIYHLRKKLVDSTDKADLRLIYLALAHMIKFRGHFLIEGDLNPDNSDVDKLFIQLVQTYNQLFEENPINASGVDAKAILSARLSKSRRLENLIAQLPGEKKNGLFGNLIALSLGLTPNFKSNFDLAEDAKLQLSKDTYDDDLDNLLAQIGDQYADLFLAAKNLSDAILLSDILRVNTEITKAPLSASMIKRYDEHHQDLTLLKALVRQQLPEKYKEIFFDQSKNGYAGYIDGGASQEEFYKFIKPILEKMDGTEELLVKLNREDLLRKQRTFDNGSIPHQIHLGELHAILRRQEDFYPFLKDNREKIEKILTFRIPYYVGPLARGNSRFAWMTRKSEETITPWNFEEVVDKGASAQSFIERMTNFDKNLPNEKVLPKHSLLYEYFTVYNELTKVKYVTEGMRKPAFLSGEQKKAIVDLLFKTNRKVTVKQLKEDYFKKIECFDSVEISGVEDRFNASLGTYHDLLKIIKDKDFLDNEENEDILEDIVLTLTLFEDREMIEERLKTYAHLFDDKVMKQLKRRRYTGWGRLSRKLINGIRDKQSGKTILDFLKSDGFANRNFMQLIHDDSLTFKEDIQKAQVSGQGDSLHEHIANLAGSPAIKKGILQTVKVVDELVKVMGRHKPENIVIEMARENQTTQKGQKNSRERMKRIEEGIKELGSQILKEHPVENTQLQNEKLYLYYLQNGRDMYVDQELDINRLSDYDVDHIVPQSFLKDDSIDNKVLTRSDKARGKSDNVPSEEVVKKMKNYWRQLLNAKLITQRKFDNLTKAERGGLSELDKAGFIKRQLVETRQITKHVAQILDSRMNTKYDENDKLIREVKVITLKSKLVSDFRKDFQFYKVREINNYHHAHDAYLNAVVGTALIKKYPKLESEFVYGDYKVYDVRKMIAKSEQEIGKATAKYFFYSNIMNFFKTEITLANGEIRKRPLIETNGETGEIVWDKGRDFATVRKVLSMPQVNIVKKTEVQTGGFSKESILPKRNSDKLIARKKDWDPKKYGGFDSPTVAYSVLVVAKVEKGKSKKLKSVKELLGITIMERSSFEKNPIDFLEAKGYKEVKKDLIIKLPKYSLFELENGRKRMLASAGELQKGNELALPSKYVNFLYLASHYEKLKGSPEDNEQKQLFVEQHKHYLDEIIEQISEFSKRVILADANLDKVLSAYNKHRDKPIREQAENIIHLFTLTNLGAPAAFKYFDTTIDRKRYTSTKEVLDATLIHQSITGLYETRIDLSQLGGDGGEAAAKEAAAKEAAAKEAAAKEAAAKGGTLQLDDEYRLYSPLVKPDQNIQFWLEQFPQAWAETAGMGLAKQVPPQVIQLKASATPVSVRQYPLSKEAQEGIRPHVQRLIQQGILVPVQSPWNTPLLPVRKPGTNDYRPVQDLREVNKRVQDIHPTVPNPYNLLCALPPQRSWYTVLDLKDAFFCLRLHPTSQPLFAFEWRDPGTGRTGQLTWTRLPQGFKNSPTIFDEALHRDLANFRIQHPQVTLLQYVDDLLLAGATKQDCLEGTKALLLELSDLGYRASAKKAQICRREVTYLGYSLRDGQRWLTEARKKTVVQIPAPTTAKQVREFLGTAGFCRLWIPGFATLAAPLYPLTKEKGEFSWAPEHQKAFDAIKKALLSAPALALPDVTKPFTLYVDERKGVARGVLTQTLGPWRRPVAYLSKKLDPVASGWPVCLKAIAAVAILVKDADKLTLGQNITVIAPHALENIVRQPPDRWMTNARMTHYQSLLLTERVTFAPPAALNPATLLPEETDEPVTHDCHQLLIEETGVRKDLTDIPLTGEVLTWFTDGSSYVVEGKRMAGAAVVDGTRTIWASSLPEGTSAQKAELMALTQALRLAEGKSINIYTDSRYAFATAHVHGAIYKQRGLLTSAGREIKNKEEILSLLEALHLPKRLAIIHCPGHQKAKDPISRGNQMADRVAKQAAQGVNLLAGKRTADGSEFEKRTADGSEFESPKKKAKVE

SEQ ID NO: 97 - protein, 2094 aa, synthetic construct
MPAAKRVKLDGGDKKYSIGLDIGTNSVGWAVITDEYKVPSKKFKVLGNTDRHSIKKNLIGALLFDSGETAEATRLKRTARRRYTRRKNRICYLQEIFSNEMAKVDDSFFHRLEESFLVEEDKKHERHPIFGNIVDEVAYHEKYPTIYHLRKKLVDSTDKADLRLIYLALAHMIKFRGHFLIEGDLNPDNSDVDKLFIQLVQTYNQLFEENPINASGVDAKAILSARLSKSRRLENLIAQLPGEKKNGLFGNLIALSLGLTPNFKSNFDLAEDAKLQLSKDTYDDDLDNLLAQIGDQYADLFLAAKNLSDAILLSDILRVNTEITKAPLSASMIKRYDEHHQDLTLLKALVRQQLPEKYKEIFFDQSKNGYAGYIDGGASQEEFYKFIKPILEKMDGTEELLVKLNREDLLRKQRTFDNGSIPHQIHLGELHAILRRQEDFYPFLKDNREKIEKILTFRIPYYVGPLARGNSRFAWMTRKSEETITPWNFEEVVDKGASAQSFIERMTNFDKNLPNEKVLPKHSLLYEYFTVYNELTKVKYVTEGMRKPAFLSGEQKKAIVDLLFKTNRKVTVKQLKEDYFKKIECFDSVEISGVEDRFNASLGTYHDLLKIIKDKDFLDNEENEDILEDIVLTLTLFEDREMIEERLKTYAHLFDDKVMKQLKRRRYTGWGRLSRKLINGIRDKQSGKTILDFLKSDGFANRNFMQLIHDDSLTFKEDIQKAQVSGQGDSLHEHIANLAGSPAIKKGILQTVKVVDELVKVMGRHKPENIVIEMARENQTTQKGQKNSRERMKRIEEGIKELGSQILKEHPVENTQLQNEKLYLYYLQNGRDMYVDQELDINRLSDYDVDHIVPQSFLKDDSIDNKVLTRSDKARGKSDNVPSEEVVKKMKNYWRQLLNAKLITQRKFDNLTKAERGGLSELDKAGFIKRQLVETRQITKHVAQILDSRMNTKYDENDKLIREVKVITLKSKLVSDFRKDFQFYKVREINNYHHAHDAYLNAVVGTALIKKYPKLESEFVYGDYKVYDVRKMIAKSEQEIGKATAKYFFYSNIMNFFKTEITLANGEIRKRPLIETNGETGEIVWDKGRDFATVRKVLSMPQVNIVKKTEVQTGGFSKESILPKRNSDKLIARKKDWDPKKYGGFDSPTVAYSVLVVAKVEKGKSKKLKSVKELLGITIMERSSFEKNPIDFLEAKGYKEVKKDLIIKLPKYSLFELENGRKRMLASAGELQKGNELALPSKYVNFLYLASHYEKLKGSPEDNEQKQLFVEQHKHYLDEIIEQISEFSKRVILADANLDKVLSAYNKHRDKPIREQAENIIHLFTLTNLGAPAAFKYFDTTIDRKRYTSTKEVLDATLIHQSITGLYETRIDLSQLGGDGGEAAAKGGGGSEAAAKGGTLQLDDEYRLYSPLVKPDQNIQFWLEQFPQAWAETAGMGLAKQVPPQVIQLKASATPVSVRQYPLSKEAQEGIRPHVQRLIQQGILVPVQSPWNTPLLPVRKPGTNDYRPVQDLREVNKRVQDIHPTVPNPYNLLCALPPQRSWYTVLDLKDAFFCLRLHPTSQPLFAFEWRDPGTGRTGQLTWTRLPQGFKNSPTIFDEALHRDLANFRIQHPQVTLLQYVDDLLLAGATKQDCLEGTKALLLELSDLGYRASAKKAQICRREVTYLGYSLRDGQRWLTEARKKTVVQIPAPTTAKQVREFLGTAGFCRLWIPGFATLAAPLYPLTKEKGEFSWAPEHQKAFDAIKKALLSAPALALPDVTKPFTLYVDERKGVARGVLTQTLGPWRRPVAYLSKKLDPVASGWPVCLKAIAAVAILVKDADKLTLGQNITVIAPHALENIVRQPPDRWMTNARMTHYQSLLLTERVTFAPPAALNPATLLPEETDEPVTHDCHQLLIEETGVRKDLTDIPLTGEVLTWFTDGSSYVVEGKRMAGAAVVDGTRTIWASSLPEGTSAQKAELMALTQALRLAEGKSINIYTDSRYAFATAHVHGAIYKQRGLLTSAGREIKNKEEILSLLEALHLPKRLAIIHCPGHQKAKDPISRGNQMADRVAKQAAQGVNLLAGKRTADGSEFEKRTADGSEFESPKKKAKVE

SEQ ID NO: 98 - protein, 2125 aa, synthetic construct
MPAAKRVKLDGGDKKYSIGLDIGTNSVGWAVITDEYKVPSKKFKVLGNTDRHSIKKNLIGALLFDSGETAEATRLKRTARRRYTRRKNRICYLQEIFSNEMAKVDDSFFHRLEESFLVEEDKKHERHPIFGNIVDEVAYHEKYPTIYHLRKKLVDSTDKADLRLIYLALAHMIKFRGHFLIEGDLNPDNSDVDKLFIQLVQTYNQLFEENPINASGVDAKAILSARLSKSRRLENLIAQLPGEKKNGLFGNLIALSLGLTPNFKSNFDLAEDAKLQLSKDTYDDDLDNLLAQIGDQYADLFLAAKNLSDAILLSDILRVNTEITKAPLSASMIKRYDEHHQDLTLLKALVRQQLPEKYKEIFFDQSKNGYAGYIDGGASQEEFYKFIKPILEKMDGTEELLVKLNREDLLRKQRTFDNGSIPHQIHLGELHAILRRQEDFYPFLKDNREKIEKILTFRIPYYVGPLARGNSRFAWMTRKSEETITPWNFEEVVDKGASAQSFIERMTNFDKNLPNEKVLPKHSLLYEYFTVYNELTKVKYVTEGMRKPAFLSGEQKKAIVDLLFKTNRKVTVKQLKEDYFKKIECFDSVEISGVEDRFNASLGTYHDLLKIIKDKDFLDNEENEDILEDIVLTLTLFEDREMIEERLKTYAHLFDDKVMKQLKRRRYTGWGRLSRKLINGIRDKQSGKTILDFLKSDGFANRNFMQLIHDDSLTFKEDIQKAQVSGQGDSLHEHIANLAGSPAIKKGILQTVKVVDELVKVMGRHKPENIVIEMARENQTTQKGQKNSRERMKRIEEGIKELGSQILKEHPVENTQLQNEKLYLYYLQNGRDMYVDQELDINRLSDYDVDHIVPQSFLKDDSIDNKVLTRSDKARGKSDNVPSEEVVKKMKNYWRQLLNAKLITQRKFDNLTKAERGGLSELDKAGFIKRQLVETRQITKHVAQILDSRMNTKYDENDKLIREVKVITLKSKLVSDFRKDFQFYKVREINNYHHAHDAYLNAVVGTALIKKYPKLESEFVYGDYKVYDVRKMIAKSEQEIGKATAKYFFYSNIMNFFKTEITLANGEIRKRPLIETNGETGEIVWDKGRDFATVRKVLSMPQVNIVKKTEVQTGGFSKESILPKRNSDKLIARKKDWDPKKYGGFDSPTVAYSVLVVAKVEKGKSKKLKSVKELLGITIMERSSFEKNPIDFLEAKGYKEVKKDLIIKLPKYSLFELENGRKRMLASAGELQKGNELALPSKYVNFLYLASHYEKLKGSPEDNEQKQLFVEQHKHYLDEIIEQISEFSKRVILADANLDKVLSAYNKHRDKPIREQAENIIHLFTLTNLGAPAAFKYFDTTIDRKRYTSTKEVLDATLIHQSITGLYETRIDLSQLGGDGGAEAAAKEAAAKEAAAKEAAAKALEAEAAAKEAAAKEAAAKEAAAKAGGTLQLDDEYRLYSPLVKPDQNIQFWLEQFPQAWAETAGMGLAKQVPPQVIQLKASATPVSVRQYPLSKEAQEGIRPHVQRLIQQGILVPVQSPWNTPLLPVRKPGTNDYRPVQDLREVNKRVQDIHPTVPNPYNLLCALPPQRSWYTVLDLKDAFFCLRLHPTSQPLFAFEWRDPGTGRTGQLTWTRLPQGFKNSPTIFDEALHRDLANFRIQHPQVTLLQYVDDLLLAGATKQDCLEGTKALLLELSDLGYRASAKKAQICRREVTYLGYSLRDGQRWLTEARKKTVVQIPAPTTAKQVREFLGTAGFCRLWIPGFATLAAPLYPLTKEKGEFSWAPEHQKAFDAIKKALLSAPALALPDVTKPFTLYVDERKGVARGVLTQTLGPWRRPVAYLSKKLDPVASGWPVCLKAIAAVAILVKDADKLTLGQNITVIAPHALENIVRQPPDRWMTNARMTHYQSLLLTERVTFAPPAALNPATLLPEETDEPVTHDCHQLLIEETGVRKDLTDIPLTGEVLTWFTDGSSYVVEGKRMAGAAVVDGTRTIWASSLPEGTSAQKAELMALTQALRLAEGKSINIYTDSRYAFATAHVHGAIYKQRGLLTSAGREIKNKEEILSLLEALHLPKRLAIIHCPGHQKAKDPISRGNQMADRVAKQAAQGVNLLAGKRTADGSEFEKRTADGSEFESPKKKAKVE

SEQ ID NO: 99 - protein, 2094 aa, synthetic construct
MPAAKRVKLDGGDKKYSIGLDIGTNSVGWAVITDEYKVPSKKFKVLGNTDRHSIKKNLIGALLFDSGETAEATRLKRTARRRYTRRKNRICYLQEIFSNEMAKVDDSFFHRLEESFLVEEDKKHERHPIFGNIVDEVAYHEKYPTIYHLRKKLVDSTDKADLRLIYLALAHMIKFRGHFLIEGDLNPDNSDVDKLFIQLVQTYNQLFEENPINASGVDAKAILSARLSKSRRLENLIAQLPGEKKNGLFGNLIALSLGLTPNFKSNFDLAEDAKLQLSKDTYDDDLDNLLAQIGDQYADLFLAAKNLSDAILLSDILRVNTEITKAPLSASMIKRYDEHHQDLTLLKALVRQQLPEKYKEIFFDQSKNGYAGYIDGGASQEEFYKFIKPILEKMDGTEELLVKLNREDLLRKQRTFDNGSIPHQIHLGELHAILRRQEDFYPFLKDNREKIEKILTFRIPYYVGPLARGNSRFAWMTRKSEETITPWNFEEVVDKGASAQSFIERMTNFDKNLPNEKVLPKHSLLYEYFTVYNELTKVKYVTEGMRKPAFLSGEQKKAIVDLLFKTNRKVTVKQLKEDYFKKIECFDSVEISGVEDRFNASLGTYHDLLKIIKDKDFLDNEENEDILEDIVLTLTLFEDREMIEERLKTYAHLFDDKVMKQLKRRRYTGWGRLSRKLINGIRDKQSGKTILDFLKSDGFANRNFMQLIHDDSLTFKEDIQKAQVSGQGDSLHEHIANLAGSPAIKKGILQTVKVVDELVKVMGRHKPENIVIEMARENQTTQKGQKNSRERMKRIEEGIKELGSQILKEHPVENTQLQNEKLYLYYLQNGRDMYVDQELDINRLSDYDVDHIVPQSFLKDDSIDNKVLTRSDKARGKSDNVPSEEVVKKMKNYWRQLLNAKLITQRKFDNLTKAERGGLSELDKAGFIKRQLVETRQITKHVAQILDSRMNTKYDENDKLIREVKVITLKSKLVSDFRKDFQFYKVREINNYHHAHDAYLNAVVGTALIKKYPKLESEFVYGDYKVYDVRKMIAKSEQEIGKATAKYFFYSNIMNFFKTEITLANGEIRKRPLIETNGETGEIVWDKGRDFATVRKVLSMPQVNIVKKTEVQTGGFSKESILPKRNSDKLIARKKDWDPKKYGGFDSPTVAYSVLVVAKVEKGKSKKLKSVKELLGITIMERSSFEKNPIDFLEAKGYKEVKKDLIIKLPKYSLFELENGRKRMLASAGELQKGNELALPSKYVNFLYLASHYEKLKGSPEDNEQKQLFVEQHKHYLDEIIEQISEFSKRVILADANLDKVLSAYNKHRDKPIREQAENIIHLFTLTNLGAPAAFKYFDTTIDRKRYTSTKEVLDATLIHQSITGLYETRIDLSQLGGDGGGSSGSSGSSGSSGSSGGTLQLDDEYRLYSPLVKPDQNIQFWLEQFPQAWAETAGMGLAKQVPPQVIQLKASATPVSVRQYPLSKEAQEGIRPHVQRLIQQGILVPVQSPWNTPLLPVRKPGTNDYRPVQDLREVNKRVQDIHPTVPNPYNLLCALPPQRSWYTVLDLKDAFFCLRLHPTSQPLFAFEWRDPGTGRTGQLTWTRLPQGFKNSPTIFDEALHRDLANFRIQHPQVTLLQYVDDLLLAGATKQDCLEGTKALLLELSDLGYRASAKKAQICRREVTYLGYSLRDGQRWLTEARKKTVVQIPAPTTAKQVREFLGTAGFCRLWIPGFATLAAPLYPLTKEKGEFSWAPEHQKAFDAIKKALLSAPALALPDVTKPFTLYVDERKGVARGVLTQTLGPWRRPVAYLSKKLDPVASGWPVCLKAIAAVAILVKDADKLTLGQNITVIAPHALENIVRQPPDRWMTNARMTHYQSLLLTERVTFAPPAALNPATLLPEETDEPVTHDCHQLLIEETGVRKDLTDIPLTGEVLTWFTDGSSYVVEGKRMAGAAVVDGTRTIWASSLPEGTSAQKAELMALTQALRLAEGKSINIYTDSRYAFATAHVHGAIYKQRGLLTSAGREIKNKEEILSLLEALHLPKRLAIIHCPGHQKAKDPISRGNQMADRVAKQAAQGVNLLAGKRTADGSEFEKRTADGSEFESPKKKAKVE

SEQ ID NO: 100 - protein, 2085 aa, synthetic construct
MPAAKRVKLDGGDKKYSIGLDIGTNSVGWAVITDEYKVPSKKFKVLGNTDRHSIKKNLIGALLFDSGETAEATRLKRTARRRYTRRKNRICYLQEIFSNEMAKVDDSFFHRLEESFLVEEDKKHERHPIFGNIVDEVAYHEKYPTIYHLRKKLVDSTDKADLRLIYLALAHMIKFRGHFLIEGDLNPDNSDVDKLFIQLVQTYNQLFEENPINASGVDAKAILSARLSKSRRLENLIAQLPGEKKNGLFGNLIALSLGLTPNFKSNFDLAEDAKLQLSKDTYDDDLDNLLAQIGDQYADLFLAAKNLSDAILLSDILRVNTEITKAPLSASMIKRYDEHHQDLTLLKALVRQQLPEKYKEIFFDQSKNGYAGYIDGGASQEEFYKFIKPILEKMDGTEELLVKLNREDLLRKQRTFDNGSIPHQIHLGELHAILRRQEDFYPFLKDNREKIEKILTFRIPYYVGPLARGNSRFAWMTRKSEETITPWNFEEVVDKGASAQSFIERMTNFDKNLPNEKVLPKHSLLYEYFTVYNELTKVKYVTEGMRKPAFLSGEQKKAIVDLLFKTNRKVTVKQLKEDYFKKIECFDSVEISGVEDRFNASLGTYHDLLKIIKDKDFLDNEENEDILEDIVLTLTLFEDREMIEERLKTYAHLFDDKVMKQLKRRRYTGWGRLSRKLINGIRDKQSGKTILDFLKSDGFANRNFMQLIHDDSLTFKEDIQKAQVSGQGDSLHEHIANLAGSPAIKKGILQTVKVVDELVKVMGRHKPENIVIEMARENQTTQKGQKNSRERMKRIEEGIKELGSQILKEHPVENTQLQNEKLYLYYLQNGRDMYVDQELDINRLSDYDVDHIVPQSFLKDDSIDNKVLTRSDKARGKSDNVPSEEVVKKMKNYWRQLLNAKLITQRKFDNLTKAERGGLSELDKAGFIKRQLVETRQITKHVAQILDSRMNTKYDENDKLIREVKVITLKSKLVSDFRKDFQFYKVREINNYHHAHDAYLNAVVGTALIKKYPKLESEFVYGDYKVYDVRKMIAKSEQEIGKATAKYFFYSNIMNFFKTEITLANGEIRKRPLIETNGETGEIVWDKGRDFATVRKVLSMPQVNIVKKTEVQTGGFSKESILPKRNSDKLIARKKDWDPKKYGGFDSPTVAYSVLVVAKVEKGKSKKLKSVKELLGITIMERSSFEKNPIDFLEAKGYKEVKKDLIIKLPKYSLFELENGRKRMLASAGELQKGNELALPSKYVNFLYLASHYEKLKGSPEDNEQKQLFVEQHKHYLDEIIEQISEFSKRVILADANLDKVLSAYNKHRDKPIREQAENIIHLFTLTNLGAPAAFKYFDTTIDRKRYTSTKEVLDATLIHQSITGLYETRIDLSQLGGDGGGGGGSSGGTLQLDDEYRLYSPLVKPDQNIQFWLEQFPQAWAETAGMGLAKQVPPQVIQLKASATPVSVRQYPLSKEAQEGIRPHVQRLIQQGILVPVQSPWNTPLLPVRKPGTNDYRPVQDLREVNKRVQDIHPTVPNPYNLLCALPPQRSWYTVLDLKDAFFCLRLHPTSQPLFAFEWRDPGTGRTGQLTWTRLPQGFKNSPTIFDEALHRDLANFRIQHPQVTLLQYVDDLLLAGATKQDCLEGTKALLLELSDLGYRASAKKAQICRREVTYLGYSLRDGQRWLTEARKKTVVQIPAPTTAKQVREFLGTAGFCRLWIPGFATLAAPLYPLTKEKGEFSWAPEHQKAFDAIKKALLSAPALALPDVTKPFTLYVDERKGVARGVLTQTLGPWRRPVAYLSKKLDPVASGWPVCLKAIAAVAILVKDADKLTLGQNITVIAPHALENIVRQPPDRWMTNARMTHYQSLLLTERVTFAPPAALNPATLLPEETDEPVTHDCHQLLIEETGVRKDLTDIPLTGEVLTWFTDGSSYVVEGKRMAGAAVVDGTRTIWASSLPEGTSAQKAELMALTQALRLAEGKSINIYTDSRYAFATAHVHGAIYKQRGLLTSAGREIKNKEEILSLLEALHLPKRLAIIHCPGHQKAKDPISRGNQMADRVAKQAAQGVNLLAGKRTADGSEFEKRTADGSEFESPKKKAKVE

SEQ ID NO: 101 - protein, 2088 aa, synthetic construct
MPAAKRVKLDGGDKKYSIGLDIGTNSVGWAVITDEYKVPSKKFKVLGNTDRHSIKKNLIGALLFDSGETAEATRLKRTARRRYTRRKNRICYLQEIFSNEMAKVDDSFFHRLEESFLVEEDKKHERHPIFGNIVDEVAYHEKYPTIYHLRKKLVDSTDKADLRLIYLALAHMIKFRGHFLIEGDLNPDNSDVDKLFIQLVQTYNQLFEENPINASGVDAKAILSARLSKSRRLENLIAQLPGEKKNGLFGNLIALSLGLTPNFKSNFDLAEDAKLQLSKDTYDDDLDNLLAQIGDQYADLFLAAKNLSDAILLSDILRVNTEITKAPLSASMIKRYDEHHQDLTLLKALVRQQLPEKYKEIFFDQSKNGYAGYIDGGASQEEFYKFIKPILEKMDGTEELLVKLNREDLLRKQRTFDNGSIPHQIHLGELHAILRRQEDFYPFLKDNREKIEKILTFRIPYYVGPLARGNSRFAWMTRKSEETITPWNFEEVVDKGASAQSFIERMTNFDKNLPNEKVLPKHSLLYEYFTVYNELTKVKYVTEGMRKPAFLSGEQKKAIVDLLFKTNRKVTVKQLKEDYFKKIECFDSVEISGVEDRFNASLGTYHDLLKIIKDKDFLDNEENEDILEDIVLTLTLFEDREMIEERLKTYAHLFDDKVMKQLKRRRYTGWGRLSRKLINGIRDKQSGKTILDFLKSDGFANRNFMQLIHDDSLTFKEDIQKAQVSGQGDSLHEHIANLAGSPAIKKGILQTVKVVDELVKVMGRHKPENIVIEMARENQTTQKGQKNSRERMKRIEEGIKELGSQILKEHPVENTQLQNEKLYLYYLQNGRDMYVDQELDINRLSDYDVDHIVPQSFLKDDSIDNKVLTRSDKARGKSDNVPSEEVVKKMKNYWRQLLNAKLITQRKFDNLTKAERGGLSELDKAGFIKRQLVETRQITKHVAQILDSRMNTKYDENDKLIREVKVITLKSKLVSDFRKDFQFYKVREINNYHHAHDAYLNAVVGTALIKKYPKLESEFVYGDYKVYDVRKMIAKSEQEIGKATAKYFFYSNIMNFFKTEITLANGEIRKRPLIETNGETGEIVWDKGRDFATVRKVLSMPQVNIVKKTEVQTGGFSKESILPKRNSDKLIARKKDWDPKKYGGFDSPTVAYSVLVVAKVEKGKSKKLKSVKELLGITIMERSSFEKNPIDFLEAKGYKEVKKDLIIKLPKYSLFELENGRKRMLASAGELQKGNELALPSKYVNFLYLASHYEKLKGSPEDNEQKQLFVEQHKHYLDEIIEQISEFSKRVILADANLDKVLSAYNKHRDKPIREQAENIIHLFTLTNLGAPAAFKYFDTTIDRKRYTSTKEVLDATLIHQSITGLYETRIDLSQLGGDGGGSSGGSPAPGGTLQLDDEYRLYSPLVKPDQNIQFWLEQFPQAWAETAGMGLAKQVPPQVIQLKASATPVSVRQYPLSKEAQEGIRPHVQRLIQQGILVPVQSPWNTPLLPVRKPGTNDYRPVQDLREVNKRVQDIHPTVPNPYNLLCALPPQRSWYTVLDLKDAFFCLRLHPTSQPLFAFEWRDPGTGRTGQLTWTRLPQGFKNSPTIFDEALHRDLANFRIQHPQVTLLQYVDDLLLAGATKQDCLEGTKALLLELSDLGYRASAKKAQICRREVTYLGYSLRDGQRWLTEARKKTVVQIPAPTTAKQVREFLGTAGFCRLWIPGFATLAAPLYPLTKEKGEFSWAPEHQKAFDAIKKALLSAPALALPDVTKPFTLYVDERKGVARGVLTQTLGPWRRPVAYLSKKLDPVASGWPVCLKAIAAVAILVKDADKLTLGQNITVIAPHALENIVRQPPDRWMTNARMTHYQSLLLTERVTFAPPAALNPATLLPEETDEPVTHDCHQLLIEETGVRKDLTDIPLTGEVLTWFTDGSSYVVEGKRMAGAAVVDGTRTIWASSLPEGTSAQKAELMALTQALRLAEGKSINIYTDSRYAFATAHVHGAIYKQRGLLTSAGREIKNKEEILSLLEALHLPKRLAIIHCPGHQKAKDPISRGNQMADRVAKQAAQGVNLLAGKRTADGSEFEKRTADGSEFESPKKKAKVE

SEQ ID NO: 102 - protein, 2089 aa, synthetic construct
MPAAKRVKLDGGDKKYSIGLDIGTNSVGWAVITDEYKVPSKKFKVLGNTDRHSIKKNLIGALLFDSGETAEATRLKRTARRRYTRRKNRICYLQEIFSNEMAKVDDSFFHRLEESFLVEEDKKHERHPIFGNIVDEVAYHEKYPTIYHLRKKLVDSTDKADLRLIYLALAHMIKFRGHFLIEGDLNPDNSDVDKLFIQLVQTYNQLFEENPINASGVDAKAILSARLSKSRRLENLIAQLPGEKKNGLFGNLIALSLGLTPNFKSNFDLAEDAKLQLSKDTYDDDLDNLLAQIGDQYADLFLAAKNLSDAILLSDILRVNTEITKAPLSASMIKRYDEHHQDLTLLKALVRQQLPEKYKEIFFDQSKNGYAGYIDGGASQEEFYKFIKPILEKMDGTEELLVKLNREDLLRKQRTFDNGSIPHQIHLGELHAILRRQEDFYPFLKDNREKIEKILTFRIPYYVGPLARGNSRFAWMTRKSEETITPWNFEEVVDKGASAQSFIERMTNFDKNLPNEKVLPKHSLLYEYFTVYNELTKVKYVTEGMRKPAFLSGEQKKAIVDLLFKTNRKVTVKQLKEDYFKKIECFDSVEISGVEDRFNASLGTYHDLLKIIKDKDFLDNEENEDILEDIVLTLTLFEDREMIEERLKTYAHLFDDKVMKQLKRRRYTGWGRLSRKLINGIRDKQSGKTILDFLKSDGFANRNFMQLIHDDSLTFKEDIQKAQVSGQGDSLHEHIANLAGSPAIKKGILQTVKVVDELVKVMGRHKPENIVIEMARENQTTQKGQKNSRERMKRIEEGIKELGSQILKEHPVENTQLQNEKLYLYYLQNGRDMYVDQELDINRLSDYDVDHIVPQSFLKDDSIDNKVLTRSDKARGKSDNVPSEEVVKKMKNYWRQLLNAKLITQRKFDNLTKAERGGLSELDKAGFIKRQLVETRQITKHVAQILDSRMNTKYDENDKLIREVKVITLKSKLVSDFRKDFQFYKVREINNYHHAHDAYLNAVVGTALIKKYPKLESEFVYGDYKVYDVRKMIAKSEQEIGKATAKYFFYSNIMNFFKTEITLANGEIRKRPLIETNGETGEIVWDKGRDFATVRKVLSMPQVNIVKKTEVQTGGFSKESILPKRNSDKLIARKKDWDPKKYGGFDSPTVAYSVLVVAKVEKGKSKKLKSVKELLGITIMERSSFEKNPIDFLEAKGYKEVKKDLIIKLPKYSLFELENGRKRMLASAGELQKGNELALPSKYVNFLYLASHYEKLKGSPEDNEQKQLFVEQHKHYLDEIIEQISEFSKRVILADANLDKVLSAYNKHRDKPIREQAENIIHLFTLTNLGAPAAFKYFDTTIDRKRYTSTKEVLDATLIHQSITGLYETRIDLSQLGGDGGGGGGSGGGGSGGTLQLDDEYRLYSPLVKPDQNIQFWLEQFPQAWAETAGMGLAKQVPPQVIQLKASATPVSVRQYPLSKEAQEGIRPHVQRLIQQGILVPVQSPWNTPLLPVRKPGTNDYRPVQDLREVNKRVQDIHPTVPNPYNLLCALPPQRSWYTVLDLKDAFFCLRLHPTSQPLFAFEWRDPGTGRTGQLTWTRLPQGFKNSPTIFDEALHRDLANFRIQHPQVTLLQYVDDLLLAGATKQDCLEGTKALLLELSDLGYRASAKKAQICRREVTYLGYSLRDGQRWLTEARKKTVVQIPAPTTAKQVREFLGTAGFCRLWIPGFATLAAPLYPLTKEKGEFSWAPEHQKAFDAIKKALLSAPALALPDVTKPFTLYVDERKGVARGVLTQTLGPWRRPVAYLSKKLDPVASGWPVCLKAIAAVAILVKDADKLTLGQNITVIAPHALENIVRQPPDRWMTNARMTHYQSLLLTERVTFAPPAALNPATLLPEETDEPVTHDCHQLLIEETGVRKDLTDIPLTGEVLTWFTDGSSYVVEGKRMAGAAVVDGTRTIWASSLPEGTSAQKAELMALTQALRLAEGKSINIYTDSRYAFATAHVHGAIYKQRGLLTSAGREIKNKEEILSLLEALHLPKRLAIIHCPGHQKAKDPISRGNQMADRVAKQAAQGVNLLAGKRTADGSEFEKRTADGSEFESPKKKAKVE

SEQ ID NO: 103 - protein, 2091 aa, synthetic construct
MPAAKRVKLDGGDKKYSIGLDIGTNSVGWAVITDEYKVPSKKFKVLGNTDRHSIKKNLIGALLFDSGETAEATRLKRTARRRYTRRKNRICYLQEIFSNEMAKVDDSFFHRLEESFLVEEDKKHERHPIFGNIVDEVAYHEKYPTIYHLRKKLVDSTDKADLRLIYLALAHMIKFRGHFLIEGDLNPDNSDVDKLFIQLVQTYNQLFEENPINASGVDAKAILSARLSKSRRLENLIAQLPGEKKNGLFGNLIALSLGLTPNFKSNFDLAEDAKLQLSKDTYDDDLDNLLAQIGDQYADLFLAAKNLSDAILLSDILRVNTEITKAPLSASMIKRYDEHHQDLTLLKALVRQQLPEKYKEIFFDQSKNGYAGYIDGGASQEEFYKFIKPILEKMDGTEELLVKLNREDLLRKQRTFDNGSIPHQIHLGELHAILRRQEDFYPFLKDNREKIEKILTFRIPYYVGPLARGNSRFAWMTRKSEETITPWNFEEVVDKGASAQSFIERMTNFDKNLPNEKVLPKHSLLYEYFTVYNELTKVKYVTEGMRKPAFLSGEQKKAIVDLLFKTNRKVTVKQLKEDYFKKIECFDSVEISGVEDRFNASLGTYHDLLKIIKDKDFLDNEENEDILEDIVLTLTLFEDREMIEERLKTYAHLFDDKVMKQLKRRRYTGWGRLSRKLINGIRDKQSGKTILDFLKSDGFANRNFMQLIHDDSLTFKEDIQKAQVSGQGDSLHEHIANLAGSPAIKKGILQTVKVVDELVKVMGRHKPENIVIEMARENQTTQKGQKNSRERMKRIEEGIKELGSQILKEHPVENTQLQNEKLYLYYLQNGRDMYVDQELDINRLSDYDVDHIVPQSFLKDDSIDNKVLTRSDKARGKSDNVPSEEVVKKMKNYWRQLLNAKLITQRKFDNLTKAERGGLSELDKAGFIKRQLVETRQITKHVAQILDSRMNTKYDENDKLIREVKVITLKSKLVSDFRKDFQFYKVREINNYHHAHDAYLNAVVGTALIKKYPKLESEFVYGDYKVYDVRKMIAKSEQEIGKATAKYFFYSNIMNFFKTEITLANGEIRKRPLIETNGETGEIVWDKGRDFATVRKVLSMPQVNIVKKTEVQTGGFSKESILPKRNSDKLIARKKDWDPKKYGGFDSPTVAYSVLVVAKVEKGKSKKLKSVKELLGITIMERSSFEKNPIDFLEAKGYKEVKKDLIIKLPKYSLFELENGRKRMLASAGELQKGNELALPSKYVNFLYLASHYEKLKGSPEDNEQKQLFVEQHKHYLDEIIEQISEFSKRVILADANLDKVLSAYNKHRDKPIREQAENIIHLFTLTNLGAPAAFKYFDTTIDRKRYTSTKEVLDATLIHQSITGLYETRIDLSQLGGDGGGSSGSSGSSGSSGGTLQLDDEYRLYSPLVKPDQNIQFWLEQFPQAWAETAGMGLAKQVPPQVIQLKASATPVSVRQYPLSKEAQEGIRPHVQRLIQQGILVPVQSPWNTPLLPVRKPGTNDYRPVQDLREVNKRVQDIHPTVPNPYNLLCALPPQRSWYTVLDLKDAFFCLRLHPTSQPLFAFEWRDPGTGRTGQLTWTRLPQGFKNSPTIFDEALHRDLANFRIQHPQVTLLQYVDDLLLAGATKQDCLEGTKALLLELSDLGYRASAKKAQICRREVTYLGYSLRDGQRWLTEARKKTVVQIPAPTTAKQVREFLGTAGFCRLWIPGFATLAAPLYPLTKEKGEFSWAPEHQKAFDAIKKALLSAPALALPDVTKPFTLYVDERKGVARGVLTQTLGPWRRPVAYLSKKLDPVASGWPVCLKAIAAVAILVKDADKLTLGQNITVIAPHALENIVRQPPDRWMTNARMTHYQSLLLTERVTFAPPAALNPATLLPEETDEPVTHDCHQLLIEETGVRKDLTDIPLTGEVLTWFTDGSSYVVEGKRMAGAAVVDGTRTIWASSLPEGTSAQKAELMALTQALRLAEGKSINIYTDSRYAFATAHVHGAIYKQRGLLTSAGREIKNKEEILSLLEALHLPKRLAIIHCPGHQKAKDPISRGNQMADRVAKQAAQGVNLLAGKRTADGSEFEKRTADGSEFESPKKKAKVE

SEQ ID NO: 104 - protein, 2090 aa, synthetic construct
MPAAKRVKLDGGDKKYSIGLDIGTNSVGWAVITDEYKVPSKKFKVLGNTDRHSIKKNLIGALLFDSGETAEATRLKRTARRRYTRRKNRICYLQEIFSNEMAKVDDSFFHRLEESFLVEEDKKHERHPIFGNIVDEVAYHEKYPTIYHLRKKLVDSTDKADLRLIYLALAHMIKFRGHFLIEGDLNPDNSDVDKLFIQLVQTYNQLFEENPINASGVDAKAILSARLSKSRRLENLIAQLPGEKKNGLFGNLIALSLGLTPNFKSNFDLAEDAKLQLSKDTYDDDLDNLLAQIGDQYADLFLAAKNLSDAILLSDILRVNTEITKAPLSASMIKRYDEHHQDLTLLKALVRQQLPEKYKEIFFDQSKNGYAGYIDGGASQEEFYKFIKPILEKMDGTEELLVKLNREDLLRKQRTFDNGSIPHQIHLGELHAILRRQEDFYPFLKDNREKIEKILTFRIPYYVGPLARGNSRFAWMTRKSEETITPWNFEEVVDKGASAQSFIERMTNFDKNLPNEKVLPKHSLLYEYFTVYNELTKVKYVTEGMRKPAFLSGEQKKAIVDLLFKTNRKVTVKQLKEDYFKKIECFDSVEISGVEDRFNASLGTYHDLLKIIKDKDFLDNEENEDILEDIVLTLTLFEDREMIEERLKTYAHLFDDKVMKQLKRRRYTGWGRLSRKLINGIRDKQSGKTILDFLKSDGFANRNFMQLIHDDSLTFKEDIQKAQVSGQGDSLHEHIANLAGSPAIKKGILQTVKVVDELVKVMGRHKPENIVIEMARENQTTQKGQKNSRERMKRIEEGIKELGSQILKEHPVENTQLQNEKLYLYYLQNGRDMYVDQELDINRLSDYDVDHIVPQSFLKDDSIDNKVLTRSDKARGKSDNVPSEEVVKKMKNYWRQLLNAKLITQRKFDNLTKAERGGLSELDKAGFIKRQLVETRQITKHVAQILDSRMNTKYDENDKLIREVKVITLKSKLVSDFRKDFQFYKVREINNYHHAHDAYLNAVVGTALIKKYPKLESEFVYGDYKVYDVRKMIAKSEQEIGKATAKYFFYSNIMNFFKTEITLANGEIRKRPLIETNGETGEIVWDKGRDFATVRKVLSMPQVNIVKKTEVQTGGFSKESILPKRNSDKLIARKKDWDPKKYGGFDSPTVAYSVLVVAKVEKGKSKKLKSVKELLGITIMERSSFEKNPIDFLEAKGYKEVKKDLIIKLPKYSLFELENGRKRMLASAGELQKGNELALPSKYVNFLYLASHYEKLKGSPEDNEQKQLFVEQHKHYLDEIIEQISEFSKRVILADANLDKVLSAYNKHRDKPIREQAENIIHLFTLTNLGAPAAFKYFDTTIDRKRYTSTKEVLDATLIHQSITGLYETRIDLSQLGGDGGPAPGSSEAAAKGGTLQLDDEYRLYSPLVKPDQNIQFWLEQFPQAWAETAGMGLAKQVPPQVIQLKASATPVSVRQYPLSKEAQEGIRPHVQRLIQQGILVPVQSPWNTPLLPVRKPGTNDYRPVQDLREVNKRVQDIHPTVPNPYNLLCALPPQRSWYTVLDLKDAFFCLRLHPTSQPLFAFEWRDPGTGRTGQLTWTRLPQGFKNSPTIFDEALHRDLANFRIQHPQVTLLQYVDDLLLAGATKQDCLEGTKALLLELSDLGYRASAKKAQICRREVTYLGYSLRDGQRWLTEARKKTVVQIPAPTTAKQVREFLGTAGFCRLWIPGFATLAAPLYPLTKEKGEFSWAPEHQKAFDAIKKALLSAPALALPDVTKPFTLYVDERKGVARGVLTQTLGPWRRPVAYLSKKLDPVASGWPVCLKAIAAVAILVKDADKLTLGQNITVIAPHALENIVRQPPDRWMTNARMTHYQSLLLTERVTFAPPAALNPATLLPEETDEPVTHDCHQLLIEETGVRKDLTDIPLTGEVLTWFTDGSSYVVEGKRMAGAAVVDGTRTIWASSLPEGTSAQKAELMALTQALRLAEGKSINIYTDSRYAFATAHVHGAIYKQRGLLTSAGREIKNKEEILSLLEALHLPKRLAIIHCPGHQKAKDPISRGNQMADRVAKQAAQGVNLLAGKRTADGSEFEKRTADGSEFESPKKKAKVE

SEQ ID NO: 105 - protein, 2085 aa, synthetic construct
MPAAKRVKLDGGDKKYSIGLDIGTNSVGWAVITDEYKVPSKKFKVLGNTDRHSIKKNLIGALLFDSGETAEATRLKRTARRRYTRRKNRICYLQEIFSNEMAKVDDSFFHRLEESFLVEEDKKHERHPIFGNIVDEVAYHEKYPTIYHLRKKLVDSTDKADLRLIYLALAHMIKFRGHFLIEGDLNPDNSDVDKLFIQLVQTYNQLFEENPINASGVDAKAILSARLSKSRRLENLIAQLPGEKKNGLFGNLIALSLGLTPNFKSNFDLAEDAKLQLSKDTYDDDLDNLLAQIGDQYADLFLAAKNLSDAILLSDILRVNTEITKAPLSASMIKRYDEHHQDLTLLKALVRQQLPEKYKEIFFDQSKNGYAGYIDGGASQEEFYKFIKPILEKMDGTEELLVKLNREDLLRKQRTFDNGSIPHQIHLGELHAILRRQEDFYPFLKDNREKIEKILTFRIPYYVGPLARGNSRFAWMTRKSEETITPWNFEEVVDKGASAQSFIERMTNFDKNLPNEKVLPKHSLLYEYFTVYNELTKVKYVTEGMRKPAFLSGEQKKAIVDLLFKTNRKVTVKQLKEDYFKKIECFDSVEISGVEDRFNASLGTYHDLLKIIKDKDFLDNEENEDILEDIVLTLTLFEDREMIEERLKTYAHLFDDKVMKQLKRRRYTGWGRLSRKLINGIRDKQSGKTILDFLKSDGFANRNFMQLIHDDSLTFKEDIQKAQVSGQGDSLHEHIANLAGSPAIKKGILQTVKVVDELVKVMGRHKPENIVIEMARENQTTQKGQKNSRERMKRIEEGIKELGSQILKEHPVENTQLQNEKLYLYYLQNGRDMYVDQELDINRLSDYDVDHIVPQSFLKDDSIDNKVLTRSDKARGKSDNVPSEEVVKKMKNYWRQLLNAKLITQRKFDNLTKAERGGLSELDKAGFIKRQLVETRQITKHVAQILDSRMNTKYDENDKLIREVKVITLKSKLVSDFRKDFQFYKVREINNYHHAHDAYLNAVVGTALIKKYPKLESEFVYGDYKVYDVRKMIAKSEQEIGKATAKYFFYSNIMNFFKTEITLANGEIRKRPLIETNGETGEIVWDKGRDFATVRKVLSMPQVNIVKKTEVQTGGFSKESILPKRNSDKLIARKKDWDPKKYGGFDSPTVAYSVLVVAKVEKGKSKKLKSVKELLGITIMERSSFEKNPIDFLEAKGYKEVKKDLIIKLPKYSLFELENGRKRMLASAGELQKGNELALPSKYVNFLYLASHYEKLKGSPEDNEQKQLFVEQHKHYLDEIIEQISEFSKRVILADANLDKVLSAYNKHRDKPIREQAENIIHLFTLTNLGAPAAFKYFDTTIDRKRYTSTKEVLDATLIHQSITGLYETRIDLSQLGGDGGGGSGSSGGTLQLDDEYRLYSPLVKPDQNIQFWLEQFPQAWAETAGMGLAKQVPPQVIQLKASATPVSVRQYPLSKEAQEGIRPHVQRLIQQGILVPVQSPWNTPLLPVRKPGTNDYRPVQDLREVNKRVQDIHPTVPNPYNLLCALPPQRSWYTVLDLKDAFFCLRLHPTSQPLFAFEWRDPGTGRTGQLTWTRLPQGFKNSPTIFDEALHRDLANFRIQHPQVTLLQYVDDLLLAGATKQDCLEGTKALLLELSDLGYRASAKKAQICRREVTYLGYSLRDGQRWLTEARKKTVVQIPAPTTAKQVREFLGTAGFCRLWIPGFATLAAPLYPLTKEKGEFSWAPEHQKAFDAIKKALLSAPALALPDVTKPFTLYVDERKGVARGVLTQTLGPWRRPVAYLSKKLDPVASGWPVCLKAIAAVAILVKDADKLTLGQNITVIAPHALENIVRQPPDRWMTNARMTHYQSLLLTERVTFAPPAALNPATLLPEETDEPVTHDCHQLLIEETGVRKDLTDIPLTGEVLTWFTDGSSYVVEGKRMAGAAVVDGTRTIWASSLPEGTSAQKAELMALTQALRLAEGKSINIYTDSRYAFATAHVHGAIYKQRGLLTSAGREIKNKEEILSLLEALHLPKRLAIIHCPGHQKAKDPISRGNQMADRVAKQAAQGVNLLAGKRTADGSEFEKRTADGSEFESPKKKAKVE

SEQ ID NO: 106 - protein, 2088 aa, synthetic construct
MPAAKRVKLDGGDKKYSIGLDIGTNSVGWAVITDEYKVPSKKFKVLGNTDRHSIKKNLIGALLFDSGETAEATRLKRTARRRYTRRKNRICYLQEIFSNEMAKVDDSFFHRLEESFLVEEDKKHERHPIFGNIVDEVAYHEKYPTIYHLRKKLVDSTDKADLRLIYLALAHMIKFRGHFLIEGDLNPDNSDVDKLFIQLVQTYNQLFEENPINASGVDAKAILSARLSKSRRLENLIAQLPGEKKNGLFGNLIALSLGLTPNFKSNFDLAEDAKLQLSKDTYDDDLDNLLAQIGDQYADLFLAAKNLSDAILLSDILRVNTEITKAPLSASMIKRYDEHHQDLTLLKALVRQQLPEKYKEIFFDQSKNGYAGYIDGGASQEEFYKFIKPILEKMDGTEELLVKLNREDLLRKQRTFDNGSIPHQIHLGELHAILRRQEDFYPFLKDNREKIEKILTFRIPYYVGPLARGNSRFAWMTRKSEETITPWNFEEVVDKGASAQSFIERMTNFDKNLPNEKVLPKHSLLYEYFTVYNELTKVKYVTEGMRKPAFLSGEQKKAIVDLLFKTNRKVTVKQLKEDYFKKIECFDSVEISGVEDRFNASLGTYHDLLKIIKDKDFLDNEENEDILEDIVLTLTLFEDREMIEERLKTYAHLFDDKVMKQLKRRRYTGWGRLSRKLINGIRDKQSGKTILDFLKSDGFANRNFMQLIHDDSLTFKEDIQKAQVSGQGDSLHEHIANLAGSPAIKKGILQTVKVVDELVKVMGRHKPENIVIEMARENQTTQKGQKNSRERMKRIEEGIKELGSQILKEHPVENTQLQNEKLYLYYLQNGRDMYVDQELDINRLSDYDVDHIVPQSFLKDDSIDNKVLTRSDKARGKSDNVPSEEVVKKMKNYWRQLLNAKLITQRKFDNLTKAERGGLSELDKAGFIKRQLVETRQITKHVAQILDSRMNTKYDENDKLIREVKVITLKSKLVSDFRKDFQFYKVREINNYHHAHDAYLNAVVGTALIKKYPKLESEFVYGDYKVYDVRKMIAKSEQEIGKATAKYFFYSNIMNFFKTEITLANGEIRKRPLIETNGETGEIVWDKGRDFATVRKVLSMPQVNIVKKTEVQTGGFSKESILPKRNSDKLIARKKDWDPKKYGGFDSPTVAYSVLVVAKVEKGKSKKLKSVKELLGITIMERSSFEKNPIDFLEAKGYKEVKKDLIIKLPKYSLFELENGRKRMLASAGELQKGNELALPSKYVNFLYLASHYEKLKGSPEDNEQKQLFVEQHKHYLDEIIEQISEFSKRVILADANLDKVLSAYNKHRDKPIREQAENIIHLFTLTNLGAPAAFKYFDTTIDRKRYTSTKEVLDATLIHQSITGLYETRIDLSQLGGDGGPAPGSSGGGGGTLQLDDEYRLYSPLVKPDQNIQFWLEQFPQAWAETAGMGLAKQVPPQVIQLKASATPVSVRQYPLSKEAQEGIRPHVQRLIQQGILVPVQSPWNTPLLPVRKPGTNDYRPVQDLREVNKRVQDIHPTVPNPYNLLCALPPQRSWYTVLDLKDAFFCLRLHPTSQPLFAFEWRDPGTGRTGQLTWTRLPQGFKNSPTIFDEALHRDLANFRIQHPQVTLLQYVDDLLLAGATKQDCLEGTKALLLELSDLGYRASAKKAQICRREVTYLGYSLRDGQRWLTEARKKTVVQIPAPTTAKQVREFLGTAGFCRLWIPGFATLAAPLYPLTKEKGEFSWAPEHQKAFDAIKKALLSAPALALPDVTKPFTLYVDERKGVARGVLTQTLGPWRRPVAYLSKKLDPVASGWPVCLKAIAAVAILVKDADKLTLGQNITVIAPHALENIVRQPPDRWMTNARMTHYQSLLLTERVTFAPPAALNPATLLPEETDEPVTHDCHQLLIEETGVRKDLTDIPLTGEVLTWFTDGSSYVVEGKRMAGAAVVDGTRTIWASSLPEGTSAQKAELMALTQALRLAEGKSINIYTDSRYAFATAHVHGAIYKQRGLLTSAGREIKNKEEILSLLEALHLPKRLAIIHCPGHQKAKDPISRGNQMADRVAKQAAQGVNLLAGKRTADGSEFEKRTADGSEFESPKKKAKVE

SEQ ID NO: 107 - protein, 2088 aa, synthetic construct
MPAAKRVKLDGGDKKYSIGLDIGTNSVGWAVITDEYKVPSKKFKVLGNTDRHSIKKNLIGALLFDSGETAEATRLKRTARRRYTRRKNRICYLQEIFSNEMAKVDDSFFHRLEESFLVEEDKKHERHPIFGNIVDEVAYHEKYPTIYHLRKKLVDSTDKADLRLIYLALAHMIKFRGHFLIEGDLNPDNSDVDKLFIQLVQTYNQLFEENPINASGVDAKAILSARLSKSRRLENLIAQLPGEKKNGLFGNLIALSLGLTPNFKSNFDLAEDAKLQLSKDTYDDDLDNLLAQIGDQYADLFLAAKNLSDAILLSDILRVNTEITKAPLSASMIKRYDEHHQDLTLLKALVRQQLPEKYKEIFFDQSKNGYAGYIDGGASQEEFYKFIKPILEKMDGTEELLVKLNREDLLRKQRTFDNGSIPHQIHLGELHAILRRQEDFYPFLKDNREKIEKILTFRIPYYVGPLARGNSRFAWMTRKSEETITPWNFEEVVDKGASAQSFIERMTNFDKNLPNEKVLPKHSLLYEYFTVYNELTKVKYVTEGMRKPAFLSGEQKKAIVDLLFKTNRKVTVKQLKEDYFKKIECFDSVEISGVEDRFNASLGTYHDLLKIIKDKDFLDNEENEDILEDIVLTLTLFEDREMIEERLKTYAHLFDDKVMKQLKRRRYTGWGRLSRKLINGIRDKQSGKTILDFLKSDGFANRNFMQLIHDDSLTFKEDIQKAQVSGQGDSLHEHIANLAGSPAIKKGILQTVKVVDELVKVMGRHKPENIVIEMARENQTTQKGQKNSRERMKRIEEGIKELGSQILKEHPVENTQLQNEKLYLYYLQNGRDMYVDQELDINRLSDYDVDHIVPQSFLKDDSIDNKVLTRSDKARGKSDNVPSEEVVKKMKNYWRQLLNAKLITQRKFDNLTKAERGGLSELDKAGFIKRQLVETRQITKHVAQILDSRMNTKYDENDKLIREVKVITLKSKLVSDFRKDFQFYKVREINNYHHAHDAYLNAVVGTALIKKYPKLESEFVYGDYKVYDVRKMIAKSEQEIGKATAKYFFYSNIMNFFKTEITLANGEIRKRPLIETNGETGEIVWDKGRDFATVRKVLSMPQVNIVKKTEVQTGGFSKESILPKRNSDKLIARKKDWDPKKYGGFDSPTVAYSVLVVAKVEKGKSKKLKSVKELLGITIMERSSFEKNPIDFLEAKGYKEVKKDLIIKLPKYSLFELENGRKRMLASAGELQKGNELALPSKYVNFLYLASHYEKLKGSPEDNEQKQLFVEQHKHYLDEIIEQISEFSKRVILADANLDKVLSAYNKHRDKPIREQAENIIHLFTLTNLGAPAAFKYFDTTIDRKRYTSTKEVLDATLIHQSITGLYETRIDLSQLGGDGGGGGPAPGSSGGTLQLDDEYRLYSPLVKPDQNIQFWLEQFPQAWAETAGMGLAKQVPPQVIQLKASATPVSVRQYPLSKEAQEGIRPHVQRLIQQGILVPVQSPWNTPLLPVRKPGTNDYRPVQDLREVNKRVQDIHPTVPNPYNLLCALPPQRSWYTVLDLKDAFFCLRLHPTSQPLFAFEWRDPGTGRTGQLTWTRLPQGFKNSPTIFDEALHRDLANFRIQHPQVTLLQYVDDLLLAGATKQDCLEGTKALLLELSDLGYRASAKKAQICRREVTYLGYSLRDGQRWLTEARKKTVVQIPAPTTAKQVREFLGTAGFCRLWIPGFATLAAPLYPLTKEKGEFSWAPEHQKAFDAIKKALLSAPALALPDVTKPFTLYVDERKGVARGVLTQTLGPWRRPVAYLSKKLDPVASGWPVCLKAIAAVAILVKDADKLTLGQNITVIAPHALENIVRQPPDRWMTNARMTHYQSLLLTERVTFAPPAALNPATLLPEETDEPVTHDCHQLLIEETGVRKDLTDIPLTGEVLTWFTDGSSYVVEGKRMAGAAVVDGTRTIWASSLPEGTSAQKAELMALTQALRLAEGKSINIYTDSRYAFATAHVHGAIYKQRGLLTSAGREIKNKEEILSLLEALHLPKRLAIIHCPGHQKAKDPISRGNQMADRVAKQAAQGVNLLAGKRTADGSEFEKRTADGSEFESPKKKAKVE

SEQ ID NO: 108 - protein, 2090 aa, synthetic construct
MPAAKRVKLDGGDKKYSIGLDIGTNSVGWAVITDEYKVPSKKFKVLGNTDRHSIKKNLIGALLFDSGETAEATRLKRTARRRYTRRKNRICYLQEIFSNEMAKVDDSFFHRLEESFLVEEDKKHERHPIFGNIVDEVAYHEKYPTIYHLRKKLVDSTDKADLRLIYLALAHMIKFRGHFLIEGDLNPDNSDVDKLFIQLVQTYNQLFEENPINASGVDAKAILSARLSKSRRLENLIAQLPGEKKNGLFGNLIALSLGLTPNFKSNFDLAEDAKLQLSKDTYDDDLDNLLAQIGDQYADLFLAAKNLSDAILLSDILRVNTEITKAPLSASMIKRYDEHHQDLTLLKALVRQQLPEKYKEIFFDQSKNGYAGYIDGGASQEEFYKFIKPILEKMDGTEELLVKLNREDLLRKQRTFDNGSIPHQIHLGELHAILRRQEDFYPFLKDNREKIEKILTFRIPYYVGPLARGNSRFAWMTRKSEETITPWNFEEVVDKGASAQSFIERMTNFDKNLPNEKVLPKHSLLYEYFTVYNELTKVKYVTEGMRKPAFLSGEQKKAIVDLLFKTNRKVTVKQLKEDYFKKIECFDSVEISGVEDRFNASLGTYHDLLKIIKDKDFLDNEENEDILEDIVLTLTLFEDREMIEERLKTYAHLFDDKVMKQLKRRRYTGWGRLSRKLINGIRDKQSGKTILDFLKSDGFANRNFMQLIHDDSLTFKEDIQKAQVSGQGDSLHEHIANLAGSPAIKKGILQTVKVVDELVKVMGRHKPENIVIEMARENQTTQKGQKNSRERMKRIEEGIKELGSQILKEHPVENTQLQNEKLYLYYLQNGRDMYVDQELDINRLSDYDVDHIVPQSFLKDDSIDNKVLTRSDKARGKSDNVPSEEVVKKMKNYWRQLLNAKLITQRKFDNLTKAERGGLSELDKAGFIKRQLVETRQITKHVAQILDSRMNTKYDENDKLIREVKVITLKSKLVSDFRKDFQFYKVREINNYHHAHDAYLNAVVGTALIKKYPKLESEFVYGDYKVYDVRKMIAKSEQEIGKATAKYFFYSNIMNFFKTEITLANGEIRKRPLIETNGETGEIVWDKGRDFATVRKVLSMPQVNIVKKTEVQTGGFSKESILPKRNSDKLIARKKDWDPKKYGGFDSPTVAYSVLVVAKVEKGKSKKLKSVKELLGITIMERSSFEKNPIDFLEAKGYKEVKKDLIIKLPKYSLFELENGRKRMLASAGELQKGNELALPSKYVNFLYLASHYEKLKGSPEDNEQKQLFVEQHKHYLDEIIEQISEFSKRVILADANLDKVLSAYNKHRDKPIREQAENIIHLFTLTNLGAPAAFKYFDTTIDRKRYTSTKEVLDATLIHQSITGLYETRIDLSQLGGDGGGGGEAAAKPAPGGTLQLDDEYRLYSPLVKPDQNIQFWLEQFPQAWAETAGMGLAKQVPPQVIQLKASATPVSVRQYPLSKEAQEGIRPHVQRLIQQGILVPVQSPWNTPLLPVRKPGTNDYRPVQDLREVNKRVQDIHPTVPNPYNLLCALPPQRSWYTVLDLKDAFFCLRLHPTSQPLFAFEWRDPGTGRTGQLTWTRLPQGFKNSPTIFDEALHRDLANFRIQHPQVTLLQYVDDLLLAGATKQDCLEGTKALLLELSDLGYRASAKKAQICRREVTYLGYSLRDGQRWLTEARKKTVVQIPAPTTAKQVREFLGTAGFCRLWIPGFATLAAPLYPLTKEKGEFSWAPEHQKAFDAIKKALLSAPALALPDVTKPFTLYVDERKGVARGVLTQTLGPWRRPVAYLSKKLDPVASGWPVCLKAIAAVAILVKDADKLTLGQNITVIAPHALENIVRQPPDRWMTNARMTHYQSLLLTERVTFAPPAALNPATLLPEETDEPVTHDCHQLLIEETGVRKDLTDIPLTGEVLTWFTDGSSYVVEGKRMAGAAVVDGTRTIWASSLPEGTSAQKAELMALTQALRLAEGKSINIYTDSRYAFATAHVHGAIYKQRGLLTSAGREIKNKEEILSLLEALHLPKRLAIIHCPGHQKAKDPISRGNQMADRVAKQAAQGVNLLAGKRTADGSEFEKRTADGSEFESPKKKAKVE

SEQ ID NO: 109 - protein, 2085 aa, synthetic construct
MPAAKRVKLDGGDKKYSIGLDIGTNSVGWAVITDEYKVPSKKFKVLGNTDRHSIKKNLIGALLFDSGETAEATRLKRTARRRYTRRKNRICYLQEIFSNEMAKVDDSFFHRLEESFLVEEDKKHERHPIFGNIVDEVAYHEKYPTIYHLRKKLVDSTDKADLRLIYLALAHMIKFRGHFLIEGDLNPDNSDVDKLFIQLVQTYNQLFEENPINASGVDAKAILSARLSKSRRLENLIAQLPGEKKNGLFGNLIALSLGLTPNFKSNFDLAEDAKLQLSKDTYDDDLDNLLAQIGDQYADLFLAAKNLSDAILLSDILRVNTEITKAPLSASMIKRYDEHHQDLTLLKALVRQQLPEKYKEIFFDQSKNGYAGYIDGGASQEEFYKFIKPILEKMDGTEELLVKLNREDLLRKQRTFDNGSIPHQIHLGELHAILRRQEDFYPFLKDNREKIEKILTFRIPYYVGPLARGNSRFAWMTRKSEETITPWNFEEVVDKGASAQSFIERMTNFDKNLPNEKVLPKHSLLYEYFTVYNELTKVKYVTEGMRKPAFLSGEQKKAIVDLLFKTNRKVTVKQLKEDYFKKIECFDSVEISGVEDRFNASLGTYHDLLKIIKDKDFLDNEENEDILEDIVLTLTLFEDREMIEERLKTYAHLFDDKVMKQLKRRRYTGWGRLSRKLINGIRDKQSGKTILDFLKSDGFANRNFMQLIHDDSLTFKEDIQKAQVSGQGDSLHEHIANLAGSPAIKKGILQTVKVVDELVKVMGRHKPENIVIEMARENQTTQKGQKNSRERMKRIEEGIKELGSQILKEHPVENTQLQNEKLYLYYLQNGRDMYVDQELDINRLSDYDVDHIVPQSFLKDDSIDNKVLTRSDKARGKSDNVPSEEVVKKMKNYWRQLLNAKLITQRKFDNLTKAERGGLSELDKAGFIKRQLVETRQITKHVAQILDSRMNTKYDENDKLIREVKVITLKSKLVSDFRKDFQFYKVREINNYHHAHDAYLNAVVGTALIKKYPKLESEFVYGDYKVYDVRKMIAKSEQEIGKATAKYFFYSNIMNFFKTEITLANGEIRKRPLIETNGETGEIVWDKGRDFATVRKVLSMPQVNIVKKTEVQTGGFSKESILPKRNSDKLIARKKDWDPKKYGGFDSPTVAYSVLVVAKVEKGKSKKLKSVKELLGITIMERSSFEKNPIDFLEAKGYKEVKKDLIIKLPKYSLFELENGRKRMLASAGELQKGNELALPSKYVNFLYLASHYEKLKGSPEDNEQKQLFVEQHKHYLDEIIEQISEFSKRVILADANLDKVLSAYNKHRDKPIREQAENIIHLFTLTNLGAPAAFKYFDTTIDRKRYTSTKEVLDATLIHQSITGLYETRIDLSQLGGDGGGGSPAPGGTLQLDDEYRLYSPLVKPDQNIQFWLEQFPQAWAETAGMGLAKQVPPQVIQLKASATPVSVRQYPLSKEAQEGIRPHVQRLIQQGILVPVQSPWNTPLLPVRKPGTNDYRPVQDLREVNKRVQDIHPTVPNPYNLLCALPPQRSWYTVLDLKDAFFCLRLHPTSQPLFAFEWRDPGTGRTGQLTWTRLPQGFKNSPTIFDEALHRDLANFRIQHPQVTLLQYVDDLLLAGATKQDCLEGTKALLLELSDLGYRASAKKAQICRREVTYLGYSLRDGQRWLTEARKKTVVQIPAPTTAKQVREFLGTAGFCRLWIPGFATLAAPLYPLTKEKGEFSWAPEHQKAFDAIKKALLSAPALALPDVTKPFTLYVDERKGVARGVLTQTLGPWRRPVAYLSKKLDPVASGWPVCLKAIAAVAILVKDADKLTLGQNITVIAPHALENIVRQPPDRWMTNARMTHYQSLLLTERVTFAPPAALNPATLLPEETDEPVTHDCHQLLIEETGVRKDLTDIPLTGEVLTWFTDGSSYVVEGKRMAGAAVVDGTRTIWASSLPEGTSAQKAELMALTQALRLAEGKSINIYTDSRYAFATAHVHGAIYKQRGLLTSAGREIKNKEEILSLLEALHLPKRLAIIHCPGHQKAKDPISRGNQMADRVAKQAAQGVNLLAGKRTADGSEFEKRTADGSEFESPKKKAKVE

SEQ ID NO: 110 - protein, 2085 aa, synthetic construct
MPAAKRVKLDGGDKKYSIGLDIGTNSVGWAVITDEYKVPSKKFKVLGNTDRHSIKKNLIGALLFDSGETAEATRLKRTARRRYTRRKNRICYLQEIFSNEMAKVDDSFFHRLEESFLVEEDKKHERHPIFGNIVDEVAYHEKYPTIYHLRKKLVDSTDKADLRLIYLALAHMIKFRGHFLIEGDLNPDNSDVDKLFIQLVQTYNQLFEENPINASGVDAKAILSARLSKSRRLENLIAQLPGEKKNGLFGNLIALSLGLTPNFKSNFDLAEDAKLQLSKDTYDDDLDNLLAQIGDQYADLFLAAKNLSDAILLSDILRVNTEITKAPLSASMIKRYDEHHQDLTLLKALVRQQLPEKYKEIFFDQSKNGYAGYIDGGASQEEFYKFIKPILEKMDGTEELLVKLNREDLLRKQRTFDNGSIPHQIHLGELHAILRRQEDFYPFLKDNREKIEKILTFRIPYYVGPLARGNSRFAWMTRKSEETITPWNFEEVVDKGASAQSFIERMTNFDKNLPNEKVLPKHSLLYEYFTVYNELTKVKYVTEGMRKPAFLSGEQKKAIVDLLFKTNRKVTVKQLKEDYFKKIECFDSVEISGVEDRFNASLGTYHDLLKIIKDKDFLDNEENEDILEDIVLTLTLFEDREMIEERLKTYAHLFDDKVMKQLKRRRYTGWGRLSRKLINGIRDKQSGKTILDFLKSDGFANRNFMQLIHDDSLTFKEDIQKAQVSGQGDSLHEHIANLAGSPAIKKGILQTVKVVDELVKVMGRHKPENIVIEMARENQTTQKGQKNSRERMKRIEEGIKELGSQILKEHPVENTQLQNEKLYLYYLQNGRDMYVDQELDINRLSDYDVDHIVPQSFLKDDSIDNKVLTRSDKARGKSDNVPSEEVVKKMKNYWRQLLNAKLITQRKFDNLTKAERGGLSELDKAGFIKRQLVETRQITKHVAQILDSRMNTKYDENDKLIREVKVITLKSKLVSDFRKDFQFYKVREINNYHHAHDAYLNAVVGTALIKKYPKLESEFVYGDYKVYDVRKMIAKSEQEIGKATAKYFFYSNIMNFFKTEITLANGEIRKRPLIETNGETGEIVWDKGRDFATVRKVLSMPQVNIVKKTEVQTGGFSKESILPKRNSDKLIARKKDWDPKKYGGFDSPTVAYSVLVVAKVEKGKSKKLKSVKELLGITIMERSSFEKNPIDFLEAKGYKEVKKDLIIKLPKYSLFELENGRKRMLASAGELQKGNELALPSKYVNFLYLASHYEKLKGSPEDNEQKQLFVEQHKHYLDEIIEQISEFSKRVILADANLDKVLSAYNKHRDKPIREQAENIIHLFTLTNLGAPAAFKYFDTTIDRKRYTSTKEVLDATLIHQSITGLYETRIDLSQLGGDGGGSSGSSGGTLQLDDEYRLYSPLVKPDQNIQFWLEQFPQAWAETAGMGLAKQVPPQVIQLKASATPVSVRQYPLSKEAQEGIRPHVQRLIQQGILVPVQSPWNTPLLPVRKPGTNDYRPVQDLREVNKRVQDIHPTVPNPYNLLCALPPQRSWYTVLDLKDAFFCLRLHPTSQPLFAFEWRDPGTGRTGQLTWTRLPQGFKNSPTIFDEALHRDLANFRIQHPQVTLLQYVDDLLLAGATKQDCLEGTKALLLELSDLGYRASAKKAQICRREVTYLGYSLRDGQRWLTEARKKTVVQIPAPTTAKQVREFLGTAGFCRLWIPGFATLAAPLYPLTKEKGEFSWAPEHQKAFDAIKKALLSAPALALPDVTKPFTLYVDERKGVARGVLTQTLGPWRRPVAYLSKKLDPVASGWPVCLKAIAAVAILVKDADKLTLGQNITVIAPHALENIVRQPPDRWMTNARMTHYQSLLLTERVTFAPPAALNPATLLPEETDEPVTHDCHQLLIEETGVRKDLTDIPLTGEVLTWFTDGSSYVVEGKRMAGAAVVDGTRTIWASSLPEGTSAQKAELMALTQALRLAEGKSINIYTDSRYAFATAHVHGAIYKQRGLLTSAGREIKNKEEILSLLEALHLPKRLAIIHCPGHQKAKDPISRGNQMADRVAKQAAQGVNLLAGKRTADGSEFEKRTADGSEFESPKKKAKVE

SEQ ID NO: 111 - protein, 2091 aa, synthetic construct
MPAAKRVKLDGGDKKYSIGLDIGTNSVGWAVITDEYKVPSKKFKVLGNTDRHSIKKNLIGALLFDSGETAEATRLKRTARRRYTRRKNRICYLQEIFSNEMAKVDDSFFHRLEESFLVEEDKKHERHPIFGNIVDEVAYHEKYPTIYHLRKKLVDSTDKADLRLIYLALAHMIKFRGHFLIEGDLNPDNSDVDKLFIQLVQTYNQLFEENPINASGVDAKAILSARLSKSRRLENLIAQLPGEKKNGLFGNLIALSLGLTPNFKSNFDLAEDAKLQLSKDTYDDDLDNLLAQIGDQYADLFLAAKNLSDAILLSDILRVNTEITKAPLSASMIKRYDEHHQDLTLLKALVRQQLPEKYKEIFFDQSKNGYAGYIDGGASQEEFYKFIKPILEKMDGTEELLVKLNREDLLRKQRTFDNGSIPHQIHLGELHAILRRQEDFYPFLKDNREKIEKILTFRIPYYVGPLARGNSRFAWMTRKSEETITPWNFEEVVDKGASAQSFIERMTNFDKNLPNEKVLPKHSLLYEYFTVYNELTKVKYVTEGMRKPAFLSGEQKKAIVDLLFKTNRKVTVKQLKEDYFKKIECFDSVEISGVEDRFNASLGTYHDLLKIIKDKDFLDNEENEDILEDIVLTLTLFEDREMIEERLKTYAHLFDDKVMKQLKRRRYTGWGRLSRKLINGIRDKQSGKTILDFLKSDGFANRNFMQLIHDDSLTFKEDIQKAQVSGQGDSLHEHIANLAGSPAIKKGILQTVKVVDELVKVMGRHKPENIVIEMARENQTTQKGQKNSRERMKRIEEGIKELGSQILKEHPVENTQLQNEKLYLYYLQNGRDMYVDQELDINRLSDYDVDHIVPQSFLKDDSIDNKVLTRSDKARGKSDNVPSEEVVKKMKNYWRQLLNAKLITQRKFDNLTKAERGGLSELDKAGFIKRQLVETRQITKHVAQILDSRMNTKYDENDKLIREVKVITLKSKLVSDFRKDFQFYKVREINNYHHAHDAYLNAVVGTALIKKYPKLESEFVYGDYKVYDVRKMIAKSEQEIGKATAKYFFYSNIMNFFKTEITLANGEIRKRPLIETNGETGEIVWDKGRDFATVRKVLSMPQVNIVKKTEVQTGGFSKESILPKRNSDKLIARKKDWDPKKYGGFDSPTVAYSVLVVAKVEKGKSKKLKSVKELLGITIMERSSFEKNPIDFLEAKGYKEVKKDLIIKLPKYSLFELENGRKRMLASAGELQKGNELALPSKYVNFLYLASHYEKLKGSPEDNEQKQLFVEQHKHYLDEIIEQISEFSKRVILADANLDKVLSAYNKHRDKPIREQAENIIHLFTLTNLGAPAAFKYFDTTIDRKRYTSTKEVLDATLIHQSITGLYETRIDLSQLGGDGGGGSGGSGGSGGSGGTLQLDDEYRLYSPLVKPDQNIQFWLEQFPQAWAETAGMGLAKQVPPQVIQLKASATPVSVRQYPLSKEAQEGIRPHVQRLIQQGILVPVQSPWNTPLLPVRKPGTNDYRPVQDLREVNKRVQDIHPTVPNPYNLLCALPPQRSWYTVLDLKDAFFCLRLHPTSQPLFAFEWRDPGTGRTGQLTWTRLPQGFKNSPTIFDEALHRDLANFRIQHPQVTLLQYVDDLLLAGATKQDCLEGTKALLLELSDLGYRASAKKAQICRREVTYLGYSLRDGQRWLTEARKKTVVQIPAPTTAKQVREFLGTAGFCRLWIPGFATLAAPLYPLTKEKGEFSWAPEHQKAFDAIKKALLSAPALALPDVTKPFTLYVDERKGVARGVLTQTLGPWRRPVAYLSKKLDPVASGWPVCLKAIAAVAILVKDADKLTLGQNITVIAPHALENIVRQPPDRWMTNARMTHYQSLLLTERVTFAPPAALNPATLLPEETDEPVTHDCHQLLIEETGVRKDLTDIPLTGEVLTWFTDGSSYVVEGKRMAGAAVVDGTRTIWASSLPEGTSAQKAELMALTQALRLAEGKSINIYTDSRYAFATAHVHGAIYKQRGLLTSAGREIKNKEEILSLLEALHLPKRLAIIHCPGHQKAKDPISRGNQMADRVAKQAAQGVNLLAGKRTADGSEFEKRTADGSEFESPKKKAKVE

SEQ ID NO: 112 - protein, 2090 aa, synthetic construct
MPAAKRVKLDGGDKKYSIGLDIGTNSVGWAVITDEYKVPSKKFKVLGNTDRHSIKKNLIGALLFDSGETAEATRLKRTARRRYTRRKNRICYLQEIFSNEMAKVDDSFFHRLEESFLVEEDKKHERHPIFGNIVDEVAYHEKYPTIYHLRKKLVDSTDKADLRLIYLALAHMIKFRGHFLIEGDLNPDNSDVDKLFIQLVQTYNQLFEENPINASGVDAKAILSARLSKSRRLENLIAQLPGEKKNGLFGNLIALSLGLTPNFKSNFDLAEDAKLQLSKDTYDDDLDNLLAQIGDQYADLFLAAKNLSDAILLSDILRVNTEITKAPLSASMIKRYDEHHQDLTLLKALVRQQLPEKYKEIFFDQSKNGYAGYIDGGASQEEFYKFIKPILEKMDGTEELLVKLNREDLLRKQRTFDNGSIPHQIHLGELHAILRRQEDFYPFLKDNREKIEKILTFRIPYYVGPLARGNSRFAWMTRKSEETITPWNFEEVVDKGASAQSFIERMTNFDKNLPNEKVLPKHSLLYEYFTVYNELTKVKYVTEGMRKPAFLSGEQKKAIVDLLFKTNRKVTVKQLKEDYFKKIECFDSVEISGVEDRFNASLGTYHDLLKIIKDKDFLDNEENEDILEDIVLTLTLFEDREMIEERLKTYAHLFDDKVMKQLKRRRYTGWGRLSRKLINGIRDKQSGKTILDFLKSDGFANRNFMQLIHDDSLTFKEDIQKAQVSGQGDSLHEHIANLAGSPAIKKGILQTVKVVDELVKVMGRHKPENIVIEMARENQTTQKGQKNSRERMKRIEEGIKELGSQILKEHPVENTQLQNEKLYLYYLQNGRDMYVDQELDINRLSDYDVDHIVPQSFLKDDSIDNKVLTRSDKARGKSDNVPSEEVVKKMKNYWRQLLNAKLITQRKFDNLTKAERGGLSELDKAGFIKRQLVETRQITKHVAQILDSRMNTKYDENDKLIREVKVITLKSKLVSDFRKDFQFYKVREINNYHHAHDAYLNAVVGTALIKKYPKLESEFVYGDYKVYDVRKMIAKSEQEIGKATAKYFFYSNIMNFFKTEITLANGEIRKRPLIETNGETGEIVWDKGRDFATVRKVLSMPQVNIVKKTEVQTGGFSKESILPKRNSDKLIARKKDWDPKKYGGFDSPTVAYSVLVVAKVEKGKSKKLKSVKELLGITIMERSSFEKNPIDFLEAKGYKEVKKDLIIKLPKYSLFELENGRKRMLASAGELQKGNELALPSKYVNFLYLASHYEKLKGSPEDNEQKQLFVEQHKHYLDEIIEQISEFSKRVILADANLDKVLSAYNKHRDKPIREQAENIIHLFTLTNLGAPAAFKYFDTTIDRKRYTSTKEVLDATLIHQSITGLYETRIDLSQLGGDGGEAAAKGGGPAPGGTLQLDDEYRLYSPLVKPDQNIQFWLEQFPQAWAETAGMGLAKQVPPQVIQLKASATPVSVRQYPLSKEAQEGIRPHVQRLIQQGILVPVQSPWNTPLLPVRKPGTNDYRPVQDLREVNKRVQDIHPTVPNPYNLLCALPPQRSWYTVLDLKDAFFCLRLHPTSQPLFAFEWRDPGTGRTGQLTWTRLPQGFKNSPTIFDEALHRDLANFRIQHPQVTLLQYVDDLLLAGATKQDCLEGTKALLLELSDLGYRASAKKAQICRREVTYLGYSLRDGQRWLTEARKKTVVQIPAPTTAKQVREFLGTAGFCRLWIPGFATLAAPLYPLTKEKGEFSWAPEHQKAFDAIKKALLSAPALALPDVTKPFTLYVDERKGVARGVLTQTLGPWRRPVAYLSKKLDPVASGWPVCLKAIAAVAILVKDADKLTLGQNITVIAPHALENIVRQPPDRWMTNARMTHYQSLLLTERVTFAPPAALNPATLLPEETDEPVTHDCHQLLIEETGVRKDLTDIPLTGEVLTWFTDGSSYVVEGKRMAGAAVVDGTRTIWASSLPEGTSAQKAELMALTQALRLAEGKSINIYTDSRYAFATAHVHGAIYKQRGLLTSAGREIKNKEEILSLLEALHLPKRLAIIHCPGHQKAKDPISRGNQMADRVAKQAAQGVNLLAGKRTADGSEFEKRTADGSEFESPKKKAKVE

SEQ ID NO: 113 - protein, 2097 aa, synthetic construct
MPAAKRVKLDGGDKKYSIGLDIGTNSVGWAVITDEYKVPSKKFKVLGNTDRHSIKKNLIGALLFDSGETAEATRLKRTARRRYTRRKNRICYLQEIFSNEMAKVDDSFFHRLEESFLVEEDKKHERHPIFGNIVDEVAYHEKYPTIYHLRKKLVDSTDKADLRLIYLALAHMIKFRGHFLIEGDLNPDNSDVDKLFIQLVQTYNQLFEENPINASGVDAKAILSARLSKSRRLENLIAQLPGEKKNGLFGNLIALSLGLTPNFKSNFDLAEDAKLQLSKDTYDDDLDNLLAQIGDQYADLFLAAKNLSDAILLSDILRVNTEITKAPLSASMIKRYDEHHQDLTLLKALVRQQLPEKYKEIFFDQSKNGYAGYIDGGASQEEFYKFIKPILEKMDGTEELLVKLNREDLLRKQRTFDNGSIPHQIHLGELHAILRRQEDFYPFLKDNREKIEKILTFRIPYYVGPLARGNSRFAWMTRKSEETITPWNFEEVVDKGASAQSFIERMTNFDKNLPNEKVLPKHSLLYEYFTVYNELTKVKYVTEGMRKPAFLSGEQKKAIVDLLFKTNRKVTVKQLKEDYFKKIECFDSVEISGVEDRFNASLGTYHDLLKIIKDKDFLDNEENEDILEDIVLTLTLFEDREMIEERLKTYAHLFDDKVMKQLKRRRYTGWGRLSRKLINGIRDKQSGKTILDFLKSDGFANRNFMQLIHDDSLTFKEDIQKAQVSGQGDSLHEHIANLAGSPAIKKGILQTVKVVDELVKVMGRHKPENIVIEMARENQTTQKGQKNSRERMKRIEEGIKELGSQILKEHPVENTQLQNEKLYLYYLQNGRDMYVDQELDINRLSDYDVDHIVPQSFLKDDSIDNKVLTRSDKARGKSDNVPSEEVVKKMKNYWRQLLNAKLITQRKFDNLTKAERGGLSELDKAGFIKRQLVETRQITKHVAQILDSRMNTKYDENDKLIREVKVITLKSKLVSDFRKDFQFYKVREINNYHHAHDAYLNAVVGTALIKKYPKLESEFVYGDYKVYDVRKMIAKSEQEIGKATAKYFFYSNIMNFFKTEITLANGEIRKRPLIETNGETGEIVWDKGRDFATVRKVLSMPQVNIVKKTEVQTGGFSKESILPKRNSDKLIARKKDWDPKKYGGFDSPTVAYSVLVVAKVEKGKSKKLKSVKELLGITIMERSSFEKNPIDFLEAKGYKEVKKDLIIKLPKYSLFELENGRKRMLASAGELQKGNELALPSKYVNFLYLASHYEKLKGSPEDNEQKQLFVEQHKHYLDEIIEQISEFSKRVILADANLDKVLSAYNKHRDKPIREQAENIIHLFTLTNLGAPAAFKYFDTTIDRKRYTSTKEVLDATLIHQSITGLYETRIDLSQLGGDGGGSSGSSGSSGSSGSSGSSGGTLQLDDEYRLYSPLVKPDQNIQFWLEQFPQAWAETAGMGLAKQVPPQVIQLKASATPVSVRQYPLSKEAQEGIRPHVQRLIQQGILVPVQSPWNTPLLPVRKPGTNDYRPVQDLREVNKRVQDIHPTVPNPYNLLCALPPQRSWYTVLDLKDAFFCLRLHPTSQPLFAFEWRDPGTGRTGQLTWTRLPQGFKNSPTIFNEALHRDLANFRIQHPQVTLLQYVDDLLLAGATKQDCLEGTKALLLELSDLGYRASAKKAQICRREVTYLGYSLRDGQRWLTEARKKTVVQIPAPTTAKQVREFLGTAGFCRLWIPGFATLAAPLYPLTKPKGEFSWAPEHQKAFDAIKKALLSAPALALPDVTKPFTLYVDERKGVARGVLTQTLGPWRRPVAYLSKKLDPVASGWPVCLKAIAAVAILVKDADKLTLGQNITVIAPHALENIVRQPPDRWMTNARMTHYQSLLLTERVTFAPPAALNPATLLPEETDEPVTHDCHQLLIEETGVRKDLTDIPLTGEVLTWFTDGSSYVVEGKRMAGAAVVDGTRTIWASSLPEGTSAQKAELMALTQALRLAEGKSINIYTDSRYAFATAHVHGAIYKQRGWLTSAGREIKNKEEILSLLEALHLPKRLAIIHCPGHQKAKDPISRGNQMADRVAKQAAQGVNLLAGKRTADGSEFEKRTADGSEFESPKKKAKVE

SEQ ID NO: 114 - protein, 2087 aa, synthetic construct
MPAAKRVKLDGGDKKYSIGLDIGTNSVGWAVITDEYKVPSKKFKVLGNTDRHSIKKNLIGALLFDSGETAEATRLKRTARRRYTRRKNRICYLQEIFSNEMAKVDDSFFHRLEESFLVEEDKKHERHPIFGNIVDEVAYHEKYPTIYHLRKKLVDSTDKADLRLIYLALAHMIKFRGHFLIEGDLNPDNSDVDKLFIQLVQTYNQLFEENPINASGVDAKAILSARLSKSRRLENLIAQLPGEKKNGLFGNLIALSLGLTPNFKSNFDLAEDAKLQLSKDTYDDDLDNLLAQIGDQYADLFLAAKNLSDAILLSDILRVNTEITKAPLSASMIKRYDEHHQDLTLLKALVRQQLPEKYKEIFFDQSKNGYAGYIDGGASQEEFYKFIKPILEKMDGTEELLVKLNREDLLRKQRTFDNGSIPHQIHLGELHAILRRQEDFYPFLKDNREKIEKILTFRIPYYVGPLARGNSRFAWMTRKSEETITPWNFEEVVDKGASAQSFIERMTNFDKNLPNEKVLPKHSLLYEYFTVYNELTKVKYVTEGMRKPAFLSGEQKKAIVDLLFKTNRKVTVKQLKEDYFKKIECFDSVEISGVEDRFNASLGTYHDLLKIIKDKDFLDNEENEDILEDIVLTLTLFEDREMIEERLKTYAHLFDDKVMKQLKRRRYTGWGRLSRKLINGIRDKQSGKTILDFLKSDGFANRNFMQLIHDDSLTFKEDIQKAQVSGQGDSLHEHIANLAGSPAIKKGILQTVKVVDELVKVMGRHKPENIVIEMARENQTTQKGQKNSRERMKRIEEGIKELGSQILKEHPVENTQLQNEKLYLYYLQNGRDMYVDQELDINRLSDYDVDHIVPQSFLKDDSIDNKVLTRSDKARGKSDNVPSEEVVKKMKNYWRQLLNAKLITQRKFDNLTKAERGGLSELDKAGFIKRQLVETRQITKHVAQILDSRMNTKYDENDKLIREVKVITLKSKLVSDFRKDFQFYKVREINNYHHAHDAYLNAVVGTALIKKYPKLESEFVYGDYKVYDVRKMIAKSEQEIGKATAKYFFYSNIMNFFKTEITLANGEIRKRPLIETNGETGEIVWDKGRDFATVRKVLSMPQVNIVKKTEVQTGGFSKESILPKRNSDKLIARKKDWDPKKYGGFDSPTVAYSVLVVAKVEKGKSKKLKSVKELLGITIMERSSFEKNPIDFLEAKGYKEVKKDLIIKLPKYSLFELENGRKRMLASAGELQKGNELALPSKYVNFLYLASHYEKLKGSPEDNEQKQLFVEQHKHYLDEIIEQISEFSKRVILADANLDKVLSAYNKHRDKPIREQAENIIHLFTLTNLGAPAAFKYFDTTIDRKRYTSTKEVLDATLIHQSITGLYETRIDLSQLGGDGGGGGGGGGGGGTLQLDDEYRLYSPLVKPDQNIQFWLEQFPQAWAETAGMGLAKQVPPQVIQLKASATPVSVRQYPLSKEAQEGIRPHVQRLIQQGILVPVQSPWNTPLLPVRKPGTNDYRPVQDLREVNKRVQDIHPTVPNPYNLLCALPPQRSWYTVLDLKDAFFCLRLHPTSQPLFAFEWRDPGTGRTGQLTWTRLPQGFKNSPTIFNEALHRDLANFRIQHPQVTLLQYVDDLLLAGATKQDCLEGTKALLLELSDLGYRASAKKAQICRREVTYLGYSLRDGQRWLTEARKKTVVQIPAPTTAKQVREFLGTAGFCRLWIPGFATLAAPLYPLTKPKGEFSWAPEHQKAFDAIKKALLSAPALALPDVTKPFTLYVDERKGVARGVLTQTLGPWRRPVAYLSKKLDPVASGWPVCLKAIAAVAILVKDADKLTLGQNITVIAPHALENIVRQPPDRWMTNARMTHYQSLLLTERVTFAPPAALNPATLLPEETDEPVTHDCHQLLIEETGVRKDLTDIPLTGEVLTWFTDGSSYVVEGKRMAGAAVVDGTRTIWASSLPEGTSAQKAELMALTQALRLAEGKSINIYTDSRYAFATAHVHGAIYKQRGWLTSAGREIKNKEEILSLLEALHLPKRLAIIHCPGHQKAKDPISRGNQMADRVAKQAAQGVNLLAGKRTADGSEFEKRTADGSEFESPKKKAKVE

SEQ ID NO: 115 - protein, 2090 aa, synthetic construct
MPAAKRVKLDGGDKKYSIGLDIGTNSVGWAVITDEYKVPSKKFKVLGNTDRHSIKKNLIGALLFDSGETAEATRLKRTARRRYTRRKNRICYLQEIFSNEMAKVDDSFFHRLEESFLVEEDKKHERHPIFGNIVDEVAYHEKYPTIYHLRKKLVDSTDKADLRLIYLALAHMIKFRGHFLIEGDLNPDNSDVDKLFIQLVQTYNQLFEENPINASGVDAKAILSARLSKSRRLENLIAQLPGEKKNGLFGNLIALSLGLTPNFKSNFDLAEDAKLQLSKDTYDDDLDNLLAQIGDQYADLFLAAKNLSDAILLSDILRVNTEITKAPLSASMIKRYDEHHQDLTLLKALVRQQLPEKYKEIFFDQSKNGYAGYIDGGASQEEFYKFIKPILEKMDGTEELLVKLNREDLLRKQRTFDNGSIPHQIHLGELHAILRRQEDFYPFLKDNREKIEKILTFRIPYYVGPLARGNSRFAWMTRKSEETITPWNFEEVVDKGASAQSFIERMTNFDKNLPNEKVLPKHSLLYEYFTVYNELTKVKYVTEGMRKPAFLSGEQKKAIVDLLFKTNRKVTVKQLKEDYFKKIECFDSVEISGVEDRFNASLGTYHDLLKIIKDKDFLDNEENEDILEDIVLTLTLFEDREMIEERLKTYAHLFDDKVMKQLKRRRYTGWGRLSRKLINGIRDKQSGKTILDFLKSDGFANRNFMQLIHDDSLTFKEDIQKAQVSGQGDSLHEHIANLAGSPAIKKGILQTVKVVDELVKVMGRHKPENIVIEMARENQTTQKGQKNSRERMKRIEEGIKELGSQILKEHPVENTQLQNEKLYLYYLQNGRDMYVDQELDINRLSDYDVDHIVPQSFLKDDSIDNKVLTRSDKARGKSDNVPSEEVVKKMKNYWRQLLNAKLITQRKFDNLTKAERGGLSELDKAGFIKRQLVETRQITKHVAQILDSRMNTKYDENDKLIREVKVITLKSKLVSDFRKDFQFYKVREINNYHHAHDAYLNAVVGTALIKKYPKLESEFVYGDYKVYDVRKMIAKSEQEIGKATAKYFFYSNIMNFFKTEITLANGEIRKRPLIETNGETGEIVWDKGRDFATVRKVLSMPQVNIVKKTEVQTGGFSKESILPKRNSDKLIARKKDWDPKKYGGFDSPTVAYSVLVVAKVEKGKSKKLKSVKELLGITIMERSSFEKNPIDFLEAKGYKEVKKDLIIKLPKYSLFELENGRKRMLASAGELQKGNELALPSKYVNFLYLASHYEKLKGSPEDNEQKQLFVEQHKHYLDEIIEQISEFSKRVILADANLDKVLSAYNKHRDKPIREQAENIIHLFTLTNLGAPAAFKYFDTTIDRKRYTSTKEVLDATLIHQSITGLYETRIDLSQLGGDGGPAPAPAPAPAPGGTLQLDDEYRLYSPLVKPDQNIQFWLEQFPQAWAETAGMGLAKQVPPQVIQLKASATPVSVRQYPLSKEAQEGIRPHVQRLIQQGILVPVQSPWNTPLLPVRKPGTNDYRPVQDLREVNKRVQDIHPTVPNPYNLLCALPPQRSWYTVLDLKDAFFCLRLHPTSQPLFAFEWRDPGTGRTGQLTWTRLPQGFKNSPTIFNEALHRDLANFRIQHPQVTLLQYVDDLLLAGATKQDCLEGTKALLLELSDLGYRASAKKAQICRREVTYLGYSLRDGQRWLTEARKKTVVQIPAPTTAKQVREFLGTAGFCRLWIPGFATLAAPLYPLTKPKGEFSWAPEHQKAFDAIKKALLSAPALALPDVTKPFTLYVDERKGVARGVLTQTLGPWRRPVAYLSKKLDPVASGWPVCLKAIAAVAILVKDADKLTLGQNITVIAPHALENIVRQPPDRWMTNARMTHYQSLLLTERVTFAPPAALNPATLLPEETDEPVTHDCHQLLIEETGVRKDLTDIPLTGEVLTWFTDGSSYVVEGKRMAGAAVVDGTRTIWASSLPEGTSAQKAELMALTQALRLAEGKSINIYTDSRYAFATAHVHGAIYKQRGWLTSAGREIKNKEEILSLLEALHLPKRLAIIHCPGHQKAKDPISRGNQMADRVAKQAAQGVNLLAGKRTADGSEFEKRTADGSEFESPKKKAKVE

SEQ ID NO: 116 - protein, 2090 aa, synthetic construct
MPAAKRVKLDGGDKKYSIGLDIGTNSVGWAVITDEYKVPSKKFKVLGNTDRHSIKKNLIGALLFDSGETAEATRLKRTARRRYTRRKNRICYLQEIFSNEMAKVDDSFFHRLEESFLVEEDKKHERHPIFGNIVDEVAYHEKYPTIYHLRKKLVDSTDKADLRLIYLALAHMIKFRGHFLIEGDLNPDNSDVDKLFIQLVQTYNQLFEENPINASGVDAKAILSARLSKSRRLENLIAQLPGEKKNGLFGNLIALSLGLTPNFKSNFDLAEDAKLQLSKDTYDDDLDNLLAQIGDQYADLFLAAKNLSDAILLSDILRVNTEITKAPLSASMIKRYDEHHQDLTLLKALVRQQLPEKYKEIFFDQSKNGYAGYIDGGASQEEFYKFIKPILEKMDGTEELLVKLNREDLLRKQRTFDNGSIPHQIHLGELHAILRRQEDFYPFLKDNREKIEKILTFRIPYYVGPLARGNSRFAWMTRKSEETITPWNFEEVVDKGASAQSFIERMTNFDKNLPNEKVLPKHSLLYEYFTVYNELTKVKYVTEGMRKPAFLSGEQKKAIVDLLFKTNRKVTVKQLKEDYFKKIECFDSVEISGVEDRFNASLGTYHDLLKIIKDKDFLDNEENEDILEDIVLTLTLFEDREMIEERLKTYAHLFDDKVMKQLKRRRYTGWGRLSRKLINGIRDKQSGKTILDFLKSDGFANRNFMQLIHDDSLTFKEDIQKAQVSGQGDSLHEHIANLAGSPAIKKGILQTVKVVDELVKVMGRHKPENIVIEMARENQTTQKGQKNSRERMKRIEEGIKELGSQILKEHPVENTQLQNEKLYLYYLQNGRDMYVDQELDINRLSDYDVDHIVPQSFLKDDSIDNKVLTRSDKARGKSDNVPSEEVVKKMKNYWRQLLNAKLITQRKFDNLTKAERGGLSELDKAGFIKRQLVETRQITKHVAQILDSRMNTKYDENDKLIREVKVITLKSKLVSDFRKDFQFYKVREINNYHHAHDAYLNAVVGTALIKKYPKLESEFVYGDYKVYDVRKMIAKSEQEIGKATAKYFFYSNIMNFFKTEITLANGEIRKRPLIETNGETGEIVWDKGRDFATVRKVLSMPQVNIVKKTEVQTGGFSKESILPKRNSDKLIARKKDWDPKKYGGFDSPTVAYSVLVVAKVEKGKSKKLKSVKELLGITIMERSSFEKNPIDFLEAKGYKEVKKDLIIKLPKYSLFELENGRKRMLASAGELQKGNELALPSKYVNFLYLASHYEKLKGSPEDNEQKQLFVEQHKHYLDEIIEQISEFSKRVILADANLDKVLSAYNKHRDKPIREQAENIIHLFTLTNLGAPAAFKYFDTTIDRKRYTSTKEVLDATLIHQSITGLYETRIDLSQLGGDGGGSSEAAAKPAPGGTLQLDDEYRLYSPLVKPDQNIQFWLEQFPQAWAETAGMGLAKQVPPQVIQLKASATPVSVRQYPLSKEAQEGIRPHVQRLIQQGILVPVQSPWNTPLLPVRKPGTNDYRPVQDLREVNKRVQDIHPTVPNPYNLLCALPPQRSWYTVLDLKDAFFCLRLHPTSQPLFAFEWRDPGTGRTGQLTWTRLPQGFKNSPTIFNEALHRDLANFRIQHPQVTLLQYVDDLLLAGATKQDCLEGTKALLLELSDLGYRASAKKAQICRREVTYLGYSLRDGQRWLTEARKKTVVQIPAPTTAKQVREFLGTAGFCRLWIPGFATLAAPLYPLTKPKGEFSWAPEHQKAFDAIKKALLSAPALALPDVTKPFTLYVDERKGVARGVLTQTLGPWRRPVAYLSKKLDPVASGWPVCLKAIAAVAILVKDADKLTLGQNITVIAPHALENIVRQPPDRWMTNARMTHYQSLLLTERVTFAPPAALNPATLLPEETDEPVTHDCHQLLIEETGVRKDLTDIPLTGEVLTWFTDGSSYVVEGKRMAGAAVVDGTRTIWASSLPEGTSAQKAELMALTQALRLAEGKSINIYTDSRYAFATAHVHGAIYKQRGWLTSAGREIKNKEEILSLLEALHLPKRLAIIHCPGHQKAKDPISRGNQMADRVAKQAAQGVNLLAGKRTADGSEFEKRTADGSEFESPKKKAKVE

SEQ ID NO: 117 - protein, 2109 aa, synthetic construct
MPAAKRVKLDGGDKKYSIGLDIGTNSVGWAVITDEYKVPSKKFKVLGNTDRHSIKKNLIGALLFDSGETAEATRLKRTARRRYTRRKNRICYLQEIFSNEMAKVDDSFFHRLEESFLVEEDKKHERHPIFGNIVDEVAYHEKYPTIYHLRKKLVDSTDKADLRLIYLALAHMIKFRGHFLIEGDLNPDNSDVDKLFIQLVQTYNQLFEENPINASGVDAKAILSARLSKSRRLENLIAQLPGEKKNGLFGNLIALSLGLTPNFKSNFDLAEDAKLQLSKDTYDDDLDNLLAQIGDQYADLFLAAKNLSDAILLSDILRVNTEITKAPLSASMIKRYDEHHQDLTLLKALVRQQLPEKYKEIFFDQSKNGYAGYIDGGASQEEFYKFIKPILEKMDGTEELLVKLNREDLLRKQRTFDNGSIPHQIHLGELHAILRRQEDFYPFLKDNREKIEKILTFRIPYYVGPLARGNSRFAWMTRKSEETITPWNFEEVVDKGASAQSFIERMTNFDKNLPNEKVLPKHSLLYEYFTVYNELTKVKYVTEGMRKPAFLSGEQKKAIVDLLFKTNRKVTVKQLKEDYFKKIECFDSVEISGVEDRFNASLGTYHDLLKIIKDKDFLDNEENEDILEDIVLTLTLFEDREMIEERLKTYAHLFDDKVMKQLKRRRYTGWGRLSRKLINGIRDKQSGKTILDFLKSDGFANRNFMQLIHDDSLTFKEDIQKAQVSGQGDSLHEHIANLAGSPAIKKGILQTVKVVDELVKVMGRHKPENIVIEMARENQTTQKGQKNSRERMKRIEEGIKELGSQILKEHPVENTQLQNEKLYLYYLQNGRDMYVDQELDINRLSDYDVDHIVPQSFLKDDSIDNKVLTRSDKARGKSDNVPSEEVVKKMKNYWRQLLNAKLITQRKFDNLTKAERGGLSELDKAGFIKRQLVETRQITKHVAQILDSRMNTKYDENDKLIREVKVITLKSKLVSDFRKDFQFYKVREINNYHHAHDAYLNAVVGTALIKKYPKLESEFVYGDYKVYDVRKMIAKSEQEIGKATAKYFFYSNIMNFFKTEITLANGEIRKRPLIETNGETGEIVWDKGRDFATVRKVLSMPQVNIVKKTEVQTGGFSKESILPKRNSDKLIARKKDWDPKKYGGFDSPTVAYSVLVVAKVEKGKSKKLKSVKELLGITIMERSSFEKNPIDFLEAKGYKEVKKDLIIKLPKYSLFELENGRKRMLASAGELQKGNELALPSKYVNFLYLASHYEKLKGSPEDNEQKQLFVEQHKHYLDEIIEQISEFSKRVILADANLDKVLSAYNKHRDKPIREQAENIIHLFTLTNLGAPAAFKYFDTTIDRKRYTSTKEVLDATLIHQSITGLYETRIDLSQLGGDGGEAAAKEAAAKEAAAKEAAAKEAAAKEAAAKGGTLQLDDEYRLYSPLVKPDQNIQFWLEQFPQAWAETAGMGLAKQVPPQVIQLKASATPVSVRQYPLSKEAQEGIRPHVQRLIQQGILVPVQSPWNTPLLPVRKPGTNDYRPVQDLREVNKRVQDIHPTVPNPYNLLCALPPQRSWYTVLDLKDAFFCLRLHPTSQPLFAFEWRDPGTGRTGQLTWTRLPQGFKNSPTIFNEALHRDLANFRIQHPQVTLLQYVDDLLLAGATKQDCLEGTKALLLELSDLGYRASAKKAQICRREVTYLGYSLRDGQRWLTEARKKTVVQIPAPTTAKQVREFLGTAGFCRLWIPGFATLAAPLYPLTKPKGEFSWAPEHQKAFDAIKKALLSAPALALPDVTKPFTLYVDERKGVARGVLTQTLGPWRRPVAYLSKKLDPVASGWPVCLKAIAAVAILVKDADKLTLGQNITVIAPHALENIVRQPPDRWMTNARMTHYQSLLLTERVTFAPPAALNPATLLPEETDEPVTHDCHQLLIEETGVRKDLTDIPLTGEVLTWFTDGSSYVVEGKRMAGAAVVDGTRTIWASSLPEGTSAQKAELMALTQALRLAEGKSINIYTDSRYAFATAHVHGAIYKQRGWLTSAGREIKNKEEILSLLEALHLPKRLAIIHCPGHQKAKDPISRGNQMADRVAKQAAQGVNLLAGKRTADGSEFEKRTADGSEFESPKKKAKVE

SEQ ID NO: 118 - protein, 2094 aa, synthetic construct
MPAAKRVKLDGGDKKYSIGLDIGTNSVGWAVITDEYKVPSKKFKVLGNTDRHSIKKNLIGALLFDSGETAEATRLKRTARRRYTRRKNRICYLQEIFSNEMAKVDDSFFHRLEESFLVEEDKKHERHPIFGNIVDEVAYHEKYPTIYHLRKKLVDSTDKADLRLIYLALAHMIKFRGHFLIEGDLNPDNSDVDKLFIQLVQTYNQLFEENPINASGVDAKAILSARLSKSRRLENLIAQLPGEKKNGLFGNLIALSLGLTPNFKSNFDLAEDAKLQLSKDTYDDDLDNLLAQIGDQYADLFLAAKNLSDAILLSDILRVNTEITKAPLSASMIKRYDEHHQDLTLLKALVRQQLPEKYKEIFFDQSKNGYAGYIDGGASQEEFYKFIKPILEKMDGTEELLVKLNREDLLRKQRTFDNGSIPHQIHLGELHAILRRQEDFYPFLKDNREKIEKILTFRIPYYVGPLARGNSRFAWMTRKSEETITPWNFEEVVDKGASAQSFIERMTNFDKNLPNEKVLPKHSLLYEYFTVYNELTKVKYVTEGMRKPAFLSGEQKKAIVDLLFKTNRKVTVKQLKEDYFKKIECFDSVEISGVEDRFNASLGTYHDLLKIIKDKDFLDNEENEDILEDIVLTLTLFEDREMIEERLKTYAHLFDDKVMKQLKRRRYTGWGRLSRKLINGIRDKQSGKTILDFLKSDGFANRNFMQLIHDDSLTFKEDIQKAQVSGQGDSLHEHIANLAGSPAIKKGILQTVKVVDELVKVMGRHKPENIVIEMARENQTTQKGQKNSRERMKRIEEGIKELGSQILKEHPVENTQLQNEKLYLYYLQNGRDMYVDQELDINRLSDYDVDHIVPQSFLKDDSIDNKVLTRSDKARGKSDNVPSEEVVKKMKNYWRQLLNAKLITQRKFDNLTKAERGGLSELDKAGFIKRQLVETRQITKHVAQILDSRMNTKYDENDKLIREVKVITLKSKLVSDFRKDFQFYKVREINNYHHAHDAYLNAVVGTALIKKYPKLESEFVYGDYKVYDVRKMIAKSEQEIGKATAKYFFYSNIMNFFKTEITLANGEIRKRPLIETNGETGEIVWDKGRDFATVRKVLSMPQVNIVKKTEVQTGGFSKESILPKRNSDKLIARKKDWDPKKYGGFDSPTVAYSVLVVAKVEKGKSKKLKSVKELLGITIMERSSFEKNPIDFLEAKGYKEVKKDLIIKLPKYSLFELENGRKRMLASAGELQKGNELALPSKYVNFLYLASHYEKLKGSPEDNEQKQLFVEQHKHYLDEIIEQISEFSKRVILADANLDKVLSAYNKHRDKPIREQAENIIHLFTLTNLGAPAAFKYFDTTIDRKRYTSTKEVLDATLIHQSITGLYETRIDLSQLGGDGGGSSGSSGSSGSSGSSGGTLQLDDEYRLYSPLVKPDQNIQFWLEQFPQAWAETAGMGLAKQVPPQVIQLKASATPVSVRQYPLSKEAQEGIRPHVQRLIQQGILVPVQSPWNTPLLPVRKPGTNDYRPVQDLREVNKRVQDIHPTVPNPYNLLCALPPQRSWYTVLDLKDAFFCLRLHPTSQPLFAFEWRDPGTGRTGQLTWTRLPQGFKNSPTIFNEALHRDLANFRIQHPQVTLLQYVDDLLLAGATKQDCLEGTKALLLELSDLGYRASAKKAQICRREVTYLGYSLRDGQRWLTEARKKTVVQIPAPTTAKQVREFLGTAGFCRLWIPGFATLAAPLYPLTKPKGEFSWAPEHQKAFDAIKKALLSAPALALPDVTKPFTLYVDERKGVARGVLTQTLGPWRRPVAYLSKKLDPVASGWPVCLKAIAAVAILVKDADKLTLGQNITVIAPHALENIVRQPPDRWMTNARMTHYQSLLLTERVTFAPPAALNPATLLPEETDEPVTHDCHQLLIEETGVRKDLTDIPLTGEVLTWFTDGSSYVVEGKRMAGAAVVDGTRTIWASSLPEGTSAQKAELMALTQALRLAEGKSINIYTDSRYAFATAHVHGAIYKQRGWLTSAGREIKNKEEILSLLEALHLPKRLAIIHCPGHQKAKDPISRGNQMADRVAKQAAQGVNLLAGKRTADGSEFEKRTADGSEFESPKKKAKVE

SEQ ID NO: 119 - protein, 2090 aa, synthetic construct
MPAAKRVKLDGGDKKYSIGLDIGTNSVGWAVITDEYKVPSKKFKVLGNTDRHSIKKNLIGALLFDSGETAEATRLKRTARRRYTRRKNRICYLQEIFSNEMAKVDDSFFHRLEESFLVEEDKKHERHPIFGNIVDEVAYHEKYPTIYHLRKKLVDSTDKADLRLIYLALAHMIKFRGHFLIEGDLNPDNSDVDKLFIQLVQTYNQLFEENPINASGVDAKAILSARLSKSRRLENLIAQLPGEKKNGLFGNLIALSLGLTPNFKSNFDLAEDAKLQLSKDTYDDDLDNLLAQIGDQYADLFLAAKNLSDAILLSDILRVNTEITKAPLSASMIKRYDEHHQDLTLLKALVRQQLPEKYKEIFFDQSKNGYAGYIDGGASQEEFYKFIKPILEKMDGTEELLVKLNREDLLRKQRTFDNGSIPHQIHLGELHAILRRQEDFYPFLKDNREKIEKILTFRIPYYVGPLARGNSRFAWMTRKSEETITPWNFEEVVDKGASAQSFIERMTNFDKNLPNEKVLPKHSLLYEYFTVYNELTKVKYVTEGMRKPAFLSGEQKKAIVDLLFKTNRKVTVKQLKEDYFKKIECFDSVEISGVEDRFNASLGTYHDLLKIIKDKDFLDNEENEDILEDIVLTLTLFEDREMIEERLKTYAHLFDDKVMKQLKRRRYTGWGRLSRKLINGIRDKQSGKTILDFLKSDGFANRNFMQLIHDDSLTFKEDIQKAQVSGQGDSLHEHIANLAGSPAIKKGILQTVKVVDELVKVMGRHKPENIVIEMARENQTTQKGQKNSRERMKRIEEGIKELGSQILKEHPVENTQLQNEKLYLYYLQNGRDMYVDQELDINRLSDYDVDHIVPQSFLKDDSIDNKVLTRSDKARGKSDNVPSEEVVKKMKNYWRQLLNAKLITQRKFDNLTKAERGGLSELDKAGFIKRQLVETRQITKHVAQILDSRMNTKYDENDKLIREVKVITLKSKLVSDFRKDFQFYKVREINNYHHAHDAYLNAVVGTALIKKYPKLESEFVYGDYKVYDVRKMIAKSEQEIGKATAKYFFYSNIMNFFKTEITLANGEIRKRPLIETNGETGEIVWDKGRDFATVRKVLSMPQVNIVKKTEVQTGGFSKESILPKRNSDKLIARKKDWDPKKYGGFDSPTVAYSVLVVAKVEKGKSKKLKSVKELLGITIMERSSFEKNPIDFLEAKGYKEVKKDLIIKLPKYSLFELENGRKRMLASAGELQKGNELALPSKYVNFLYLASHYEKLKGSPEDNEQKQLFVEQHKHYLDEIIEQISEFSKRVILADANLDKVLSAYNKHRDKPIREQAENIIHLFTLTNLGAPAAFKYFDTTIDRKRYTSTKEVLDATLIHQSITGLYETRIDLSQLGGDGGEAAAKGSSGGSGGTLQLDDEYRLYSPLVKPDQNIQFWLEQFPQAWAETAGMGLAKQVPPQVIQLKASATPVSVRQYPLSKEAQEGIRPHVQRLIQQGILVPVQSPWNTPLLPVRKPGTNDYRPVQDLREVNKRVQDIHPTVPNPYNLLCALPPQRSWYTVLDLKDAFFCLRLHPTSQPLFAFEWRDPGTGRTGQLTWTRLPQGFKNSPTIFNEALHRDLANFRIQHPQVTLLQYVDDLLLAGATKQDCLEGTKALLLELSDLGYRASAKKAQICRREVTYLGYSLRDGQRWLTEARKKTVVQIPAPTTAKQVREFLGTAGFCRLWIPGFATLAAPLYPLTKPKGEFSWAPEHQKAFDAIKKALLSAPALALPDVTKPFTLYVDERKGVARGVLTQTLGPWRRPVAYLSKKLDPVASGWPVCLKAIAAVAILVKDADKLTLGQNITVIAPHALENIVRQPPDRWMTNARMTHYQSLLLTERVTFAPPAALNPATLLPEETDEPVTHDCHQLLIEETGVRKDLTDIPLTGEVLTWFTDGSSYVVEGKRMAGAAVVDGTRTIWASSLPEGTSAQKAELMALTQALRLAEGKSINIYTDSRYAFATAHVHGAIYKQRGWLTSAGREIKNKEEILSLLEALHLPKRLAIIHCPGHQKAKDPISRGNQMADRVAKQAAQGVNLLAGKRTADGSEFEKRTADGSEFESPKKKAKVE

SEQ ID NO: 120 - protein, 2082 aa, synthetic construct
MPAAKRVKLDGGDKKYSIGLDIGTNSVGWAVITDEYKVPSKKFKVLGNTDRHSIKKNLIGALLFDSGETAEATRLKRTARRRYTRRKNRICYLQEIFSNEMAKVDDSFFHRLEESFLVEEDKKHERHPIFGNIVDEVAYHEKYPTIYHLRKKLVDSTDKADLRLIYLALAHMIKFRGHFLIEGDLNPDNSDVDKLFIQLVQTYNQLFEENPINASGVDAKAILSARLSKSRRLENLIAQLPGEKKNGLFGNLIALSLGLTPNFKSNFDLAEDAKLQLSKDTYDDDLDNLLAQIGDQYADLFLAAKNLSDAILLSDILRVNTEITKAPLSASMIKRYDEHHQDLTLLKALVRQQLPEKYKEIFFDQSKNGYAGYIDGGASQEEFYKFIKPILEKMDGTEELLVKLNREDLLRKQRTFDNGSIPHQIHLGELHAILRRQEDFYPFLKDNREKIEKILTFRIPYYVGPLARGNSRFAWMTRKSEETITPWNFEEVVDKGASAQSFIERMTNFDKNLPNEKVLPKHSLLYEYFTVYNELTKVKYVTEGMRKPAFLSGEQKKAIVDLLFKTNRKVTVKQLKEDYFKKIECFDSVEISGVEDRFNASLGTYHDLLKIIKDKDFLDNEENEDILEDIVLTLTLFEDREMIEERLKTYAHLFDDKVMKQLKRRRYTGWGRLSRKLINGIRDKQSGKTILDFLKSDGFANRNFMQLIHDDSLTFKEDIQKAQVSGQGDSLHEHIANLAGSPAIKKGILQTVKVVDELVKVMGRHKPENIVIEMARENQTTQKGQKNSRERMKRIEEGIKELGSQILKEHPVENTQLQNEKLYLYYLQNGRDMYVDQELDINRLSDYDVDHIVPQSFLKDDSIDNKVLTRSDKARGKSDNVPSEEVVKKMKNYWRQLLNAKLITQRKFDNLTKAERGGLSELDKAGFIKRQLVETRQITKHVAQILDSRMNTKYDENDKLIREVKVITLKSKLVSDFRKDFQFYKVREINNYHHAHDAYLNAVVGTALIKKYPKLESEFVYGDYKVYDVRKMIAKSEQEIGKATAKYFFYSNIMNFFKTEITLANGEIRKRPLIETNGETGEIVWDKGRDFATVRKVLSMPQVNIVKKTEVQTGGFSKESILPKRNSDKLIARKKDWDPKKYGGFDSPTVAYSVLVVAKVEKGKSKKLKSVKELLGITIMERSSFEKNPIDFLEAKGYKEVKKDLIIKLPKYSLFELENGRKRMLASAGELQKGNELALPSKYVNFLYLASHYEKLKGSPEDNEQKQLFVEQHKHYLDEIIEQISEFSKRVILADANLDKVLSAYNKHRDKPIREQAENIIHLFTLTNLGAPAAFKYFDTTIDRKRYTSTKEVLDATLIHQSITGLYETRIDLSQLGGDGGGSSGGTLQLDDEYRLYSPLVKPDQNIQFWLEQFPQAWAETAGMGLAKQVPPQVIQLKASATPVSVRQYPLSKEAQEGIRPHVQRLIQQGILVPVQSPWNTPLLPVRKPGTNDYRPVQDLREVNKRVQDIHPTVPNPYNLLCALPPQRSWYTVLDLKDAFFCLRLHPTSQPLFAFEWRDPGTGRTGQLTWTRLPQGFKNSPTIFNEALHRDLANFRIQHPQVTLLQYVDDLLLAGATKQDCLEGTKALLLELSDLGYRASAKKAQICRREVTYLGYSLRDGQRWLTEARKKTVVQIPAPTTAKQVREFLGTAGFCRLWIPGFATLAAPLYPLTKPKGEFSWAPEHQKAFDAIKKALLSAPALALPDVTKPFTLYVDERKGVARGVLTQTLGPWRRPVAYLSKKLDPVASGWPVCLKAIAAVAILVKDADKLTLGQNITVIAPHALENIVRQPPDRWMTNARMTHYQSLLLTERVTFAPPAALNPATLLPEETDEPVTHDCHQLLIEETGVRKDLTDIPLTGEVLTWFTDGSSYVVEGKRMAGAAVVDGTRTIWASSLPEGTSAQKAELMALTQALRLAEGKSINIYTDSRYAFATAHVHGAIYKQRGWLTSAGREIKNKEEILSLLEALHLPKRLAIIHCPGHQKAKDPISRGNQMADRVAKQAAQGVNLLAGKRTADGSEFEKRTADGSEFESPKKKAKVE

SEQ ID NO: 121 - protein, 2090 aa, synthetic construct
MPAAKRVKLDGGDKKYSIGLDIGTNSVGWAVITDEYKVPSKKFKVLGNTDRHSIKKNLIGALLFDSGETAEATRLKRTARRRYTRRKNRICYLQEIFSNEMAKVDDSFFHRLEESFLVEEDKKHERHPIFGNIVDEVAYHEKYPTIYHLRKKLVDSTDKADLRLIYLALAHMIKFRGHFLIEGDLNPDNSDVDKLFIQLVQTYNQLFEENPINASGVDAKAILSARLSKSRRLENLIAQLPGEKKNGLFGNLIALSLGLTPNFKSNFDLAEDAKLQLSKDTYDDDLDNLLAQIGDQYADLFLAAKNLSDAILLSDILRVNTEITKAPLSASMIKRYDEHHQDLTLLKALVRQQLPEKYKEIFFDQSKNGYAGYIDGGASQEEFYKFIKPILEKMDGTEELLVKLNREDLLRKQRTFDNGSIPHQIHLGELHAILRRQEDFYPFLKDNREKIEKILTFRIPYYVGPLARGNSRFAWMTRKSEETITPWNFEEVVDKGASAQSFIERMTNFDKNLPNEKVLPKHSLLYEYFTVYNELTKVKYVTEGMRKPAFLSGEQKKAIVDLLFKTNRKVTVKQLKEDYFKKIECFDSVEISGVEDRFNASLGTYHDLLKIIKDKDFLDNEENEDILEDIVLTLTLFEDREMIEERLKTYAHLFDDKVMKQLKRRRYTGWGRLSRKLINGIRDKQSGKTILDFLKSDGFANRNFMQLIHDDSLTFKEDIQKAQVSGQGDSLHEHIANLAGSPAIKKGILQTVKVVDELVKVMGRHKPENIVIEMARENQTTQKGQKNSRERMKRIEEGIKELGSQILKEHPVENTQLQNEKLYLYYLQNGRDMYVDQELDINRLSDYDVDHIVPQSFLKDDSIDNKVLTRSDKARGKSDNVPSEEVVKKMKNYWRQLLNAKLITQRKFDNLTKAERGGLSELDKAGFIKRQLVETRQITKHVAQILDSRMNTKYDENDKLIREVKVITLKSKLVSDFRKDFQFYKVREINNYHHAHDAYLNAVVGTALIKKYPKLESEFVYGDYKVYDVRKMIAKSEQEIGKATAKYFFYSNIMNFFKTEITLANGEIRKRPLIETNGETGEIVWDKGRDFATVRKVLSMPQVNIVKKTEVQTGGFSKESILPKRNSDKLIARKKDWDPKKYGGFDSPTVAYSVLVVAKVEKGKSKKLKSVKELLGITIMERSSFEKNPIDFLEAKGYKEVKKDLIIKLPKYSLFELENGRKRMLASAGELQKGNELALPSKYVNFLYLASHYEKLKGSPEDNEQKQLFVEQHKHYLDEIIEQISEFSKRVILADANLDKVLSAYNKHRDKPIREQAENIIHLFTLTNLGAPAAFKYFDTTIDRKRYTSTKEVLDATLIHQSITGLYETRIDLSQLGGDGGGGGGSSEAAAKGGTLQLDDEYRLYSPLVKPDQNIQFWLEQFPQAWAETAGMGLAKQVPPQVIQLKASATPVSVRQYPLSKEAQEGIRPHVQRLIQQGILVPVQSPWNTPLLPVRKPGTNDYRPVQDLREVNKRVQDIHPTVPNPYNLLCALPPQRSWYTVLDLKDAFFCLRLHPTSQPLFAFEWRDPGTGRTGQLTWTRLPQGFKNSPTIFNEALHRDLANFRIQHPQVTLLQYVDDLLLAGATKQDCLEGTKALLLELSDLGYRASAKKAQICRREVTYLGYSLRDGQRWLTEARKKTVVQIPAPTTAKQVREFLGTAGFCRLWIPGFATLAAPLYPLTKPKGEFSWAPEHQKAFDAIKKALLSAPALALPDVTKPFTLYVDERKGVARGVLTQTLGPWRRPVAYLSKKLDPVASGWPVCLKAIAAVAILVKDADKLTLGQNITVIAPHALENIVRQPPDRWMTNARMTHYQSLLLTERVTFAPPAALNPATLLPEETDEPVTHDCHQLLIEETGVRKDLTDIPLTGEVLTWFTDGSSYVVEGKRMAGAAVVDGTRTIWASSLPEGTSAQKAELMALTQALRLAEGKSINIYTDSRYAFATAHVHGAIYKQRGWLTSAGREIKNKEEILSLLEALHLPKRLAIIHCPGHQKAKDPISRGNQMADRVAKQAAQGVNLLAGKRTADGSEFEKRTADGSEFESPKKKAKVE

SEQ ID NO: 122 - protein, 2095 aa, synthetic construct
MPAAKRVKLDGGDKKYSIGLDIGTNSVGWAVITDEYKVPSKKFKVLGNTDRHSIKKNLIGALLFDSGETAEATRLKRTARRRYTRRKNRICYLQEIFSNEMAKVDDSFFHRLEESFLVEEDKKHERHPIFGNIVDEVAYHEKYPTIYHLRKKLVDSTDKADLRLIYLALAHMIKFRGHFLIEGDLNPDNSDVDKLFIQLVQTYNQLFEENPINASGVDAKAILSARLSKSRRLENLIAQLPGEKKNGLFGNLIALSLGLTPNFKSNFDLAEDAKLQLSKDTYDDDLDNLLAQIGDQYADLFLAAKNLSDAILLSDILRVNTEITKAPLSASMIKRYDEHHQDLTLLKALVRQQLPEKYKEIFFDQSKNGYAGYIDGGASQEEFYKFIKPILEKMDGTEELLVKLNREDLLRKQRTFDNGSIPHQIHLGELHAILRRQEDFYPFLKDNREKIEKILTFRIPYYVGPLARGNSRFAWMTRKSEETITPWNFEEVVDKGASAQSFIERMTNFDKNLPNEKVLPKHSLLYEYFTVYNELTKVKYVTEGMRKPAFLSGEQKKAIVDLLFKTNRKVTVKQLKEDYFKKIECFDSVEISGVEDRFNASLGTYHDLLKIIKDKDFLDNEENEDILEDIVLTLTLFEDREMIEERLKTYAHLFDDKVMKQLKRRRYTGWGRLSRKLINGIRDKQSGKTILDFLKSDGFANRNFMQLIHDDSLTFKEDIQKAQVSGQGDSLHEHIANLAGSPAIKKGILQTVKVVDELVKVMGRHKPENIVIEMARENQTTQKGQKNSRERMKRIEEGIKELGSQILKEHPVENTQLQNEKLYLYYLQNGRDMYVDQELDINRLSDYDVDHIVPQSFLKDDSIDNKVLTRSDKARGKSDNVPSEEVVKKMKNYWRQLLNAKLITQRKFDNLTKAERGGLSELDKAGFIKRQLVETRQITKHVAQILDSRMNTKYDENDKLIREVKVITLKSKLVSDFRKDFQFYKVREINNYHHAHDAYLNAVVGTALIKKYPKLESEFVYGDYKVYDVRKMIAKSEQEIGKATAKYFFYSNIMNFFKTEITLANGEIRKRPLIETNGETGEIVWDKGRDFATVRKVLSMPQVNIVKKTEVQTGGFSKESILPKRNSDKLIARKKDWDPKKYGGFDSPTVAYSVLVVAKVEKGKSKKLKSVKELLGITIMERSSFEKNPIDFLEAKGYKEVKKDLIIKLPKYSLFELENGRKRMLASAGELQKGNELALPSKYVNFLYLASHYEKLKGSPEDNEQKQLFVEQHKHYLDEIIEQISEFSKRVILADANLDKVLSAYNKHRDKPIREQAENIIHLFTLTNLGAPAAFKYFDTTIDRKRYTSTKEVLDATLIHQSITGLYETRIDLSQLGGDGGSGSETPGTSESATPESGGTLQLDDEYRLYSPLVKPDQNIQFWLEQFPQAWAETAGMGLAKQVPPQVIQLKASATPVSVRQYPLSKEAQEGIRPHVQRLIQQGILVPVQSPWNTPLLPVRKPGTNDYRPVQDLREVNKRVQDIHPTVPNPYNLLCALPPQRSWYTVLDLKDAFFCLRLHPTSQPLFAFEWRDPGTGRTGQLTWTRLPQGFKNSPTIFNEALHRDLANFRIQHPQVTLLQYVDDLLLAGATKQDCLEGTKALLLELSDLGYRASAKKAQICRREVTYLGYSLRDGQRWLTEARKKTVVQIPAPTTAKQVREFLGTAGFCRLWIPGFATLAAPLYPLTKPKGEFSWAPEHQKAFDAIKKALLSAPALALPDVTKPFTLYVDERKGVARGVLTQTLGPWRRPVAYLSKKLDPVASGWPVCLKAIAAVAILVKDADKLTLGQNITVIAPHALENIVRQPPDRWMTNARMTHYQSLLLTERVTFAPPAALNPATLLPEETDEPVTHDCHQLLIEETGVRKDLTDIPLTGEVLTWFTDGSSYVVEGKRMAGAAVVDGTRTIWASSLPEGTSAQKAELMALTQALRLAEGKSINIYTDSRYAFATAHVHGAIYKQRGWLTSAGREIKNKEEILSLLEALHLPKRLAIIHCPGHQKAKDPISRGNQMADRVAKQAAQGVNLLAGKRTADGSEFEKRTADGSEFESPKKKAKVE

SEQ ID NO: 123 - protein, 2085 aa, synthetic construct
MPAAKRVKLDGGDKKYSIGLDIGTNSVGWAVITDEYKVPSKKFKVLGNTDRHSIKKNLIGALLFDSGETAEATRLKRTARRRYTRRKNRICYLQEIFSNEMAKVDDSFFHRLEESFLVEEDKKHERHPIFGNIVDEVAYHEKYPTIYHLRKKLVDSTDKADLRLIYLALAHMIKFRGHFLIEGDLNPDNSDVDKLFIQLVQTYNQLFEENPINASGVDAKAILSARLSKSRRLENLIAQLPGEKKNGLFGNLIALSLGLTPNFKSNFDLAEDAKLQLSKDTYDDDLDNLLAQIGDQYADLFLAAKNLSDAILLSDILRVNTEITKAPLSASMIKRYDEHHQDLTLLKALVRQQLPEKYKEIFFDQSKNGYAGYIDGGASQEEFYKFIKPILEKMDGTEELLVKLNREDLLRKQRTFDNGSIPHQIHLGELHAILRRQEDFYPFLKDNREKIEKILTFRIPYYVGPLARGNSRFAWMTRKSEETITPWNFEEVVDKGASAQSFIERMTNFDKNLPNEKVLPKHSLLYEYFTVYNELTKVKYVTEGMRKPAFLSGEQKKAIVDLLFKTNRKVTVKQLKEDYFKKIECFDSVEISGVEDRFNASLGTYHDLLKIIKDKDFLDNEENEDILEDIVLTLTLFEDREMIEERLKTYAHLFDDKVMKQLKRRRYTGWGRLSRKLINGIRDKQSGKTILDFLKSDGFANRNFMQLIHDDSLTFKEDIQKAQVSGQGDSLHEHIANLAGSPAIKKGILQTVKVVDELVKVMGRHKPENIVIEMARENQTTQKGQKNSRERMKRIEEGIKELGSQILKEHPVENTQLQNEKLYLYYLQNGRDMYVDQELDINRLSDYDVDHIVPQSFLKDDSIDNKVLTRSDKARGKSDNVPSEEVVKKMKNYWRQLLNAKLITQRKFDNLTKAERGGLSELDKAGFIKRQLVETRQITKHVAQILDSRMNTKYDENDKLIREVKVITLKSKLVSDFRKDFQFYKVREINNYHHAHDAYLNAVVGTALIKKYPKLESEFVYGDYKVYDVRKMIAKSEQEIGKATAKYFFYSNIMNFFKTEITLANGEIRKRPLIETNGETGEIVWDKGRDFATVRKVLSMPQVNIVKKTEVQTGGFSKESILPKRNSDKLIARKKDWDPKKYGGFDSPTVAYSVLVVAKVEKGKSKKLKSVKELLGITIMERSSFEKNPIDFLEAKGYKEVKKDLIIKLPKYSLFELENGRKRMLASAGELQKGNELALPSKYVNFLYLASHYEKLKGSPEDNEQKQLFVEQHKHYLDEIIEQISEFSKRVILADANLDKVLSAYNKHRDKPIREQAENIIHLFTLTNLGAPAAFKYFDTTIDRKRYTSTKEVLDATLIHQSITGLYETRIDLSQLGGDGGPAPGSSGGTLQLDDEYRLYSPLVKPDQNIQFWLEQFPQAWAETAGMGLAKQVPPQVIQLKASATPVSVRQYPLSKEAQEGIRPHVQRLIQQGILVPVQSPWNTPLLPVRKPGTNDYRPVQDLREVNKRVQDIHPTVPNPYNLLCALPPQRSWYTVLDLKDAFFCLRLHPTSQPLFAFEWRDPGTGRTGQLTWTRLPQGFKNSPTIFNEALHRDLANFRIQHPQVTLLQYVDDLLLAGATKQDCLEGTKALLLELSDLGYRASAKKAQICRREVTYLGYSLRDGQRWLTEARKKTVVQIPAPTTAKQVREFLGTAGFCRLWIPGFATLAAPLYPLTKPKGEFSWAPEHQKAFDAIKKALLSAPALALPDVTKPFTLYVDERKGVARGVLTQTLGPWRRPVAYLSKKLDPVASGWPVCLKAIAAVAILVKDADKLTLGQNITVIAPHALENIVRQPPDRWMTNARMTHYQSLLLTERVTFAPPAALNPATLLPEETDEPVTHDCHQLLIEETGVRKDLTDIPLTGEVLTWFTDGSSYVVEGKRMAGAAVVDGTRTIWASSLPEGTSAQKAELMALTQALRLAEGKSINIYTDSRYAFATAHVHGAIYKQRGWLTSAGREIKNKEEILSLLEALHLPKRLAIIHCPGHQKAKDPISRGNQMADRVAKQAAQGVNLLAGKRTADGSEFEKRTADGSEFESPKKKAKVE

SEQ ID NO: 124 - protein, 2090 aa, synthetic construct
MPAAKRVKLDGGDKKYSIGLDIGTNSVGWAVITDEYKVPSKKFKVLGNTDRHSIKKNLIGALLFDSGETAEATRLKRTARRRYTRRKNRICYLQEIFSNEMAKVDDSFFHRLEESFLVEEDKKHERHPIFGNIVDEVAYHEKYPTIYHLRKKLVDSTDKADLRLIYLALAHMIKFRGHFLIEGDLNPDNSDVDKLFIQLVQTYNQLFEENPINASGVDAKAILSARLSKSRRLENLIAQLPGEKKNGLFGNLIALSLGLTPNFKSNFDLAEDAKLQLSKDTYDDDLDNLLAQIGDQYADLFLAAKNLSDAILLSDILRVNTEITKAPLSASMIKRYDEHHQDLTLLKALVRQQLPEKYKEIFFDQSKNGYAGYIDGGASQEEFYKFIKPILEKMDGTEELLVKLNREDLLRKQRTFDNGSIPHQIHLGELHAILRRQEDFYPFLKDNREKIEKILTFRIPYYVGPLARGNSRFAWMTRKSEETITPWNFEEVVDKGASAQSFIERMTNFDKNLPNEKVLPKHSLLYEYFTVYNELTKVKYVTEGMRKPAFLSGEQKKAIVDLLFKTNRKVTVKQLKEDYFKKIECFDSVEISGVEDRFNASLGTYHDLLKIIKDKDFLDNEENEDILEDIVLTLTLFEDREMIEERLKTYAHLFDDKVMKQLKRRRYTGWGRLSRKLINGIRDKQSGKTILDFLKSDGFANRNFMQLIHDDSLTFKEDIQKAQVSGQGDSLHEHIANLAGSPAIKKGILQTVKVVDELVKVMGRHKPENIVIEMARENQTTQKGQKNSRERMKRIEEGIKELGSQILKEHPVENTQLQNEKLYLYYLQNGRDMYVDQELDINRLSDYDVDHIVPQSFLKDDSIDNKVLTRSDKARGKSDNVPSEEVVKKMKNYWRQLLNAKLITQRKFDNLTKAERGGLSELDKAGFIKRQLVETRQITKHVAQILDSRMNTKYDENDKLIREVKVITLKSKLVSDFRKDFQFYKVREINNYHHAHDAYLNAVVGTALIKKYPKLESEFVYGDYKVYDVRKMIAKSEQEIGKATAKYFFYSNIMNFFKTEITLANGEIRKRPLIETNGETGEIVWDKGRDFATVRKVLSMPQVNIVKKTEVQTGGFSKESILPKRNSDKLIARKKDWDPKKYGGFDSPTVAYSVLVVAKVEKGKSKKLKSVKELLGITIMERSSFEKNPIDFLEAKGYKEVKKDLIIKLPKYSLFELENGRKRMLASAGELQKGNELALPSKYVNFLYLASHYEKLKGSPEDNEQKQLFVEQHKHYLDEIIEQISEFSKRVILADANLDKVLSAYNKHRDKPIREQAENIIHLFTLTNLGAPAAFKYFDTTIDRKRYTSTKEVLDATLIHQSITGLYETRIDLSQLGGDGGPAPEAAAKGGGGGTLQLDDEYRLYSPLVKPDQNIQFWLEQFPQAWAETAGMGLAKQVPPQVIQLKASATPVSVRQYPLSKEAQEGIRPHVQRLIQQGILVPVQSPWNTPLLPVRKPGTNDYRPVQDLREVNKRVQDIHPTVPNPYNLLCALPPQRSWYTVLDLKDAFFCLRLHPTSQPLFAFEWRDPGTGRTGQLTWTRLPQGFKNSPTIFNEALHRDLANFRIQHPQVTLLQYVDDLLLAGATKQDCLEGTKALLLELSDLGYRASAKKAQICRREVTYLGYSLRDGQRWLTEARKKTVVQIPAPTTAKQVREFLGTAGFCRLWIPGFATLAAPLYPLTKPKGEFSWAPEHQKAFDAIKKALLSAPALALPDVTKPFTLYVDERKGVARGVLTQTLGPWRRPVAYLSKKLDPVASGWPVCLKAIAAVAILVKDADKLTLGQNITVIAPHALENIVRQPPDRWMTNARMTHYQSLLLTERVTFAPPAALNPATLLPEETDEPVTHDCHQLLIEETGVRKDLTDIPLTGEVLTWFTDGSSYVVEGKRMAGAAVVDGTRTIWASSLPEGTSAQKAELMALTQALRLAEGKSINIYTDSRYAFATAHVHGAIYKQRGWLTSAGREIKNKEEILSLLEALHLPKRLAIIHCPGHQKAKDPISRGNQMADRVAKQAAQGVNLLAGKRTADGSEFEKRTADGSEFESPKKKAKVE

SEQ ID NO: 125 - protein, 2085 aa, synthetic construct
MPAAKRVKLDGGDKKYSIGLDIGTNSVGWAVITDEYKVPSKKFKVLGNTDRHSIKKNLIGALLFDSGETAEATRLKRTARRRYTRRKNRICYLQEIFSNEMAKVDDSFFHRLEESFLVEEDKKHERHPIFGNIVDEVAYHEKYPTIYHLRKKLVDSTDKADLRLIYLALAHMIKFRGHFLIEGDLNPDNSDVDKLFIQLVQTYNQLFEENPINASGVDAKAILSARLSKSRRLENLIAQLPGEKKNGLFGNLIALSLGLTPNFKSNFDLAEDAKLQLSKDTYDDDLDNLLAQIGDQYADLFLAAKNLSDAILLSDILRVNTEITKAPLSASMIKRYDEHHQDLTLLKALVRQQLPEKYKEIFFDQSKNGYAGYIDGGASQEEFYKFIKPILEKMDGTEELLVKLNREDLLRKQRTFDNGSIPHQIHLGELHAILRRQEDFYPFLKDNREKIEKILTFRIPYYVGPLARGNSRFAWMTRKSEETITPWNFEEVVDKGASAQSFIERMTNFDKNLPNEKVLPKHSLLYEYFTVYNELTKVKYVTEGMRKPAFLSGEQKKAIVDLLFKTNRKVTVKQLKEDYFKKIECFDSVEISGVEDRFNASLGTYHDLLKIIKDKDFLDNEENEDILEDIVLTLTLFEDREMIEERLKTYAHLFDDKVMKQLKRRRYTGWGRLSRKLINGIRDKQSGKTILDFLKSDGFANRNFMQLIHDDSLTFKEDIQKAQVSGQGDSLHEHIANLAGSPAIKKGILQTVKVVDELVKVMGRHKPENIVIEMARENQTTQKGQKNSRERMKRIEEGIKELGSQILKEHPVENTQLQNEKLYLYYLQNGRDMYVDQELDINRLSDYDVDHIVPQSFLKDDSIDNKVLTRSDKARGKSDNVPSEEVVKKMKNYWRQLLNAKLITQRKFDNLTKAERGGLSELDKAGFIKRQLVETRQITKHVAQILDSRMNTKYDENDKLIREVKVITLKSKLVSDFRKDFQFYKVREINNYHHAHDAYLNAVVGTALIKKYPKLESEFVYGDYKVYDVRKMIAKSEQEIGKATAKYFFYSNIMNFFKTEITLANGEIRKRPLIETNGETGEIVWDKGRDFATVRKVLSMPQVNIVKKTEVQTGGFSKESILPKRNSDKLIARKKDWDPKKYGGFDSPTVAYSVLVVAKVEKGKSKKLKSVKELLGITIMERSSFEKNPIDFLEAKGYKEVKKDLIIKLPKYSLFELENGRKRMLASAGELQKGNELALPSKYVNFLYLASHYEKLKGSPEDNEQKQLFVEQHKHYLDEIIEQISEFSKRVILADANLDKVLSAYNKHRDKPIREQAENIIHLFTLTNLGAPAAFKYFDTTIDRKRYTSTKEVLDATLIHQSITGLYETRIDLSQLGGDGGPAPGGSGGTLQLDDEYRLYSPLVKPDQNIQFWLEQFPQAWAETAGMGLAKQVPPQVIQLKASATPVSVRQYPLSKEAQEGIRPHVQRLIQQGILVPVQSPWNTPLLPVRKPGTNDYRPVQDLREVNKRVQDIHPTVPNPYNLLCALPPQRSWYTVLDLKDAFFCLRLHPTSQPLFAFEWRDPGTGRTGQLTWTRLPQGFKNSPTIFNEALHRDLANFRIQHPQVTLLQYVDDLLLAGATKQDCLEGTKALLLELSDLGYRASAKKAQICRREVTYLGYSLRDGQRWLTEARKKTVVQIPAPTTAKQVREFLGTAGFCRLWIPGFATLAAPLYPLTKPKGEFSWAPEHQKAFDAIKKALLSAPALALPDVTKPFTLYVDERKGVARGVLTQTLGPWRRPVAYLSKKLDPVASGWPVCLKAIAAVAILVKDADKLTLGQNITVIAPHALENIVRQPPDRWMTNARMTHYQSLLLTERVTFAPPAALNPATLLPEETDEPVTHDCHQLLIEETGVRKDLTDIPLTGEVLTWFTDGSSYVVEGKRMAGAAVVDGTRTIWASSLPEGTSAQKAELMALTQALRLAEGKSINIYTDSRYAFATAHVHGAIYKQRGWLTSAGREIKNKEEILSLLEALHLPKRLAIIHCPGHQKAKDPISRGNQMADRVAKQAAQGVNLLAGKRTADGSEFEKRTADGSEFESPKKKAKVE

SEQ ID NO: 126 - protein, 2087 aa, synthetic construct
MPAAKRVKLDGGDKKYSIGLDIGTNSVGWAVITDEYKVPSKKFKVLGNTDRHSIKKNLIGALLFDSGETAEATRLKRTARRRYTRRKNRICYLQEIFSNEMAKVDDSFFHRLEESFLVEEDKKHERHPIFGNIVDEVAYHEKYPTIYHLRKKLVDSTDKADLRLIYLALAHMIKFRGHFLIEGDLNPDNSDVDKLFIQLVQTYNQLFEENPINASGVDAKAILSARLSKSRRLENLIAQLPGEKKNGLFGNLIALSLGLTPNFKSNFDLAEDAKLQLSKDTYDDDLDNLLAQIGDQYADLFLAAKNLSDAILLSDILRVNTEITKAPLSASMIKRYDEHHQDLTLLKALVRQQLPEKYKEIFFDQSKNGYAGYIDGGASQEEFYKFIKPILEKMDGTEELLVKLNREDLLRKQRTFDNGSIPHQIHLGELHAILRRQEDFYPFLKDNREKIEKILTFRIPYYVGPLARGNSRFAWMTRKSEETITPWNFEEVVDKGASAQSFIERMTNFDKNLPNEKVLPKHSLLYEYFTVYNELTKVKYVTEGMRKPAFLSGEQKKAIVDLLFKTNRKVTVKQLKEDYFKKIECFDSVEISGVEDRFNASLGTYHDLLKIIKDKDFLDNEENEDILEDIVLTLTLFEDREMIEERLKTYAHLFDDKVMKQLKRRRYTGWGRLSRKLINGIRDKQSGKTILDFLKSDGFANRNFMQLIHDDSLTFKEDIQKAQVSGQGDSLHEHIANLAGSPAIKKGILQTVKVVDELVKVMGRHKPENIVIEMARENQTTQKGQKNSRERMKRIEEGIKELGSQILKEHPVENTQLQNEKLYLYYLQNGRDMYVDQELDINRLSDYDVDHIVPQSFLKDDSIDNKVLTRSDKARGKSDNVPSEEVVKKMKNYWRQLLNAKLITQRKFDNLTKAERGGLSELDKAGFIKRQLVETRQITKHVAQILDSRMNTKYDENDKLIREVKVITLKSKLVSDFRKDFQFYKVREINNYHHAHDAYLNAVVGTALIKKYPKLESEFVYGDYKVYDVRKMIAKSEQEIGKATAKYFFYSNIMNFFKTEITLANGEIRKRPLIETNGETGEIVWDKGRDFATVRKVLSMPQVNIVKKTEVQTGGFSKESILPKRNSDKLIARKKDWDPKKYGGFDSPTVAYSVLVVAKVEKGKSKKLKSVKELLGITIMERSSFEKNPIDFLEAKGYKEVKKDLIIKLPKYSLFELENGRKRMLASAGELQKGNELALPSKYVNFLYLASHYEKLKGSPEDNEQKQLFVEQHKHYLDEIIEQISEFSKRVILADANLDKVLSAYNKHRDKPIREQAENIIHLFTLTNLGAPAAFKYFDTTIDRKRYTSTKEVLDATLIHQSITGLYETRIDLSQLGGDGGEAAAKGGGGGTLQLDDEYRLYSPLVKPDQNIQFWLEQFPQAWAETAGMGLAKQVPPQVIQLKASATPVSVRQYPLSKEAQEGIRPHVQRLIQQGILVPVQSPWNTPLLPVRKPGTNDYRPVQDLREVNKRVQDIHPTVPNPYNLLCALPPQRSWYTVLDLKDAFFCLRLHPTSQPLFAFEWRDPGTGRTGQLTWTRLPQGFKNSPTIFNEALHRDLANFRIQHPQVTLLQYVDDLLLAGATKQDCLEGTKALLLELSDLGYRASAKKAQICRREVTYLGYSLRDGQRWLTEARKKTVVQIPAPTTAKQVREFLGTAGFCRLWIPGFATLAAPLYPLTKPKGEFSWAPEHQKAFDAIKKALLSAPALALPDVTKPFTLYVDERKGVARGVLTQTLGPWRRPVAYLSKKLDPVASGWPVCLKAIAAVAILVKDADKLTLGQNITVIAPHALENIVRQPPDRWMTNARMTHYQSLLLTERVTFAPPAALNPATLLPEETDEPVTHDCHQLLIEETGVRKDLTDIPLTGEVLTWFTDGSSYVVEGKRMAGAAVVDGTRTIWASSLPEGTSAQKAELMALTQALRLAEGKSINIYTDSRYAFATAHVHGAIYKQRGWLTSAGREIKNKEEILSLLEALHLPKRLAIIHCPGHQKAKDPISRGNQMADRVAKQAAQGVNLLAGKRTADGSEFEKRTADGSEFESPKKKAKVE

SEQ ID NO: 127 - protein, 2090 aa, synthetic construct
MPAAKRVKLDGGDKKYSIGLDIGTNSVGWAVITDEYKVPSKKFKVLGNTDRHSIKKNLIGALLFDSGETAEATRLKRTARRRYTRRKNRICYLQEIFSNEMAKVDDSFFHRLEESFLVEEDKKHERHPIFGNIVDEVAYHEKYPTIYHLRKKLVDSTDKADLRLIYLALAHMIKFRGHFLIEGDLNPDNSDVDKLFIQLVQTYNQLFEENPINASGVDAKAILSARLSKSRRLENLIAQLPGEKKNGLFGNLIALSLGLTPNFKSNFDLAEDAKLQLSKDTYDDDLDNLLAQIGDQYADLFLAAKNLSDAILLSDILRVNTEITKAPLSASMIKRYDEHHQDLTLLKALVRQQLPEKYKEIFFDQSKNGYAGYIDGGASQEEFYKFIKPILEKMDGTEELLVKLNREDLLRKQRTFDNGSIPHQIHLGELHAILRRQEDFYPFLKDNREKIEKILTFRIPYYVGPLARGNSRFAWMTRKSEETITPWNFEEVVDKGASAQSFIERMTNFDKNLPNEKVLPKHSLLYEYFTVYNELTKVKYVTEGMRKPAFLSGEQKKAIVDLLFKTNRKVTVKQLKEDYFKKIECFDSVEISGVEDRFNASLGTYHDLLKIIKDKDFLDNEENEDILEDIVLTLTLFEDREMIEERLKTYAHLFDDKVMKQLKRRRYTGWGRLSRKLINGIRDKQSGKTILDFLKSDGFANRNFMQLIHDDSLTFKEDIQKAQVSGQGDSLHEHIANLAGSPAIKKGILQTVKVVDELVKVMGRHKPENIVIEMARENQTTQKGQKNSRERMKRIEEGIKELGSQILKEHPVENTQLQNEKLYLYYLQNGRDMYVDQELDINRLSDYDVDHIVPQSFLKDDSIDNKVLTRSDKARGKSDNVPSEEVVKKMKNYWRQLLNAKLITQRKFDNLTKAERGGLSELDKAGFIKRQLVETRQITKHVAQILDSRMNTKYDENDKLIREVKVITLKSKLVSDFRKDFQFYKVREINNYHHAHDAYLNAVVGTALIKKYPKLESEFVYGDYKVYDVRKMIAKSEQEIGKATAKYFFYSNIMNFFKTEITLANGEIRKRPLIETNGETGEIVWDKGRDFATVRKVLSMPQVNIVKKTEVQTGGFSKESILPKRNSDKLIARKKDWDPKKYGGFDSPTVAYSVLVVAKVEKGKSKKLKSVKELLGITIMERSSFEKNPIDFLEAKGYKEVKKDLIIKLPKYSLFELENGRKRMLASAGELQKGNELALPSKYVNFLYLASHYEKLKGSPEDNEQKQLFVEQHKHYLDEIIEQISEFSKRVILADANLDKVLSAYNKHRDKPIREQAENIIHLFTLTNLGAPAAFKYFDTTIDRKRYTSTKEVLDATLIHQSITGLYETRIDLSQLGGDGGPAPGGGEAAAKGGTLQLDDEYRLYSPLVKPDQNIQFWLEQFPQAWAETAGMGLAKQVPPQVIQLKASATPVSVRQYPLSKEAQEGIRPHVQRLIQQGILVPVQSPWNTPLLPVRKPGTNDYRPVQDLREVNKRVQDIHPTVPNPYNLLCALPPQRSWYTVLDLKDAFFCLRLHPTSQPLFAFEWRDPGTGRTGQLTWTRLPQGFKNSPTIFNEALHRDLANFRIQHPQVTLLQYVDDLLLAGATKQDCLEGTKALLLELSDLGYRASAKKAQICRREVTYLGYSLRDGQRWLTEARKKTVVQIPAPTTAKQVREFLGTAGFCRLWIPGFATLAAPLYPLTKPKGEFSWAPEHQKAFDAIKKALLSAPALALPDVTKPFTLYVDERKGVARGVLTQTLGPWRRPVAYLSKKLDPVASGWPVCLKAIAAVAILVKDADKLTLGQNITVIAPHALENIVRQPPDRWMTNARMTHYQSLLLTERVTFAPPAALNPATLLPEETDEPVTHDCHQLLIEETGVRKDLTDIPLTGEVLTWFTDGSSYVVEGKRMAGAAVVDGTRTIWASSLPEGTSAQKAELMALTQALRLAEGKSINIYTDSRYAFATAHVHGAIYKQRGWLTSAGREIKNKEEILSLLEALHLPKRLAIIHCPGHQKAKDPISRGNQMADRVAKQAAQGVNLLAGKRTADGSEFEKRTADGSEFESPKKKAKVE

SEQ ID NO: 128 - protein, 2087 aa, synthetic construct
MPAAKRVKLDGGDKKYSIGLDIGTNSVGWAVITDEYKVPSKKFKVLGNTDRHSIKKNLIGALLFDSGETAEATRLKRTARRRYTRRKNRICYLQEIFSNEMAKVDDSFFHRLEESFLVEEDKKHERHPIFGNIVDEVAYHEKYPTIYHLRKKLVDSTDKADLRLIYLALAHMIKFRGHFLIEGDLNPDNSDVDKLFIQLVQTYNQLFEENPINASGVDAKAILSARLSKSRRLENLIAQLPGEKKNGLFGNLIALSLGLTPNFKSNFDLAEDAKLQLSKDTYDDDLDNLLAQIGDQYADLFLAAKNLSDAILLSDILRVNTEITKAPLSASMIKRYDEHHQDLTLLKALVRQQLPEKYKEIFFDQSKNGYAGYIDGGASQEEFYKFIKPILEKMDGTEELLVKLNREDLLRKQRTFDNGSIPHQIHLGELHAILRRQEDFYPFLKDNREKIEKILTFRIPYYVGPLARGNSRFAWMTRKSEETITPWNFEEVVDKGASAQSFIERMTNFDKNLPNEKVLPKHSLLYEYFTVYNELTKVKYVTEGMRKPAFLSGEQKKAIVDLLFKTNRKVTVKQLKEDYFKKIECFDSVEISGVEDRFNASLGTYHDLLKIIKDKDFLDNEENEDILEDIVLTLTLFEDREMIEERLKTYAHLFDDKVMKQLKRRRYTGWGRLSRKLINGIRDKQSGKTILDFLKSDGFANRNFMQLIHDDSLTFKEDIQKAQVSGQGDSLHEHIANLAGSPAIKKGILQTVKVVDELVKVMGRHKPENIVIEMARENQTTQKGQKNSRERMKRIEEGIKELGSQILKEHPVENTQLQNEKLYLYYLQNGRDMYVDQELDINRLSDYDVDHIVPQSFLKDDSIDNKVLTRSDKARGKSDNVPSEEVVKKMKNYWRQLLNAKLITQRKFDNLTKAERGGLSELDKAGFIKRQLVETRQITKHVAQILDSRMNTKYDENDKLIREVKVITLKSKLVSDFRKDFQFYKVREINNYHHAHDAYLNAVVGTALIKKYPKLESEFVYGDYKVYDVRKMIAKSEQEIGKATAKYFFYSNIMNFFKTEITLANGEIRKRPLIETNGETGEIVWDKGRDFATVRKVLSMPQVNIVKKTEVQTGGFSKESILPKRNSDKLIARKKDWDPKKYGGFDSPTVAYSVLVVAKVEKGKSKKLKSVKELLGITIMERSSFEKNPIDFLEAKGYKEVKKDLIIKLPKYSLFELENGRKRMLASAGELQKGNELALPSKYVNFLYLASHYEKLKGSPEDNEQKQLFVEQHKHYLDEIIEQISEFSKRVILADANLDKVLSAYNKHRDKPIREQAENIIHLFTLTNLGAPAAFKYFDTTIDRKRYTSTKEVLDATLIHQSITGLYETRIDLSQLGGDGGGSSEAAAKGGTLQLDDEYRLYSPLVKPDQNIQFWLEQFPQAWAETAGMGLAKQVPPQVIQLKASATPVSVRQYPLSKEAQEGIRPHVQRLIQQGILVPVQSPWNTPLLPVRKPGTNDYRPVQDLREVNKRVQDIHPTVPNPYNLLCALPPQRSWYTVLDLKDAFFCLRLHPTSQPLFAFEWRDPGTGRTGQLTWTRLPQGFKNSPTIFNEALHRDLANFRIQHPQVTLLQYVDDLLLAGATKQDCLEGTKALLLELSDLGYRASAKKAQICRREVTYLGYSLRDGQRWLTEARKKTVVQIPAPTTAKQVREFLGTAGFCRLWIPGFATLAAPLYPLTKPKGEFSWAPEHQKAFDAIKKALLSAPALALPDVTKPFTLYVDERKGVARGVLTQTLGPWRRPVAYLSKKLDPVASGWPVCLKAIAAVAILVKDADKLTLGQNITVIAPHALENIVRQPPDRWMTNARMTHYQSLLLTERVTFAPPAALNPATLLPEETDEPVTHDCHQLLIEETGVRKDLTDIPLTGEVLTWFTDGSSYVVEGKRMAGAAVVDGTRTIWASSLPEGTSAQKAELMALTQALRLAEGKSINIYTDSRYAFATAHVHGAIYKQRGWLTSAGREIKNKEEILSLLEALHLPKRLAIIHCPGHQKAKDPISRGNQMADRVAKQAAQGVNLLAGKRTADGSEFEKRTADGSEFESPKKKAKVE

SEQ ID NO: 129 - protein, 2088 aa, synthetic construct
MPAAKRVKLDGGDKKYSIGLDIGTNSVGWAVITDEYKVPSKKFKVLGNTDRHSIKKNLIGALLFDSGETAEATRLKRTARRRYTRRKNRICYLQEIFSNEMAKVDDSFFHRLEESFLVEEDKKHERHPIFGNIVDEVAYHEKYPTIYHLRKKLVDSTDKADLRLIYLALAHMIKFRGHFLIEGDLNPDNSDVDKLFIQLVQTYNQLFEENPINASGVDAKAILSARLSKSRRLENLIAQLPGEKKNGLFGNLIALSLGLTPNFKSNFDLAEDAKLQLSKDTYDDDLDNLLAQIGDQYADLFLAAKNLSDAILLSDILRVNTEITKAPLSASMIKRYDEHHQDLTLLKALVRQQLPEKYKEIFFDQSKNGYAGYIDGGASQEEFYKFIKPILEKMDGTEELLVKLNREDLLRKQRTFDNGSIPHQIHLGELHAILRRQEDFYPFLKDNREKIEKILTFRIPYYVGPLARGNSRFAWMTRKSEETITPWNFEEVVDKGASAQSFIERMTNFDKNLPNEKVLPKHSLLYEYFTVYNELTKVKYVTEGMRKPAFLSGEQKKAIVDLLFKTNRKVTVKQLKEDYFKKIECFDSVEISGVEDRFNASLGTYHDLLKIIKDKDFLDNEENEDILEDIVLTLTLFEDREMIEERLKTYAHLFDDKVMKQLKRRRYTGWGRLSRKLINGIRDKQSGKTILDFLKSDGFANRNFMQLIHDDSLTFKEDIQKAQVSGQGDSLHEHIANLAGSPAIKKGILQTVKVVDELVKVMGRHKPENIVIEMARENQTTQKGQKNSRERMKRIEEGIKELGSQILKEHPVENTQLQNEKLYLYYLQNGRDMYVDQELDINRLSDYDVDHIVPQSFLKDDSIDNKVLTRSDKARGKSDNVPSEEVVKKMKNYWRQLLNAKLITQRKFDNLTKAERGGLSELDKAGFIKRQLVETRQITKHVAQILDSRMNTKYDENDKLIREVKVITLKSKLVSDFRKDFQFYKVREINNYHHAHDAYLNAVVGTALIKKYPKLESEFVYGDYKVYDVRKMIAKSEQEIGKATAKYFFYSNIMNFFKTEITLANGEIRKRPLIETNGETGEIVWDKGRDFATVRKVLSMPQVNIVKKTEVQTGGFSKESILPKRNSDKLIARKKDWDPKKYGGFDSPTVAYSVLVVAKVEKGKSKKLKSVKELLGITIMERSSFEKNPIDFLEAKGYKEVKKDLIIKLPKYSLFELENGRKRMLASAGELQKGNELALPSKYVNFLYLASHYEKLKGSPEDNEQKQLFVEQHKHYLDEIIEQISEFSKRVILADANLDKVLSAYNKHRDKPIREQAENIIHLFTLTNLGAPAAFKYFDTTIDRKRYTSTKEVLDATLIHQSITGLYETRIDLSQLGGDGGPAPGSSGGGGGTLQLDDEYRLYSPLVKPDQNIQFWLEQFPQAWAETAGMGLAKQVPPQVIQLKASATPVSVRQYPLSKEAQEGIRPHVQRLIQQGILVPVQSPWNTPLLPVRKPGTNDYRPVQDLREVNKRVQDIHPTVPNPYNLLCALPPQRSWYTVLDLKDAFFCLRLHPTSQPLFAFEWRDPGTGRTGQLTWTRLPQGFKNSPTIFNEALHRDLANFRIQHPQVTLLQYVDDLLLAGATKQDCLEGTKALLLELSDLGYRASAKKAQICRREVTYLGYSLRDGQRWLTEARKKTVVQIPAPTTAKQVREFLGTAGFCRLWIPGFATLAAPLYPLTKPKGEFSWAPEHQKAFDAIKKALLSAPALALPDVTKPFTLYVDERKGVARGVLTQTLGPWRRPVAYLSKKLDPVASGWPVCLKAIAAVAILVKDADKLTLGQNITVIAPHALENIVRQPPDRWMTNARMTHYQSLLLTERVTFAPPAALNPATLLPEETDEPVTHDCHQLLIEETGVRKDLTDIPLTGEVLTWFTDGSSYVVEGKRMAGAAVVDGTRTIWASSLPEGTSAQKAELMALTQALRLAEGKSINIYTDSRYAFATAHVHGAIYKQRGWLTSAGREIKNKEEILSLLEALHLPKRLAIIHCPGHQKAKDPISRGNQMADRVAKQAAQGVNLLAGKRTADGSEFEKRTADGSEFESPKKKAKVE

SEQ ID NO: 130 - protein, 2088 aa, synthetic construct
MPAAKRVKLDGGDKKYSIGLDIGTNSVGWAVITDEYKVPSKKFKVLGNTDRHSIKKNLIGALLFDSGETAEATRLKRTARRRYTRRKNRICYLQEIFSNEMAKVDDSFFHRLEESFLVEEDKKHERHPIFGNIVDEVAYHEKYPTIYHLRKKLVDSTDKADLRLIYLALAHMIKFRGHFLIEGDLNPDNSDVDKLFIQLVQTYNQLFEENPINASGVDAKAILSARLSKSRRLENLIAQLPGEKKNGLFGNLIALSLGLTPNFKSNFDLAEDAKLQLSKDTYDDDLDNLLAQIGDQYADLFLAAKNLSDAILLSDILRVNTEITKAPLSASMIKRYDEHHQDLTLLKALVRQQLPEKYKEIFFDQSKNGYAGYIDGGASQEEFYKFIKPILEKMDGTEELLVKLNREDLLRKQRTFDNGSIPHQIHLGELHAILRRQEDFYPFLKDNREKIEKILTFRIPYYVGPLARGNSRFAWMTRKSEETITPWNFEEVVDKGASAQSFIERMTNFDKNLPNEKVLPKHSLLYEYFTVYNELTKVKYVTEGMRKPAFLSGEQKKAIVDLLFKTNRKVTVKQLKEDYFKKIECFDSVEISGVEDRFNASLGTYHDLLKIIKDKDFLDNEENEDILEDIVLTLTLFEDREMIEERLKTYAHLFDDKVMKQLKRRRYTGWGRLSRKLINGIRDKQSGKTILDFLKSDGFANRNFMQLIHDDSLTFKEDIQKAQVSGQGDSLHEHIANLAGSPAIKKGILQTVKVVDELVKVMGRHKPENIVIEMARENQTTQKGQKNSRERMKRIEEGIKELGSQILKEHPVENTQLQNEKLYLYYLQNGRDMYVDQELDINRLSDYDVDHIVPQSFLKDDSIDNKVLTRSDKARGKSDNVPSEEVVKKMKNYWRQLLNAKLITQRKFDNLTKAERGGLSELDKAGFIKRQLVETRQITKHVAQILDSRMNTKYDENDKLIREVKVITLKSKLVSDFRKDFQFYKVREINNYHHAHDAYLNAVVGTALIKKYPKLESEFVYGDYKVYDVRKMIAKSEQEIGKATAKYFFYSNIMNFFKTEITLANGEIRKRPLIETNGETGEIVWDKGRDFATVRKVLSMPQVNIVKKTEVQTGGFSKESILPKRNSDKLIARKKDWDPKKYGGFDSPTVAYSVLVVAKVEKGKSKKLKSVKELLGITIMERSSFEKNPIDFLEAKGYKEVKKDLIIKLPKYSLFELENGRKRMLASAGELQKGNELALPSKYVNFLYLASHYEKLKGSPEDNEQKQLFVEQHKHYLDEIIEQISEFSKRVILADANLDKVLSAYNKHRDKPIREQAENIIHLFTLTNLGAPAAFKYFDTTIDRKRYTSTKEVLDATLIHQSITGLYETRIDLSQLGGDGGGGSGGSGGSGGTLQLDDEYRLYSPLVKPDQNIQFWLEQFPQAWAETAGMGLAKQVPPQVIQLKASATPVSVRQYPLSKEAQEGIRPHVQRLIQQGILVPVQSPWNTPLLPVRKPGTNDYRPVQDLREVNKRVQDIHPTVPNPYNLLCALPPQRSWYTVLDLKDAFFCLRLHPTSQPLFAFEWRDPGTGRTGQLTWTRLPQGFKNSPTIFNEALHRDLANFRIQHPQVTLLQYVDDLLLAGATKQDCLEGTKALLLELSDLGYRASAKKAQICRREVTYLGYSLRDGQRWLTEARKKTVVQIPAPTTAKQVREFLGTAGFCRLWIPGFATLAAPLYPLTKPKGEFSWAPEHQKAFDAIKKALLSAPALALPDVTKPFTLYVDERKGVARGVLTQTLGPWRRPVAYLSKKLDPVASGWPVCLKAIAAVAILVKDADKLTLGQNITVIAPHALENIVRQPPDRWMTNARMTHYQSLLLTERVTFAPPAALNPATLLPEETDEPVTHDCHQLLIEETGVRKDLTDIPLTGEVLTWFTDGSSYVVEGKRMAGAAVVDGTRTIWASSLPEGTSAQKAELMALTQALRLAEGKSINIYTDSRYAFATAHVHGAIYKQRGWLTSAGREIKNKEEILSLLEALHLPKRLAIIHCPGHQKAKDPISRGNQMADRVAKQAAQGVNLLAGKRTADGSEFEKRTADGSEFESPKKKAKVE

SEQ ID NO: 131 - protein, 2088 aa, synthetic construct
MPAAKRVKLDGGDKKYSIGLDIGTNSVGWAVITDEYKVPSKKFKVLGNTDRHSIKKNLIGALLFDSGETAEATRLKRTARRRYTRRKNRICYLQEIFSNEMAKVDDSFFHRLEESFLVEEDKKHERHPIFGNIVDEVAYHEKYPTIYHLRKKLVDSTDKADLRLIYLALAHMIKFRGHFLIEGDLNPDNSDVDKLFIQLVQTYNQLFEENPINASGVDAKAILSARLSKSRRLENLIAQLPGEKKNGLFGNLIALSLGLTPNFKSNFDLAEDAKLQLSKDTYDDDLDNLLAQIGDQYADLFLAAKNLSDAILLSDILRVNTEITKAPLSASMIKRYDEHHQDLTLLKALVRQQLPEKYKEIFFDQSKNGYAGYIDGGASQEEFYKFIKPILEKMDGTEELLVKLNREDLLRKQRTFDNGSIPHQIHLGELHAILRRQEDFYPFLKDNREKIEKILTFRIPYYVGPLARGNSRFAWMTRKSEETITPWNFEEVVDKGASAQSFIERMTNFDKNLPNEKVLPKHSLLYEYFTVYNELTKVKYVTEGMRKPAFLSGEQKKAIVDLLFKTNRKVTVKQLKEDYFKKIECFDSVEISGVEDRFNASLGTYHDLLKIIKDKDFLDNEENEDILEDIVLTLTLFEDREMIEERLKTYAHLFDDKVMKQLKRRRYTGWGRLSRKLINGIRDKQSGKTILDFLKSDGFANRNFMQLIHDDSLTFKEDIQKAQVSGQGDSLHEHIANLAGSPAIKKGILQTVKVVDELVKVMGRHKPENIVIEMARENQTTQKGQKNSRERMKRIEEGIKELGSQILKEHPVENTQLQNEKLYLYYLQNGRDMYVDQELDINRLSDYDVDHIVPQSFLKDDSIDNKVLTRSDKARGKSDNVPSEEVVKKMKNYWRQLLNAKLITQRKFDNLTKAERGGLSELDKAGFIKRQLVETRQITKHVAQILDSRMNTKYDENDKLIREVKVITLKSKLVSDFRKDFQFYKVREINNYHHAHDAYLNAVVGTALIKKYPKLESEFVYGDYKVYDVRKMIAKSEQEIGKATAKYFFYSNIMNFFKTEITLANGEIRKRPLIETNGETGEIVWDKGRDFATVRKVLSMPQVNIVKKTEVQTGGFSKESILPKRNSDKLIARKKDWDPKKYGGFDSPTVAYSVLVVAKVEKGKSKKLKSVKELLGITIMERSSFEKNPIDFLEAKGYKEVKKDLIIKLPKYSLFELENGRKRMLASAGELQKGNELALPSKYVNFLYLASHYEKLKGSPEDNEQKQLFVEQHKHYLDEIIEQISEFSKRVILADANLDKVLSAYNKHRDKPIREQAENIIHLFTLTNLGAPAAFKYFDTTIDRKRYTSTKEVLDATLIHQSITGLYETRIDLSQLGGDGGGGSPAPGGGGGTLQLDDEYRLYSPLVKPDQNIQFWLEQFPQAWAETAGMGLAKQVPPQVIQLKASATPVSVRQYPLSKEAQEGIRPHVQRLIQQGILVPVQSPWNTPLLPVRKPGTNDYRPVQDLREVNKRVQDIHPTVPNPYNLLCALPPQRSWYTVLDLKDAFFCLRLHPTSQPLFAFEWRDPGTGRTGQLTWTRLPQGFKNSPTIFNEALHRDLANFRIQHPQVTLLQYVDDLLLAGATKQDCLEGTKALLLELSDLGYRASAKKAQICRREVTYLGYSLRDGQRWLTEARKKTVVQIPAPTTAKQVREFLGTAGFCRLWIPGFATLAAPLYPLTKPKGEFSWAPEHQKAFDAIKKALLSAPALALPDVTKPFTLYVDERKGVARGVLTQTLGPWRRPVAYLSKKLDPVASGWPVCLKAIAAVAILVKDADKLTLGQNITVIAPHALENIVRQPPDRWMTNARMTHYQSLLLTERVTFAPPAALNPATLLPEETDEPVTHDCHQLLIEETGVRKDLTDIPLTGEVLTWFTDGSSYVVEGKRMAGAAVVDGTRTIWASSLPEGTSAQKAELMALTQALRLAEGKSINIYTDSRYAFATAHVHGAIYKQRGWLTSAGREIKNKEEILSLLEALHLPKRLAIIHCPGHQKAKDPISRGNQMADRVAKQAAQGVNLLAGKRTADGSEFEKRTADGSEFESPKKKAKVE

SEQ ID NO: 132 - protein, 2090 aa, synthetic construct
MPAAKRVKLDGGDKKYSIGLDIGTNSVGWAVITDEYKVPSKKFKVLGNTDRHSIKKNLIGALLFDSGETAEATRLKRTARRRYTRRKNRICYLQEIFSNEMAKVDDSFFHRLEESFLVEEDKKHERHPIFGNIVDEVAYHEKYPTIYHLRKKLVDSTDKADLRLIYLALAHMIKFRGHFLIEGDLNPDNSDVDKLFIQLVQTYNQLFEENPINASGVDAKAILSARLSKSRRLENLIAQLPGEKKNGLFGNLIALSLGLTPNFKSNFDLAEDAKLQLSKDTYDDDLDNLLAQIGDQYADLFLAAKNLSDAILLSDILRVNTEITKAPLSASMIKRYDEHHQDLTLLKALVRQQLPEKYKEIFFDQSKNGYAGYIDGGASQEEFYKFIKPILEKMDGTEELLVKLNREDLLRKQRTFDNGSIPHQIHLGELHAILRRQEDFYPFLKDNREKIEKILTFRIPYYVGPLARGNSRFAWMTRKSEETITPWNFEEVVDKGASAQSFIERMTNFDKNLPNEKVLPKHSLLYEYFTVYNELTKVKYVTEGMRKPAFLSGEQKKAIVDLLFKTNRKVTVKQLKEDYFKKIECFDSVEISGVEDRFNASLGTYHDLLKIIKDKDFLDNEENEDILEDIVLTLTLFEDREMIEERLKTYAHLFDDKVMKQLKRRRYTGWGRLSRKLINGIRDKQSGKTILDFLKSDGFANRNFMQLIHDDSLTFKEDIQKAQVSGQGDSLHEHIANLAGSPAIKKGILQTVKVVDELVKVMGRHKPENIVIEMARENQTTQKGQKNSRERMKRIEEGIKELGSQILKEHPVENTQLQNEKLYLYYLQNGRDMYVDQELDINRLSDYDVDHIVPQSFLKDDSIDNKVLTRSDKARGKSDNVPSEEVVKKMKNYWRQLLNAKLITQRKFDNLTKAERGGLSELDKAGFIKRQLVETRQITKHVAQILDSRMNTKYDENDKLIREVKVITLKSKLVSDFRKDFQFYKVREINNYHHAHDAYLNAVVGTALIKKYPKLESEFVYGDYKVYDVRKMIAKSEQEIGKATAKYFFYSNIMNFFKTEITLANGEIRKRPLIETNGETGEIVWDKGRDFATVRKVLSMPQVNIVKKTEVQTGGFSKESILPKRNSDKLIARKKDWDPKKYGGFDSPTVAYSVLVVAKVEKGKSKKLKSVKELLGITIMERSSFEKNPIDFLEAKGYKEVKKDLIIKLPKYSLFELENGRKRMLASAGELQKGNELALPSKYVNFLYLASHYEKLKGSPEDNEQKQLFVEQHKHYLDEIIEQISEFSKRVILADANLDKVLSAYNKHRDKPIREQAENIIHLFTLTNLGAPAAFKYFDTTIDRKRYTSTKEVLDATLIHQSITGLYETRIDLSQLGGDGGPAPEAAAKGSSGGTLQLDDEYRLYSPLVKPDQNIQFWLEQFPQAWAETAGMGLAKQVPPQVIQLKASATPVSVRQYPLSKEAQEGIRPHVQRLIQQGILVPVQSPWNTPLLPVRKPGTNDYRPVQDLREVNKRVQDIHPTVPNPYNLLCALPPQRSWYTVLDLKDAFFCLRLHPTSQPLFAFEWRDPGTGRTGQLTWTRLPQGFKNSPTIFNEALHRDLANFRIQHPQVTLLQYVDDLLLAGATKQDCLEGTKALLLELSDLGYRASAKKAQICRREVTYLGYSLRDGQRWLTEARKKTVVQIPAPTTAKQVREFLGTAGFCRLWIPGFATLAAPLYPLTKPKGEFSWAPEHQKAFDAIKKALLSAPALALPDVTKPFTLYVDERKGVARGVLTQTLGPWRRPVAYLSKKLDPVASGWPVCLKAIAAVAILVKDADKLTLGQNITVIAPHALENIVRQPPDRWMTNARMTHYQSLLLTERVTFAPPAALNPATLLPEETDEPVTHDCHQLLIEETGVRKDLTDIPLTGEVLTWFTDGSSYVVEGKRMAGAAVVDGTRTIWASSLPEGTSAQKAELMALTQALRLAEGKSINIYTDSRYAFATAHVHGAIYKQRGWLTSAGREIKNKEEILSLLEALHLPKRLAIIHCPGHQKAKDPISRGNQMADRVAKQAAQGVNLLAGKRTADGSEFEKRTADGSEFESPKKKAKVE

SEQ ID NO: 133 - protein, 2090 aa, synthetic construct
MPAAKRVKLDGGDKKYSIGLDIGTNSVGWAVITDEYKVPSKKFKVLGNTDRHSIKKNLIGALLFDSGETAEATRLKRTARRRYTRRKNRICYLQEIFSNEMAKVDDSFFHRLEESFLVEEDKKHERHPIFGNIVDEVAYHEKYPTIYHLRKKLVDSTDKADLRLIYLALAHMIKFRGHFLIEGDLNPDNSDVDKLFIQLVQTYNQLFEENPINASGVDAKAILSARLSKSRRLENLIAQLPGEKKNGLFGNLIALSLGLTPNFKSNFDLAEDAKLQLSKDTYDDDLDNLLAQIGDQYADLFLAAKNLSDAILLSDILRVNTEITKAPLSASMIKRYDEHHQDLTLLKALVRQQLPEKYKEIFFDQSKNGYAGYIDGGASQEEFYKFIKPILEKMDGTEELLVKLNREDLLRKQRTFDNGSIPHQIHLGELHAILRRQEDFYPFLKDNREKIEKILTFRIPYYVGPLARGNSRFAWMTRKSEETITPWNFEEVVDKGASAQSFIERMTNFDKNLPNEKVLPKHSLLYEYFTVYNELTKVKYVTEGMRKPAFLSGEQKKAIVDLLFKTNRKVTVKQLKEDYFKKIECFDSVEISGVEDRFNASLGTYHDLLKIIKDKDFLDNEENEDILEDIVLTLTLFEDREMIEERLKTYAHLFDDKVMKQLKRRRYTGWGRLSRKLINGIRDKQSGKTILDFLKSDGFANRNFMQLIHDDSLTFKEDIQKAQVSGQGDSLHEHIANLAGSPAIKKGILQTVKVVDELVKVMGRHKPENIVIEMARENQTTQKGQKNSRERMKRIEEGIKELGSQILKEHPVENTQLQNEKLYLYYLQNGRDMYVDQELDINRLSDYDVDHIVPQSFLKDDSIDNKVLTRSDKARGKSDNVPSEEVVKKMKNYWRQLLNAKLITQRKFDNLTKAERGGLSELDKAGFIKRQLVETRQITKHVAQILDSRMNTKYDENDKLIREVKVITLKSKLVSDFRKDFQFYKVREINNYHHAHDAYLNAVVGTALIKKYPKLESEFVYGDYKVYDVRKMIAKSEQEIGKATAKYFFYSNIMNFFKTEITLANGEIRKRPLIETNGETGEIVWDKGRDFATVRKVLSMPQVNIVKKTEVQTGGFSKESILPKRNSDKLIARKKDWDPKKYGGFDSPTVAYSVLVVAKVEKGKSKKLKSVKELLGITIMERSSFEKNPIDFLEAKGYKEVKKDLIIKLPKYSLFELENGRKRMLASAGELQKGNELALPSKYVNFLYLASHYEKLKGSPEDNEQKQLFVEQHKHYLDEIIEQISEFSKRVILADANLDKVLSAYNKHRDKPIREQAENIIHLFTLTNLGAPAAFKYFDTTIDRKRYTSTKEVLDATLIHQSITGLYETRIDLSQLGGDGGGSSEAAAKGGGGGTLQLDDEYRLYSPLVKPDQNIQFWLEQFPQAWAETAGMGLAKQVPPQVIQLKASATPVSVRQYPLSKEAQEGIRPHVQRLIQQGILVPVQSPWNTPLLPVRKPGTNDYRPVQDLREVNKRVQDIHPTVPNPYNLLCALPPQRSWYTVLDLKDAFFCLRLHPTSQPLFAFEWRDPGTGRTGQLTWTRLPQGFKNSPTIFNEALHRDLANFRIQHPQVTLLQYVDDLLLAGATKQDCLEGTKALLLELSDLGYRASAKKAQICRREVTYLGYSLRDGQRWLTEARKKTVVQIPAPTTAKQVREFLGTAGFCRLWIPGFATLAAPLYPLTKPKGEFSWAPEHQKAFDAIKKALLSAPALALPDVTKPFTLYVDERKGVARGVLTQTLGPWRRPVAYLSKKLDPVASGWPVCLKAIAAVAILVKDADKLTLGQNITVIAPHALENIVRQPPDRWMTNARMTHYQSLLLTERVTFAPPAALNPATLLPEETDEPVTHDCHQLLIEETGVRKDLTDIPLTGEVLTWFTDGSSYVVEGKRMAGAAVVDGTRTIWASSLPEGTSAQKAELMALTQALRLAEGKSINIYTDSRYAFATAHVHGAIYKQRGWLTSAGREIKNKEEILSLLEALHLPKRLAIIHCPGHQKAKDPISRGNQMADRVAKQAAQGVNLLAGKRTADGSEFEKRTADGSEFESPKKKAKVE

SEQ ID NO: 134 - protein, 2088 aa, synthetic construct
MPAAKRVKLDGGDKKYSIGLDIGTNSVGWAVITDEYKVPSKKFKVLGNTDRHSIKKNLIGALLFDSGETAEATRLKRTARRRYTRRKNRICYLQEIFSNEMAKVDDSFFHRLEESFLVEEDKKHERHPIFGNIVDEVAYHEKYPTIYHLRKKLVDSTDKADLRLIYLALAHMIKFRGHFLIEGDLNPDNSDVDKLFIQLVQTYNQLFEENPINASGVDAKAILSARLSKSRRLENLIAQLPGEKKNGLFGNLIALSLGLTPNFKSNFDLAEDAKLQLSKDTYDDDLDNLLAQIGDQYADLFLAAKNLSDAILLSDILRVNTEITKAPLSASMIKRYDEHHQDLTLLKALVRQQLPEKYKEIFFDQSKNGYAGYIDGGASQEEFYKFIKPILEKMDGTEELLVKLNREDLLRKQRTFDNGSIPHQIHLGELHAILRRQEDFYPFLKDNREKIEKILTFRIPYYVGPLARGNSRFAWMTRKSEETITPWNFEEVVDKGASAQSFIERMTNFDKNLPNEKVLPKHSLLYEYFTVYNELTKVKYVTEGMRKPAFLSGEQKKAIVDLLFKTNRKVTVKQLKEDYFKKIECFDSVEISGVEDRFNASLGTYHDLLKIIKDKDFLDNEENEDILEDIVLTLTLFEDREMIEERLKTYAHLFDDKVMKQLKRRRYTGWGRLSRKLINGIRDKQSGKTILDFLKSDGFANRNFMQLIHDDSLTFKEDIQKAQVSGQGDSLHEHIANLAGSPAIKKGILQTVKVVDELVKVMGRHKPENIVIEMARENQTTQKGQKNSRERMKRIEEGIKELGSQILKEHPVENTQLQNEKLYLYYLQNGRDMYVDQELDINRLSDYDVDHIVPQSFLKDDSIDNKVLTRSDKARGKSDNVPSEEVVKKMKNYWRQLLNAKLITQRKFDNLTKAERGGLSELDKAGFIKRQLVETRQITKHVAQILDSRMNTKYDENDKLIREVKVITLKSKLVSDFRKDFQFYKVREINNYHHAHDAYLNAVVGTALIKKYPKLESEFVYGDYKVYDVRKMIAKSEQEIGKATAKYFFYSNIMNFFKTEITLANGEIRKRPLIETNGETGEIVWDKGRDFATVRKVLSMPQVNIVKKTEVQTGGFSKESILPKRNSDKLIARKKDWDPKKYGGFDSPTVAYSVLVVAKVEKGKSKKLKSVKELLGITIMERSSFEKNPIDFLEAKGYKEVKKDLIIKLPKYSLFELENGRKRMLASAGELQKGNELALPSKYVNFLYLASHYEKLKGSPEDNEQKQLFVEQHKHYLDEIIEQISEFSKRVILADANLDKVLSAYNKHRDKPIREQAENIIHLFTLTNLGAPAAFKYFDTTIDRKRYTSTKEVLDATLIHQSITGLYETRIDLSQLGGDGGPAPGSSGGSGGTLQLDDEYRLYSPLVKPDQNIQFWLEQFPQAWAETAGMGLAKQVPPQVIQLKASATPVSVRQYPLSKEAQEGIRPHVQRLIQQGILVPVQSPWNTPLLPVRKPGTNDYRPVQDLREVNKRVQDIHPTVPNPYNLLCALPPQRSWYTVLDLKDAFFCLRLHPTSQPLFAFEWRDPGTGRTGQLTWTRLPQGFKNSPTIFNEALHRDLANFRIQHPQVTLLQYVDDLLLAGATKQDCLEGTKALLLELSDLGYRASAKKAQICRREVTYLGYSLRDGQRWLTEARKKTVVQIPAPTTAKQVREFLGTAGFCRLWIPGFATLAAPLYPLTKPKGEFSWAPEHQKAFDAIKKALLSAPALALPDVTKPFTLYVDERKGVARGVLTQTLGPWRRPVAYLSKKLDPVASGWPVCLKAIAAVAILVKDADKLTLGQNITVIAPHALENIVRQPPDRWMTNARMTHYQSLLLTERVTFAPPAALNPATLLPEETDEPVTHDCHQLLIEETGVRKDLTDIPLTGEVLTWFTDGSSYVVEGKRMAGAAVVDGTRTIWASSLPEGTSAQKAELMALTQALRLAEGKSINIYTDSRYAFATAHVHGAIYKQRGWLTSAGREIKNKEEILSLLEALHLPKRLAIIHCPGHQKAKDPISRGNQMADRVAKQAAQGVNLLAGKRTADGSEFEKRTADGSEFESPKKKAKVE

SEQ ID NO: 135 - protein, 2088 aa, synthetic construct
MPAAKRVKLDGGDKKYSIGLDIGTNSVGWAVITDEYKVPSKKFKVLGNTDRHSIKKNLIGALLFDSGETAEATRLKRTARRRYTRRKNRICYLQEIFSNEMAKVDDSFFHRLEESFLVEEDKKHERHPIFGNIVDEVAYHEKYPTIYHLRKKLVDSTDKADLRLIYLALAHMIKFRGHFLIEGDLNPDNSDVDKLFIQLVQTYNQLFEENPINASGVDAKAILSARLSKSRRLENLIAQLPGEKKNGLFGNLIALSLGLTPNFKSNFDLAEDAKLQLSKDTYDDDLDNLLAQIGDQYADLFLAAKNLSDAILLSDILRVNTEITKAPLSASMIKRYDEHHQDLTLLKALVRQQLPEKYKEIFFDQSKNGYAGYIDGGASQEEFYKFIKPILEKMDGTEELLVKLNREDLLRKQRTFDNGSIPHQIHLGELHAILRRQEDFYPFLKDNREKIEKILTFRIPYYVGPLARGNSRFAWMTRKSEETITPWNFEEVVDKGASAQSFIERMTNFDKNLPNEKVLPKHSLLYEYFTVYNELTKVKYVTEGMRKPAFLSGEQKKAIVDLLFKTNRKVTVKQLKEDYFKKIECFDSVEISGVEDRFNASLGTYHDLLKIIKDKDFLDNEENEDILEDIVLTLTLFEDREMIEERLKTYAHLFDDKVMKQLKRRRYTGWGRLSRKLINGIRDKQSGKTILDFLKSDGFANRNFMQLIHDDSLTFKEDIQKAQVSGQGDSLHEHIANLAGSPAIKKGILQTVKVVDELVKVMGRHKPENIVIEMARENQTTQKGQKNSRERMKRIEEGIKELGSQILKEHPVENTQLQNEKLYLYYLQNGRDMYVDQELDINRLSDYDVDHIVPQSFLKDDSIDNKVLTRSDKARGKSDNVPSEEVVKKMKNYWRQLLNAKLITQRKFDNLTKAERGGLSELDKAGFIKRQLVETRQITKHVAQILDSRMNTKYDENDKLIREVKVITLKSKLVSDFRKDFQFYKVREINNYHHAHDAYLNAVVGTALIKKYPKLESEFVYGDYKVYDVRKMIAKSEQEIGKATAKYFFYSNIMNFFKTEITLANGEIRKRPLIETNGETGEIVWDKGRDFATVRKVLSMPQVNIVKKTEVQTGGFSKESILPKRNSDKLIARKKDWDPKKYGGFDSPTVAYSVLVVAKVEKGKSKKLKSVKELLGITIMERSSFEKNPIDFLEAKGYKEVKKDLIIKLPKYSLFELENGRKRMLASAGELQKGNELALPSKYVNFLYLASHYEKLKGSPEDNEQKQLFVEQHKHYLDEIIEQISEFSKRVILADANLDKVLSAYNKHRDKPIREQAENIIHLFTLTNLGAPAAFKYFDTTIDRKRYTSTKEVLDATLIHQSITGLYETRIDLSQLGGDGGPAPGGSGSSGGTLQLDDEYRLYSPLVKPDQNIQFWLEQFPQAWAETAGMGLAKQVPPQVIQLKASATPVSVRQYPLSKEAQEGIRPHVQRLIQQGILVPVQSPWNTPLLPVRKPGTNDYRPVQDLREVNKRVQDIHPTVPNPYNLLCALPPQRSWYTVLDLKDAFFCLRLHPTSQPLFAFEWRDPGTGRTGQLTWTRLPQGFKNSPTIFNEALHRDLANFRIQHPQVTLLQYVDDLLLAGATKQDCLEGTKALLLELSDLGYRASAKKAQICRREVTYLGYSLRDGQRWLTEARKKTVVQIPAPTTAKQVREFLGTAGFCRLWIPGFATLAAPLYPLTKPKGEFSWAPEHQKAFDAIKKALLSAPALALPDVTKPFTLYVDERKGVARGVLTQTLGPWRRPVAYLSKKLDPVASGWPVCLKAIAAVAILVKDADKLTLGQNITVIAPHALENIVRQPPDRWMTNARMTHYQSLLLTERVTFAPPAALNPATLLPEETDEPVTHDCHQLLIEETGVRKDLTDIPLTGEVLTWFTDGSSYVVEGKRMAGAAVVDGTRTIWASSLPEGTSAQKAELMALTQALRLAEGKSINIYTDSRYAFATAHVHGAIYKQRGWLTSAGREIKNKEEILSLLEALHLPKRLAIIHCPGHQKAKDPISRGNQMADRVAKQAAQGVNLLAGKRTADGSEFEKRTADGSEFESPKKKAKVE

SEQ ID NO: 136 - protein, 2090 aa, synthetic construct
MPAAKRVKLDGGDKKYSIGLDIGTNSVGWAVITDEYKVPSKKFKVLGNTDRHSIKKNLIGALLFDSGETAEATRLKRTARRRYTRRKNRICYLQEIFSNEMAKVDDSFFHRLEESFLVEEDKKHERHPIFGNIVDEVAYHEKYPTIYHLRKKLVDSTDKADLRLIYLALAHMIKFRGHFLIEGDLNPDNSDVDKLFIQLVQTYNQLFEENPINASGVDAKAILSARLSKSRRLENLIAQLPGEKKNGLFGNLIALSLGLTPNFKSNFDLAEDAKLQLSKDTYDDDLDNLLAQIGDQYADLFLAAKNLSDAILLSDILRVNTEITKAPLSASMIKRYDEHHQDLTLLKALVRQQLPEKYKEIFFDQSKNGYAGYIDGGASQEEFYKFIKPILEKMDGTEELLVKLNREDLLRKQRTFDNGSIPHQIHLGELHAILRRQEDFYPFLKDNREKIEKILTFRIPYYVGPLARGNSRFAWMTRKSEETITPWNFEEVVDKGASAQSFIERMTNFDKNLPNEKVLPKHSLLYEYFTVYNELTKVKYVTEGMRKPAFLSGEQKKAIVDLLFKTNRKVTVKQLKEDYFKKIECFDSVEISGVEDRFNASLGTYHDLLKIIKDKDFLDNEENEDILEDIVLTLTLFEDREMIEERLKTYAHLFDDKVMKQLKRRRYTGWGRLSRKLINGIRDKQSGKTILDFLKSDGFANRNFMQLIHDDSLTFKEDIQKAQVSGQGDSLHEHIANLAGSPAIKKGILQTVKVVDELVKVMGRHKPENIVIEMARENQTTQKGQKNSRERMKRIEEGIKELGSQILKEHPVENTQLQNEKLYLYYLQNGRDMYVDQELDINRLSDYDVDHIVPQSFLKDDSIDNKVLTRSDKARGKSDNVPSEEVVKKMKNYWRQLLNAKLITQRKFDNLTKAERGGLSELDKAGFIKRQLVETRQITKHVAQILDSRMNTKYDENDKLIREVKVITLKSKLVSDFRKDFQFYKVREINNYHHAHDAYLNAVVGTALIKKYPKLESEFVYGDYKVYDVRKMIAKSEQEIGKATAKYFFYSNIMNFFKTEITLANGEIRKRPLIETNGETGEIVWDKGRDFATVRKVLSMPQVNIVKKTEVQTGGFSKESILPKRNSDKLIARKKDWDPKKYGGFDSPTVAYSVLVVAKVEKGKSKKLKSVKELLGITIMERSSFEKNPIDFLEAKGYKEVKKDLIIKLPKYSLFELENGRKRMLASAGELQKGNELALPSKYVNFLYLASHYEKLKGSPEDNEQKQLFVEQHKHYLDEIIEQISEFSKRVILADANLDKVLSAYNKHRDKPIREQAENIIHLFTLTNLGAPAAFKYFDTTIDRKRYTSTKEVLDATLIHQSITGLYETRIDLSQLGGDGGEAAAKGGSGSSGGTLQLDDEYRLYSPLVKPDQNIQFWLEQFPQAWAETAGMGLAKQVPPQVIQLKASATPVSVRQYPLSKEAQEGIRPHVQRLIQQGILVPVQSPWNTPLLPVRKPGTNDYRPVQDLREVNKRVQDIHPTVPNPYNLLCALPPQRSWYTVLDLKDAFFCLRLHPTSQPLFAFEWRDPGTGRTGQLTWTRLPQGFKNSPTIFNEALHRDLANFRIQHPQVTLLQYVDDLLLAGATKQDCLEGTKALLLELSDLGYRASAKKAQICRREVTYLGYSLRDGQRWLTEARKKTVVQIPAPTTAKQVREFLGTAGFCRLWIPGFATLAAPLYPLTKPKGEFSWAPEHQKAFDAIKKALLSAPALALPDVTKPFTLYVDERKGVARGVLTQTLGPWRRPVAYLSKKLDPVASGWPVCLKAIAAVAILVKDADKLTLGQNITVIAPHALENIVRQPPDRWMTNARMTHYQSLLLTERVTFAPPAALNPATLLPEETDEPVTHDCHQLLIEETGVRKDLTDIPLTGEVLTWFTDGSSYVVEGKRMAGAAVVDGTRTIWASSLPEGTSAQKAELMALTQALRLAEGKSINIYTDSRYAFATAHVHGAIYKQRGWLTSAGREIKNKEEILSLLEALHLPKRLAIIHCPGHQKAKDPISRGNQMADRVAKQAAQGVNLLAGKRTADGSEFEKRTADGSEFESPKKKAKVE

SEQ ID NO: 137 - protein, 2099 aa, synthetic construct
MPAAKRVKLDGGDKKYSIGLDIGTNSVGWAVITDEYKVPSKKFKVLGNTDRHSIKKNLIGALLFDSGETAEATRLKRTARRRYTRRKNRICYLQEIFSNEMAKVDDSFFHRLEESFLVEEDKKHERHPIFGNIVDEVAYHEKYPTIYHLRKKLVDSTDKADLRLIYLALAHMIKFRGHFLIEGDLNPDNSDVDKLFIQLVQTYNQLFEENPINASGVDAKAILSARLSKSRRLENLIAQLPGEKKNGLFGNLIALSLGLTPNFKSNFDLAEDAKLQLSKDTYDDDLDNLLAQIGDQYADLFLAAKNLSDAILLSDILRVNTEITKAPLSASMIKRYDEHHQDLTLLKALVRQQLPEKYKEIFFDQSKNGYAGYIDGGASQEEFYKFIKPILEKMDGTEELLVKLNREDLLRKQRTFDNGSIPHQIHLGELHAILRRQEDFYPFLKDNREKIEKILTFRIPYYVGPLARGNSRFAWMTRKSEETITPWNFEEVVDKGASAQSFIERMTNFDKNLPNEKVLPKHSLLYEYFTVYNELTKVKYVTEGMRKPAFLSGEQKKAIVDLLFKTNRKVTVKQLKEDYFKKIECFDSVEISGVEDRFNASLGTYHDLLKIIKDKDFLDNEENEDILEDIVLTLTLFEDREMIEERLKTYAHLFDDKVMKQLKRRRYTGWGRLSRKLINGIRDKQSGKTILDFLKSDGFANRNFMQLIHDDSLTFKEDIQKAQVSGQGDSLHEHIANLAGSPAIKKGILQTVKVVDELVKVMGRHKPENIVIEMARENQTTQKGQKNSRERMKRIEEGIKELGSQILKEHPVENTQLQNEKLYLYYLQNGRDMYVDQELDINRLSDYDVDHIVPQSFLKDDSIDNKVLTRSDKARGKSDNVPSEEVVKKMKNYWRQLLNAKLITQRKFDNLTKAERGGLSELDKAGFIKRQLVETRQITKHVAQILDSRMNTKYDENDKLIREVKVITLKSKLVSDFRKDFQFYKVREINNYHHAHDAYLNAVVGTALIKKYPKLESEFVYGDYKVYDVRKMIAKSEQEIGKATAKYFFYSNIMNFFKTEITLANGEIRKRPLIETNGETGEIVWDKGRDFATVRKVLSMPQVNIVKKTEVQTGGFSKESILPKRNSDKLIARKKDWDPKKYGGFDSPTVAYSVLVVAKVEKGKSKKLKSVKELLGITIMERSSFEKNPIDFLEAKGYKEVKKDLIIKLPKYSLFELENGRKRMLASAGELQKGNELALPSKYVNFLYLASHYEKLKGSPEDNEQKQLFVEQHKHYLDEIIEQISEFSKRVILADANLDKVLSAYNKHRDKPIREQAENIIHLFTLTNLGAPAAFKYFDTTIDRKRYTSTKEVLDATLIHQSITGLYETRIDLSQLGGDGGEAAAKEAAAKEAAAKEAAAKGGTLQLDDEYRLYSPLVKPDQNIQFWLEQFPQAWAETAGMGLAKQVPPQVIQLKASATPVSVRQYPLSKEAQEGIRPHVQRLIQQGILVPVQSPWNTPLLPVRKPGTNDYRPVQDLREVNKRVQDIHPTVPNPYNLLCALPPQRSWYTVLDLKDAFFCLRLHPTSQPLFAFEWRDPGTGRTGQLTWTRLPQGFKNSPTIFNEALHRDLANFRIQHPQVTLLQYVDDLLLAGATKQDCLEGTKALLLELSDLGYRASAKKAQICRREVTYLGYSLRDGQRWLTEARKKTVVQIPAPTTAKQVREFLGTAGFCRLWIPGFATLAAPLYPLTKPKGEFSWAPEHQKAFDAIKKALLSAPALALPDVTKPFTLYVDERKGVARGVLTQTLGPWRRPVAYLSKKLDPVASGWPVCLKAIAAVAILVKDADKLTLGQNITVIAPHALENIVRQPPDRWMTNARMTHYQSLLLTERVTFAPPAALNPATLLPEETDEPVTHDCHQLLIEETGVRKDLTDIPLTGEVLTWFTDGSSYVVEGKRMAGAAVVDGTRTIWASSLPEGTSAQKAELMALTQALRLAEGKSINIYTDSRYAFATAHVHGAIYKQRGWLTSAGREIKNKEEILSLLEALHLPKRLAIIHCPGHQKAKDPISRGNQMADRVAKQAAQGVNLLAGKRTADGSEFEKRTADGSEFESPKKKAKVE

SEQ ID NO: 138 - protein, 2090 aa, synthetic construct
MPAAKRVKLDGGDKKYSIGLDIGTNSVGWAVITDEYKVPSKKFKVLGNTDRHSIKKNLIGALLFDSGETAEATRLKRTARRRYTRRKNRICYLQEIFSNEMAKVDDSFFHRLEESFLVEEDKKHERHPIFGNIVDEVAYHEKYPTIYHLRKKLVDSTDKADLRLIYLALAHMIKFRGHFLIEGDLNPDNSDVDKLFIQLVQTYNQLFEENPINASGVDAKAILSARLSKSRRLENLIAQLPGEKKNGLFGNLIALSLGLTPNFKSNFDLAEDAKLQLSKDTYDDDLDNLLAQIGDQYADLFLAAKNLSDAILLSDILRVNTEITKAPLSASMIKRYDEHHQDLTLLKALVRQQLPEKYKEIFFDQSKNGYAGYIDGGASQEEFYKFIKPILEKMDGTEELLVKLNREDLLRKQRTFDNGSIPHQIHLGELHAILRRQEDFYPFLKDNREKIEKILTFRIPYYVGPLARGNSRFAWMTRKSEETITPWNFEEVVDKGASAQSFIERMTNFDKNLPNEKVLPKHSLLYEYFTVYNELTKVKYVTEGMRKPAFLSGEQKKAIVDLLFKTNRKVTVKQLKEDYFKKIECFDSVEISGVEDRFNASLGTYHDLLKIIKDKDFLDNEENEDILEDIVLTLTLFEDREMIEERLKTYAHLFDDKVMKQLKRRRYTGWGRLSRKLINGIRDKQSGKTILDFLKSDGFANRNFMQLIHDDSLTFKEDIQKAQVSGQGDSLHEHIANLAGSPAIKKGILQTVKVVDELVKVMGRHKPENIVIEMARENQTTQKGQKNSRERMKRIEEGIKELGSQILKEHPVENTQLQNEKLYLYYLQNGRDMYVDQELDINRLSDYDVDHIVPQSFLKDDSIDNKVLTRSDKARGKSDNVPSEEVVKKMKNYWRQLLNAKLITQRKFDNLTKAERGGLSELDKAGFIKRQLVETRQITKHVAQILDSRMNTKYDENDKLIREVKVITLKSKLVSDFRKDFQFYKVREINNYHHAHDAYLNAVVGTALIKKYPKLESEFVYGDYKVYDVRKMIAKSEQEIGKATAKYFFYSNIMNFFKTEITLANGEIRKRPLIETNGETGEIVWDKGRDFATVRKVLSMPQVNIVKKTEVQTGGFSKESILPKRNSDKLIARKKDWDPKKYGGFDSPTVAYSVLVVAKVEKGKSKKLKSVKELLGITIMERSSFEKNPIDFLEAKGYKEVKKDLIIKLPKYSLFELENGRKRMLASAGELQKGNELALPSKYVNFLYLASHYEKLKGSPEDNEQKQLFVEQHKHYLDEIIEQISEFSKRVILADANLDKVLSAYNKHRDKPIREQAENIIHLFTLTNLGAPAAFKYFDTTIDRKRYTSTKEVLDATLIHQSITGLYETRIDLSQLGGDGGPAPGGSEAAAKGGTLQLDDEYRLYSPLVKPDQNIQFWLEQFPQAWAETAGMGLAKQVPPQVIQLKASATPVSVRQYPLSKEAQEGIRPHVQRLIQQGILVPVQSPWNTPLLPVRKPGTNDYRPVQDLREVNKRVQDIHPTVPNPYNLLCALPPQRSWYTVLDLKDAFFCLRLHPTSQPLFAFEWRDPGTGRTGQLTWTRLPQGFKNSPTIFNEALHRDLANFRIQHPQVTLLQYVDDLLLAGATKQDCLEGTKALLLELSDLGYRASAKKAQICRREVTYLGYSLRDGQRWLTEARKKTVVQIPAPTTAKQVREFLGTAGFCRLWIPGFATLAAPLYPLTKPKGEFSWAPEHQKAFDAIKKALLSAPALALPDVTKPFTLYVDERKGVARGVLTQTLGPWRRPVAYLSKKLDPVASGWPVCLKAIAAVAILVKDADKLTLGQNITVIAPHALENIVRQPPDRWMTNARMTHYQSLLLTERVTFAPPAALNPATLLPEETDEPVTHDCHQLLIEETGVRKDLTDIPLTGEVLTWFTDGSSYVVEGKRMAGAAVVDGTRTIWASSLPEGTSAQKAELMALTQALRLAEGKSINIYTDSRYAFATAHVHGAIYKQRGWLTSAGREIKNKEEILSLLEALHLPKRLAIIHCPGHQKAKDPISRGNQMADRVAKQAAQGVNLLAGKRTADGSEFEKRTADGSEFESPKKKAKVE

SEQ ID NO: 139 - protein, 2090 aa, synthetic construct
MPAAKRVKLDGGDKKYSIGLDIGTNSVGWAVITDEYKVPSKKFKVLGNTDRHSIKKNLIGALLFDSGETAEATRLKRTARRRYTRRKNRICYLQEIFSNEMAKVDDSFFHRLEESFLVEEDKKHERHPIFGNIVDEVAYHEKYPTIYHLRKKLVDSTDKADLRLIYLALAHMIKFRGHFLIEGDLNPDNSDVDKLFIQLVQTYNQLFEENPINASGVDAKAILSARLSKSRRLENLIAQLPGEKKNGLFGNLIALSLGLTPNFKSNFDLAEDAKLQLSKDTYDDDLDNLLAQIGDQYADLFLAAKNLSDAILLSDILRVNTEITKAPLSASMIKRYDEHHQDLTLLKALVRQQLPEKYKEIFFDQSKNGYAGYIDGGASQEEFYKFIKPILEKMDGTEELLVKLNREDLLRKQRTFDNGSIPHQIHLGELHAILRRQEDFYPFLKDNREKIEKILTFRIPYYVGPLARGNSRFAWMTRKSEETITPWNFEEVVDKGASAQSFIERMTNFDKNLPNEKVLPKHSLLYEYFTVYNELTKVKYVTEGMRKPAFLSGEQKKAIVDLLFKTNRKVTVKQLKEDYFKKIECFDSVEISGVEDRFNASLGTYHDLLKIIKDKDFLDNEENEDILEDIVLTLTLFEDREMIEERLKTYAHLFDDKVMKQLKRRRYTGWGRLSRKLINGIRDKQSGKTILDFLKSDGFANRNFMQLIHDDSLTFKEDIQKAQVSGQGDSLHEHIANLAGSPAIKKGILQTVKVVDELVKVMGRHKPENIVIEMARENQTTQKGQKNSRERMKRIEEGIKELGSQILKEHPVENTQLQNEKLYLYYLQNGRDMYVDQELDINRLSDYDVDHIVPQSFLKDDSIDNKVLTRSDKARGKSDNVPSEEVVKKMKNYWRQLLNAKLITQRKFDNLTKAERGGLSELDKAGFIKRQLVETRQITKHVAQILDSRMNTKYDENDKLIREVKVITLKSKLVSDFRKDFQFYKVREINNYHHAHDAYLNAVVGTALIKKYPKLESEFVYGDYKVYDVRKMIAKSEQEIGKATAKYFFYSNIMNFFKTEITLANGEIRKRPLIETNGETGEIVWDKGRDFATVRKVLSMPQVNIVKKTEVQTGGFSKESILPKRNSDKLIARKKDWDPKKYGGFDSPTVAYSVLVVAKVEKGKSKKLKSVKELLGITIMERSSFEKNPIDFLEAKGYKEVKKDLIIKLPKYSLFELENGRKRMLASAGELQKGNELALPSKYVNFLYLASHYEKLKGSPEDNEQKQLFVEQHKHYLDEIIEQISEFSKRVILADANLDKVLSAYNKHRDKPIREQAENIIHLFTLTNLGAPAAFKYFDTTIDRKRYTSTKEVLDATLIHQSITGLYETRIDLSQLGGDGGGGSGSSEAAAKGGTLQLDDEYRLYSPLVKPDQNIQFWLEQFPQAWAETAGMGLAKQVPPQVIQLKASATPVSVRQYPLSKEAQEGIRPHVQRLIQQGILVPVQSPWNTPLLPVRKPGTNDYRPVQDLREVNKRVQDIHPTVPNPYNLLCALPPQRSWYTVLDLKDAFFCLRLHPTSQPLFAFEWRDPGTGRTGQLTWTRLPQGFKNSPTIFNEALHRDLANFRIQHPQVTLLQYVDDLLLAGATKQDCLEGTKALLLELSDLGYRASAKKAQICRREVTYLGYSLRDGQRWLTEARKKTVVQIPAPTTAKQVREFLGTAGFCRLWIPGFATLAAPLYPLTKPKGEFSWAPEHQKAFDAIKKALLSAPALALPDVTKPFTLYVDERKGVARGVLTQTLGPWRRPVAYLSKKLDPVASGWPVCLKAIAAVAILVKDADKLTLGQNITVIAPHALENIVRQPPDRWMTNARMTHYQSLLLTERVTFAPPAALNPATLLPEETDEPVTHDCHQLLIEETGVRKDLTDIPLTGEVLTWFTDGSSYVVEGKRMAGAAVVDGTRTIWASSLPEGTSAQKAELMALTQALRLAEGKSINIYTDSRYAFATAHVHGAIYKQRGWLTSAGREIKNKEEILSLLEALHLPKRLAIIHCPGHQKAKDPISRGNQMADRVAKQAAQGVNLLAGKRTADGSEFEKRTADGSEFESPKKKAKVE

SEQ ID NO: 140 - protein, 2112 aa, synthetic construct
MPAAKRVKLDGGDKKYSIGLDIGTNSVGWAVITDEYKVPSKKFKVLGNTDRHSIKKNLIGALLFDSGETAEATRLKRTARRRYTRRKNRICYLQEIFSNEMAKVDDSFFHRLEESFLVEEDKKHERHPIFGNIVDEVAYHEKYPTIYHLRKKLVDSTDKADLRLIYLALAHMIKFRGHFLIEGDLNPDNSDVDKLFIQLVQTYNQLFEENPINASGVDAKAILSARLSKSRRLENLIAQLPGEKKNGLFGNLIALSLGLTPNFKSNFDLAEDAKLQLSKDTYDDDLDNLLAQIGDQYADLFLAAKNLSDAILLSDILRVNTEITKAPLSASMIKRYDEHHQDLTLLKALVRQQLPEKYKEIFFDQSKNGYAGYIDGGASQEEFYKFIKPILEKMDGTEELLVKLNREDLLRKQRTFDNGSIPHQIHLGELHAILRRQEDFYPFLKDNREKIEKILTFRIPYYVGPLARGNSRFAWMTRKSEETITPWNFEEVVDKGASAQSFIERMTNFDKNLPNEKVLPKHSLLYEYFTVYNELTKVKYVTEGMRKPAFLSGEQKKAIVDLLFKTNRKVTVKQLKEDYFKKIECFDSVEISGVEDRFNASLGTYHDLLKIIKDKDFLDNEENEDILEDIVLTLTLFEDREMIEERLKTYAHLFDDKVMKQLKRRRYTGWGRLSRKLINGIRDKQSGKTILDFLKSDGFANRNFMQLIHDDSLTFKEDIQKAQVSGQGDSLHEHIANLAGSPAIKKGILQTVKVVDELVKVMGRHKPENIVIEMARENQTTQKGQKNSRERMKRIEEGIKELGSQILKEHPVENTQLQNEKLYLYYLQNGRDMYVDQELDINRLSDYDVDHIVPQSFLKDDSIDNKVLTRSDKARGKSDNVPSEEVVKKMKNYWRQLLNAKLITQRKFDNLTKAERGGLSELDKAGFIKRQLVETRQITKHVAQILDSRMNTKYDENDKLIREVKVITLKSKLVSDFRKDFQFYKVREINNYHHAHDAYLNAVVGTALIKKYPKLESEFVYGDYKVYDVRKMIAKSEQEIGKATAKYFFYSNIMNFFKTEITLANGEIRKRPLIETNGETGEIVWDKGRDFATVRKVLSMPQVNIVKKTEVQTGGFSKESILPKRNSDKLIARKKDWDPKKYGGFDSPTVAYSVLVVAKVEKGKSKKLKSVKELLGITIMERSSFEKNPIDFLEAKGYKEVKKDLIIKLPKYSLFELENGRKRMLASAGELQKGNELALPSKYVNFLYLASHYEKLKGSPEDNEQKQLFVEQHKHYLDEIIEQISEFSKRVILADANLDKVLSAYNKHRDKPIREQAENIIHLFTLTNLGAPAAFKYFDTTIDRKRYTSTKEVLDATLIHQSITGLYETRIDLSQLGGDGGSGGSSGGSSGSETPGTSESATPESSGGSSGGSSGGTLQLDDEYRLYSPLVKPDQNIQFWLEQFPQAWAETAGMGLAKQVPPQVIQLKASATPVSVRQYPLSKEAQEGIRPHVQRLIQQGILVPVQSPWNTPLLPVRKPGTNDYRPVQDLREVNKRVQDIHPTVPNPYNLLCALPPQRSWYTVLDLKDAFFCLRLHPTSQPLFAFEWRDPGTGRTGQLTWTRLPQGFKNSPTIFNEALHRDLANFRIQHPQVTLLQYVDDLLLAGATKQDCLEGTKALLLELSDLGYRASAKKAQICRREVTYLGYSLRDGQRWLTEARKKTVVQIPAPTTAKQVREFLGTAGFCRLWIPGFATLAAPLYPLTKPKGEFSWAPEHQKAFDAIKKALLSAPALALPDVTKPFTLYVDERKGVARGVLTQTLGPWRRPVAYLSKKLDPVASGWPVCLKAIAAVAILVKDADKLTLGQNITVIAPHALENIVRQPPDRWMTNARMTHYQSLLLTERVTFAPPAALNPATLLPEETDEPVTHDCHQLLIEETGVRKDLTDIPLTGEVLTWFTDGSSYVVEGKRMAGAAVVDGTRTIWASSLPEGTSAQKAELMALTQALRLAEGKSINIYTDSRYAFATAHVHGAIYKQRGWLTSAGREIKNKEEILSLLEALHLPKRLAIIHCPGHQKAKDPISRGNQMADRVAKQAAQGVNLLAGKRTADGSEFEKRTADGSEFESPKKKAKVE

SEQ ID NO: 141 - protein, 2090 aa, synthetic construct
MPAAKRVKLDGGDKKYSIGLDIGTNSVGWAVITDEYKVPSKKFKVLGNTDRHSIKKNLIGALLFDSGETAEATRLKRTARRRYTRRKNRICYLQEIFSNEMAKVDDSFFHRLEESFLVEEDKKHERHPIFGNIVDEVAYHEKYPTIYHLRKKLVDSTDKADLRLIYLALAHMIKFRGHFLIEGDLNPDNSDVDKLFIQLVQTYNQLFEENPINASGVDAKAILSARLSKSRRLENLIAQLPGEKKNGLFGNLIALSLGLTPNFKSNFDLAEDAKLQLSKDTYDDDLDNLLAQIGDQYADLFLAAKNLSDAILLSDILRVNTEITKAPLSASMIKRYDEHHQDLTLLKALVRQQLPEKYKEIFFDQSKNGYAGYIDGGASQEEFYKFIKPILEKMDGTEELLVKLNREDLLRKQRTFDNGSIPHQIHLGELHAILRRQEDFYPFLKDNREKIEKILTFRIPYYVGPLARGNSRFAWMTRKSEETITPWNFEEVVDKGASAQSFIERMTNFDKNLPNEKVLPKHSLLYEYFTVYNELTKVKYVTEGMRKPAFLSGEQKKAIVDLLFKTNRKVTVKQLKEDYFKKIECFDSVEISGVEDRFNASLGTYHDLLKIIKDKDFLDNEENEDILEDIVLTLTLFEDREMIEERLKTYAHLFDDKVMKQLKRRRYTGWGRLSRKLINGIRDKQSGKTILDFLKSDGFANRNFMQLIHDDSLTFKEDIQKAQVSGQGDSLHEHIANLAGSPAIKKGILQTVKVVDELVKVMGRHKPENIVIEMARENQTTQKGQKNSRERMKRIEEGIKELGSQILKEHPVENTQLQNEKLYLYYLQNGRDMYVDQELDINRLSDYDVDHIVPQSFLKDDSIDNKVLTRSDKARGKSDNVPSEEVVKKMKNYWRQLLNAKLITQRKFDNLTKAERGGLSELDKAGFIKRQLVETRQITKHVAQILDSRMNTKYDENDKLIREVKVITLKSKLVSDFRKDFQFYKVREINNYHHAHDAYLNAVVGTALIKKYPKLESEFVYGDYKVYDVRKMIAKSEQEIGKATAKYFFYSNIMNFFKTEITLANGEIRKRPLIETNGETGEIVWDKGRDFATVRKVLSMPQVNIVKKTEVQTGGFSKESILPKRNSDKLIARKKDWDPKKYGGFDSPTVAYSVLVVAKVEKGKSKKLKSVKELLGITIMERSSFEKNPIDFLEAKGYKEVKKDLIIKLPKYSLFELENGRKRMLASAGELQKGNELALPSKYVNFLYLASHYEKLKGSPEDNEQKQLFVEQHKHYLDEIIEQISEFSKRVILADANLDKVLSAYNKHRDKPIREQAENIIHLFTLTNLGAPAAFKYFDTTIDRKRYTSTKEVLDATLIHQSITGLYETRIDLSQLGGDGGEAAAKGGSPAPGGTLQLDDEYRLYSPLVKPDQNIQFWLEQFPQAWAETAGMGLAKQVPPQVIQLKASATPVSVRQYPLSKEAQEGIRPHVQRLIQQGILVPVQSPWNTPLLPVRKPGTNDYRPVQDLREVNKRVQDIHPTVPNPYNLLCALPPQRSWYTVLDLKDAFFCLRLHPTSQPLFAFEWRDPGTGRTGQLTWTRLPQGFKNSPTIFNEALHRDLANFRIQHPQVTLLQYVDDLLLAGATKQDCLEGTKALLLELSDLGYRASAKKAQICRREVTYLGYSLRDGQRWLTEARKKTVVQIPAPTTAKQVREFLGTAGFCRLWIPGFATLAAPLYPLTKPKGEFSWAPEHQKAFDAIKKALLSAPALALPDVTKPFTLYVDERKGVARGVLTQTLGPWRRPVAYLSKKLDPVASGWPVCLKAIAAVAILVKDADKLTLGQNITVIAPHALENIVRQPPDRWMTNARMTHYQSLLLTERVTFAPPAALNPATLLPEETDEPVTHDCHQLLIEETGVRKDLTDIPLTGEVLTWFTDGSSYVVEGKRMAGAAVVDGTRTIWASSLPEGTSAQKAELMALTQALRLAEGKSINIYTDSRYAFATAHVHGAIYKQRGWLTSAGREIKNKEEILSLLEALHLPKRLAIIHCPGHQKAKDPISRGNQMADRVAKQAAQGVNLLAGKRTADGSEFEKRTADGSEFESPKKKAKVE

SEQ ID NO: 142 - protein, 2097 aa, synthetic construct
MPAAKRVKLDGGDKKYSIGLDIGTNSVGWAVITDEYKVPSKKFKVLGNTDRHSIKKNLIGALLFDSGETAEATRLKRTARRRYTRRKNRICYLQEIFSNEMAKVDDSFFHRLEESFLVEEDKKHERHPIFGNIVDEVAYHEKYPTIYHLRKKLVDSTDKADLRLIYLALAHMIKFRGHFLIEGDLNPDNSDVDKLFIQLVQTYNQLFEENPINASGVDAKAILSARLSKSRRLENLIAQLPGEKKNGLFGNLIALSLGLTPNFKSNFDLAEDAKLQLSKDTYDDDLDNLLAQIGDQYADLFLAAKNLSDAILLSDILRVNTEITKAPLSASMIKRYDEHHQDLTLLKALVRQQLPEKYKEIFFDQSKNGYAGYIDGGASQEEFYKFIKPILEKMDGTEELLVKLNREDLLRKQRTFDNGSIPHQIHLGELHAILRRQEDFYPFLKDNREKIEKILTFRIPYYVGPLARGNSRFAWMTRKSEETITPWNFEEVVDKGASAQSFIERMTNFDKNLPNEKVLPKHSLLYEYFTVYNELTKVKYVTEGMRKPAFLSGEQKKAIVDLLFKTNRKVTVKQLKEDYFKKIECFDSVEISGVEDRFNASLGTYHDLLKIIKDKDFLDNEENEDILEDIVLTLTLFEDREMIEERLKTYAHLFDDKVMKQLKRRRYTGWGRLSRKLINGIRDKQSGKTILDFLKSDGFANRNFMQLIHDDSLTFKEDIQKAQVSGQGDSLHEHIANLAGSPAIKKGILQTVKVVDELVKVMGRHKPENIVIEMARENQTTQKGQKNSRERMKRIEEGIKELGSQILKEHPVENTQLQNEKLYLYYLQNGRDMYVDQELDINRLSDYDVDHIVPQSFLKDDSIDNKVLTRSDKARGKSDNVPSEEVVKKMKNYWRQLLNAKLITQRKFDNLTKAERGGLSELDKAGFIKRQLVETRQITKHVAQILDSRMNTKYDENDKLIREVKVITLKSKLVSDFRKDFQFYKVREINNYHHAHDAYLNAVVGTALIKKYPKLESEFVYGDYKVYDVRKMIAKSEQEIGKATAKYFFYSNIMNFFKTEITLANGEIRKRPLIETNGETGEIVWDKGRDFATVRKVLSMPQVNIVKKTEVQTGGFSKESILPKRNSDKLIARKKDWDPKKYGGFDSPTVAYSVLVVAKVEKGKSKKLKSVKELLGITIMERSSFEKNPIDFLEAKGYKEVKKDLIIKLPKYSLFELENGRKRMLASAGELQKGNELALPSKYVNFLYLASHYEKLKGSPEDNEQKQLFVEQHKHYLDEIIEQISEFSKRVILADANLDKVLSAYNKHRDKPIREQAENIIHLFTLTNLGAPAAFKYFDTTIDRKRYTSTKEVLDATLIHQSITGLYETRIDLSQLGGDGGGGSGGSGGSGGSGGSGGSGGTLQLDDEYRLYSPLVKPDQNIQFWLEQFPQAWAETAGMGLAKQVPPQVIQLKASATPVSVRQYPLSKEAQEGIRPHVQRLIQQGILVPVQSPWNTPLLPVRKPGTNDYRPVQDLREVNKRVQDIHPTVPNPYNLLCALPPQRSWYTVLDLKDAFFCLRLHPTSQPLFAFEWRDPGTGRTGQLTWTRLPQGFKNSPTIFNEALHRDLANFRIQHPQVTLLQYVDDLLLAGATKQDCLEGTKALLLELSDLGYRASAKKAQICRREVTYLGYSLRDGQRWLTEARKKTVVQIPAPTTAKQVREFLGTAGFCRLWIPGFATLAAPLYPLTKPKGEFSWAPEHQKAFDAIKKALLSAPALALPDVTKPFTLYVDERKGVARGVLTQTLGPWRRPVAYLSKKLDPVASGWPVCLKAIAAVAILVKDADKLTLGQNITVIAPHALENIVRQPPDRWMTNARMTHYQSLLLTERVTFAPPAALNPATLLPEETDEPVTHDCHQLLIEETGVRKDLTDIPLTGEVLTWFTDGSSYVVEGKRMAGAAVVDGTRTIWASSLPEGTSAQKAELMALTQALRLAEGKSINIYTDSRYAFATAHVHGAIYKQRGWLTSAGREIKNKEEILSLLEALHLPKRLAIIHCPGHQKAKDPISRGNQMADRVAKQAAQGVNLLAGKRTADGSEFEKRTADGSEFESPKKKAKVE

SEQ ID NO: 143 - protein, 2085 aa, synthetic construct
MPAAKRVKLDGGDKKYSIGLDIGTNSVGWAVITDEYKVPSKKFKVLGNTDRHSIKKNLIGALLFDSGETAEATRLKRTARRRYTRRKNRICYLQEIFSNEMAKVDDSFFHRLEESFLVEEDKKHERHPIFGNIVDEVAYHEKYPTIYHLRKKLVDSTDKADLRLIYLALAHMIKFRGHFLIEGDLNPDNSDVDKLFIQLVQTYNQLFEENPINASGVDAKAILSARLSKSRRLENLIAQLPGEKKNGLFGNLIALSLGLTPNFKSNFDLAEDAKLQLSKDTYDDDLDNLLAQIGDQYADLFLAAKNLSDAILLSDILRVNTEITKAPLSASMIKRYDEHHQDLTLLKALVRQQLPEKYKEIFFDQSKNGYAGYIDGGASQEEFYKFIKPILEKMDGTEELLVKLNREDLLRKQRTFDNGSIPHQIHLGELHAILRRQEDFYPFLKDNREKIEKILTFRIPYYVGPLARGNSRFAWMTRKSEETITPWNFEEVVDKGASAQSFIERMTNFDKNLPNEKVLPKHSLLYEYFTVYNELTKVKYVTEGMRKPAFLSGEQKKAIVDLLFKTNRKVTVKQLKEDYFKKIECFDSVEISGVEDRFNASLGTYHDLLKIIKDKDFLDNEENEDILEDIVLTLTLFEDREMIEERLKTYAHLFDDKVMKQLKRRRYTGWGRLSRKLINGIRDKQSGKTILDFLKSDGFANRNFMQLIHDDSLTFKEDIQKAQVSGQGDSLHEHIANLAGSPAIKKGILQTVKVVDELVKVMGRHKPENIVIEMARENQTTQKGQKNSRERMKRIEEGIKELGSQILKEHPVENTQLQNEKLYLYYLQNGRDMYVDQELDINRLSDYDVDHIVPQSFLKDDSIDNKVLTRSDKARGKSDNVPSEEVVKKMKNYWRQLLNAKLITQRKFDNLTKAERGGLSELDKAGFIKRQLVETRQITKHVAQILDSRMNTKYDENDKLIREVKVITLKSKLVSDFRKDFQFYKVREINNYHHAHDAYLNAVVGTALIKKYPKLESEFVYGDYKVYDVRKMIAKSEQEIGKATAKYFFYSNIMNFFKTEITLANGEIRKRPLIETNGETGEIVWDKGRDFATVRKVLSMPQVNIVKKTEVQTGGFSKESILPKRNSDKLIARKKDWDPKKYGGFDSPTVAYSVLVVAKVEKGKSKKLKSVKELLGITIMERSSFEKNPIDFLEAKGYKEVKKDLIIKLPKYSLFELENGRKRMLASAGELQKGNELALPSKYVNFLYLASHYEKLKGSPEDNEQKQLFVEQHKHYLDEIIEQISEFSKRVILADANLDKVLSAYNKHRDKPIREQAENIIHLFTLTNLGAPAAFKYFDTTIDRKRYTSTKEVLDATLIHQSITGLYETRIDLSQLGGDGGGGGPAPGGTLQLDDEYRLYSPLVKPDQNIQFWLEQFPQAWAETAGMGLAKQVPPQVIQLKASATPVSVRQYPLSKEAQEGIRPHVQRLIQQGILVPVQSPWNTPLLPVRKPGTNDYRPVQDLREVNKRVQDIHPTVPNPYNLLCALPPQRSWYTVLDLKDAFFCLRLHPTSQPLFAFEWRDPGTGRTGQLTWTRLPQGFKNSPTIFNEALHRDLANFRIQHPQVTLLQYVDDLLLAGATKQDCLEGTKALLLELSDLGYRASAKKAQICRREVTYLGYSLRDGQRWLTEARKKTVVQIPAPTTAKQVREFLGTAGFCRLWIPGFATLAAPLYPLTKPKGEFSWAPEHQKAFDAIKKALLSAPALALPDVTKPFTLYVDERKGVARGVLTQTLGPWRRPVAYLSKKLDPVASGWPVCLKAIAAVAILVKDADKLTLGQNITVIAPHALENIVRQPPDRWMTNARMTHYQSLLLTERVTFAPPAALNPATLLPEETDEPVTHDCHQLLIEETGVRKDLTDIPLTGEVLTWFTDGSSYVVEGKRMAGAAVVDGTRTIWASSLPEGTSAQKAELMALTQALRLAEGKSINIYTDSRYAFATAHVHGAIYKQRGWLTSAGREIKNKEEILSLLEALHLPKRLAIIHCPGHQKAKDPISRGNQMADRVAKQAAQGVNLLAGKRTADGSEFEKRTADGSEFESPKKKAKVE

SEQ ID NO: 144 - protein, 2088 aa, synthetic construct
MPAAKRVKLDGGDKKYSIGLDIGTNSVGWAVITDEYKVPSKKFKVLGNTDRHSIKKNLIGALLFDSGETAEATRLKRTARRRYTRRKNRICYLQEIFSNEMAKVDDSFFHRLEESFLVEEDKKHERHPIFGNIVDEVAYHEKYPTIYHLRKKLVDSTDKADLRLIYLALAHMIKFRGHFLIEGDLNPDNSDVDKLFIQLVQTYNQLFEENPINASGVDAKAILSARLSKSRRLENLIAQLPGEKKNGLFGNLIALSLGLTPNFKSNFDLAEDAKLQLSKDTYDDDLDNLLAQIGDQYADLFLAAKNLSDAILLSDILRVNTEITKAPLSASMIKRYDEHHQDLTLLKALVRQQLPEKYKEIFFDQSKNGYAGYIDGGASQEEFYKFIKPILEKMDGTEELLVKLNREDLLRKQRTFDNGSIPHQIHLGELHAILRRQEDFYPFLKDNREKIEKILTFRIPYYVGPLARGNSRFAWMTRKSEETITPWNFEEVVDKGASAQSFIERMTNFDKNLPNEKVLPKHSLLYEYFTVYNELTKVKYVTEGMRKPAFLSGEQKKAIVDLLFKTNRKVTVKQLKEDYFKKIECFDSVEISGVEDRFNASLGTYHDLLKIIKDKDFLDNEENEDILEDIVLTLTLFEDREMIEERLKTYAHLFDDKVMKQLKRRRYTGWGRLSRKLINGIRDKQSGKTILDFLKSDGFANRNFMQLIHDDSLTFKEDIQKAQVSGQGDSLHEHIANLAGSPAIKKGILQTVKVVDELVKVMGRHKPENIVIEMARENQTTQKGQKNSRERMKRIEEGIKELGSQILKEHPVENTQLQNEKLYLYYLQNGRDMYVDQELDINRLSDYDVDHIVPQSFLKDDSIDNKVLTRSDKARGKSDNVPSEEVVKKMKNYWRQLLNAKLITQRKFDNLTKAERGGLSELDKAGFIKRQLVETRQITKHVAQILDSRMNTKYDENDKLIREVKVITLKSKLVSDFRKDFQFYKVREINNYHHAHDAYLNAVVGTALIKKYPKLESEFVYGDYKVYDVRKMIAKSEQEIGKATAKYFFYSNIMNFFKTEITLANGEIRKRPLIETNGETGEIVWDKGRDFATVRKVLSMPQVNIVKKTEVQTGGFSKESILPKRNSDKLIARKKDWDPKKYGGFDSPTVAYSVLVVAKVEKGKSKKLKSVKELLGITIMERSSFEKNPIDFLEAKGYKEVKKDLIIKLPKYSLFELENGRKRMLASAGELQKGNELALPSKYVNFLYLASHYEKLKGSPEDNEQKQLFVEQHKHYLDEIIEQISEFSKRVILADANLDKVLSAYNKHRDKPIREQAENIIHLFTLTNLGAPAAFKYFDTTIDRKRYTSTKEVLDATLIHQSITGLYETRIDLSQLGGDGGGGSGSSGGGGGTLQLDDEYRLYSPLVKPDQNIQFWLEQFPQAWAETAGMGLAKQVPPQVIQLKASATPVSVRQYPLSKEAQEGIRPHVQRLIQQGILVPVQSPWNTPLLPVRKPGTNDYRPVQDLREVNKRVQDIHPTVPNPYNLLCALPPQRSWYTVLDLKDAFFCLRLHPTSQPLFAFEWRDPGTGRTGQLTWTRLPQGFKNSPTIFNEALHRDLANFRIQHPQVTLLQYVDDLLLAGATKQDCLEGTKALLLELSDLGYRASAKKAQICRREVTYLGYSLRDGQRWLTEARKKTVVQIPAPTTAKQVREFLGTAGFCRLWIPGFATLAAPLYPLTKPKGEFSWAPEHQKAFDAIKKALLSAPALALPDVTKPFTLYVDERKGVARGVLTQTLGPWRRPVAYLSKKLDPVASGWPVCLKAIAAVAILVKDADKLTLGQNITVIAPHALENIVRQPPDRWMTNARMTHYQSLLLTERVTFAPPAALNPATLLPEETDEPVTHDCHQLLIEETGVRKDLTDIPLTGEVLTWFTDGSSYVVEGKRMAGAAVVDGTRTIWASSLPEGTSAQKAELMALTQALRLAEGKSINIYTDSRYAFATAHVHGAIYKQRGWLTSAGREIKNKEEILSLLEALHLPKRLAIIHCPGHQKAKDPISRGNQMADRVAKQAAQGVNLLAGKRTADGSEFEKRTADGSEFESPKKKAKVE

SEQ ID NO: 145 - protein, 2091 aa, synthetic construct
MPAAKRVKLDGGDKKYSIGLDIGTNSVGWAVITDEYKVPSKKFKVLGNTDRHSIKKNLIGALLFDSGETAEATRLKRTARRRYTRRKNRICYLQEIFSNEMAKVDDSFFHRLEESFLVEEDKKHERHPIFGNIVDEVAYHEKYPTIYHLRKKLVDSTDKADLRLIYLALAHMIKFRGHFLIEGDLNPDNSDVDKLFIQLVQTYNQLFEENPINASGVDAKAILSARLSKSRRLENLIAQLPGEKKNGLFGNLIALSLGLTPNFKSNFDLAEDAKLQLSKDTYDDDLDNLLAQIGDQYADLFLAAKNLSDAILLSDILRVNTEITKAPLSASMIKRYDEHHQDLTLLKALVRQQLPEKYKEIFFDQSKNGYAGYIDGGASQEEFYKFIKPILEKMDGTEELLVKLNREDLLRKQRTFDNGSIPHQIHLGELHAILRRQEDFYPFLKDNREKIEKILTFRIPYYVGPLARGNSRFAWMTRKSEETITPWNFEEVVDKGASAQSFIERMTNFDKNLPNEKVLPKHSLLYEYFTVYNELTKVKYVTEGMRKPAFLSGEQKKAIVDLLFKTNRKVTVKQLKEDYFKKIECFDSVEISGVEDRFNASLGTYHDLLKIIKDKDFLDNEENEDILEDIVLTLTLFEDREMIEERLKTYAHLFDDKVMKQLKRRRYTGWGRLSRKLINGIRDKQSGKTILDFLKSDGFANRNFMQLIHDDSLTFKEDIQKAQVSGQGDSLHEHIANLAGSPAIKKGILQTVKVVDELVKVMGRHKPENIVIEMARENQTTQKGQKNSRERMKRIEEGIKELGSQILKEHPVENTQLQNEKLYLYYLQNGRDMYVDQELDINRLSDYDVDHIVPQSFLKDDSIDNKVLTRSDKARGKSDNVPSEEVVKKMKNYWRQLLNAKLITQRKFDNLTKAERGGLSELDKAGFIKRQLVETRQITKHVAQILDSRMNTKYDENDKLIREVKVITLKSKLVSDFRKDFQFYKVREINNYHHAHDAYLNAVVGTALIKKYPKLESEFVYGDYKVYDVRKMIAKSEQEIGKATAKYFFYSNIMNFFKTEITLANGEIRKRPLIETNGETGEIVWDKGRDFATVRKVLSMPQVNIVKKTEVQTGGFSKESILPKRNSDKLIARKKDWDPKKYGGFDSPTVAYSVLVVAKVEKGKSKKLKSVKELLGITIMERSSFEKNPIDFLEAKGYKEVKKDLIIKLPKYSLFELENGRKRMLASAGELQKGNELALPSKYVNFLYLASHYEKLKGSPEDNEQKQLFVEQHKHYLDEIIEQISEFSKRVILADANLDKVLSAYNKHRDKPIREQAENIIHLFTLTNLGAPAAFKYFDTTIDRKRYTSTKEVLDATLIHQSITGLYETRIDLSQLGGDGGGGSGGSGGSGGSGGTLQLDDEYRLYSPLVKPDQNIQFWLEQFPQAWAETAGMGLAKQVPPQVIQLKASATPVSVRQYPLSKEAQEGIRPHVQRLIQQGILVPVQSPWNTPLLPVRKPGTNDYRPVQDLREVNKRVQDIHPTVPNPYNLLCALPPQRSWYTVLDLKDAFFCLRLHPTSQPLFAFEWRDPGTGRTGQLTWTRLPQGFKNSPTIFNEALHRDLANFRIQHPQVTLLQYVDDLLLAGATKQDCLEGTKALLLELSDLGYRASAKKAQICRREVTYLGYSLRDGQRWLTEARKKTVVQIPAPTTAKQVREFLGTAGFCRLWIPGFATLAAPLYPLTKPKGEFSWAPEHQKAFDAIKKALLSAPALALPDVTKPFTLYVDERKGVARGVLTQTLGPWRRPVAYLSKKLDPVASGWPVCLKAIAAVAILVKDADKLTLGQNITVIAPHALENIVRQPPDRWMTNARMTHYQSLLLTERVTFAPPAALNPATLLPEETDEPVTHDCHQLLIEETGVRKDLTDIPLTGEVLTWFTDGSSYVVEGKRMAGAAVVDGTRTIWASSLPEGTSAQKAELMALTQALRLAEGKSINIYTDSRYAFATAHVHGAIYKQRGWLTSAGREIKNKEEILSLLEALHLPKRLAIIHCPGHQKAKDPISRGNQMADRVAKQAAQGVNLLAGKRTADGSEFEKRTADGSEFESPKKKAKVE

SEQ ID NO: 146 - protein, 2090 aa, synthetic construct
MPAAKRVKLDGGDKKYSIGLDIGTNSVGWAVITDEYKVPSKKFKVLGNTDRHSIKKNLIGALLFDSGETAEATRLKRTARRRYTRRKNRICYLQEIFSNEMAKVDDSFFHRLEESFLVEEDKKHERHPIFGNIVDEVAYHEKYPTIYHLRKKLVDSTDKADLRLIYLALAHMIKFRGHFLIEGDLNPDNSDVDKLFIQLVQTYNQLFEENPINASGVDAKAILSARLSKSRRLENLIAQLPGEKKNGLFGNLIALSLGLTPNFKSNFDLAEDAKLQLSKDTYDDDLDNLLAQIGDQYADLFLAAKNLSDAILLSDILRVNTEITKAPLSASMIKRYDEHHQDLTLLKALVRQQLPEKYKEIFFDQSKNGYAGYIDGGASQEEFYKFIKPILEKMDGTEELLVKLNREDLLRKQRTFDNGSIPHQIHLGELHAILRRQEDFYPFLKDNREKIEKILTFRIPYYVGPLARGNSRFAWMTRKSEETITPWNFEEVVDKGASAQSFIERMTNFDKNLPNEKVLPKHSLLYEYFTVYNELTKVKYVTEGMRKPAFLSGEQKKAIVDLLFKTNRKVTVKQLKEDYFKKIECFDSVEISGVEDRFNASLGTYHDLLKIIKDKDFLDNEENEDILEDIVLTLTLFEDREMIEERLKTYAHLFDDKVMKQLKRRRYTGWGRLSRKLINGIRDKQSGKTILDFLKSDGFANRNFMQLIHDDSLTFKEDIQKAQVSGQGDSLHEHIANLAGSPAIKKGILQTVKVVDELVKVMGRHKPENIVIEMARENQTTQKGQKNSRERMKRIEEGIKELGSQILKEHPVENTQLQNEKLYLYYLQNGRDMYVDQELDINRLSDYDVDHIVPQSFLKDDSIDNKVLTRSDKARGKSDNVPSEEVVKKMKNYWRQLLNAKLITQRKFDNLTKAERGGLSELDKAGFIKRQLVETRQITKHVAQILDSRMNTKYDENDKLIREVKVITLKSKLVSDFRKDFQFYKVREINNYHHAHDAYLNAVVGTALIKKYPKLESEFVYGDYKVYDVRKMIAKSEQEIGKATAKYFFYSNIMNFFKTEITLANGEIRKRPLIETNGETGEIVWDKGRDFATVRKVLSMPQVNIVKKTEVQTGGFSKESILPKRNSDKLIARKKDWDPKKYGGFDSPTVAYSVLVVAKVEKGKSKKLKSVKELLGITIMERSSFEKNPIDFLEAKGYKEVKKDLIIKLPKYSLFELENGRKRMLASAGELQKGNELALPSKYVNFLYLASHYEKLKGSPEDNEQKQLFVEQHKHYLDEIIEQISEFSKRVILADANLDKVLSAYNKHRDKPIREQAENIIHLFTLTNLGAPAAFKYFDTTIDRKRYTSTKEVLDATLIHQSITGLYETRIDLSQLGGDGGEAAAKGGGGSSGGTLQLDDEYRLYSPLVKPDQNIQFWLEQFPQAWAETAGMGLAKQVPPQVIQLKASATPVSVRQYPLSKEAQEGIRPHVQRLIQQGILVPVQSPWNTPLLPVRKPGTNDYRPVQDLREVNKRVQDIHPTVPNPYNLLCALPPQRSWYTVLDLKDAFFCLRLHPTSQPLFAFEWRDPGTGRTGQLTWTRLPQGFKNSPTIFNEALHRDLANFRIQHPQVTLLQYVDDLLLAGATKQDCLEGTKALLLELSDLGYRASAKKAQICRREVTYLGYSLRDGQRWLTEARKKTVVQIPAPTTAKQVREFLGTAGFCRLWIPGFATLAAPLYPLTKPKGEFSWAPEHQKAFDAIKKALLSAPALALPDVTKPFTLYVDERKGVARGVLTQTLGPWRRPVAYLSKKLDPVASGWPVCLKAIAAVAILVKDADKLTLGQNITVIAPHALENIVRQPPDRWMTNARMTHYQSLLLTERVTFAPPAALNPATLLPEETDEPVTHDCHQLLIEETGVRKDLTDIPLTGEVLTWFTDGSSYVVEGKRMAGAAVVDGTRTIWASSLPEGTSAQKAELMALTQALRLAEGKSINIYTDSRYAFATAHVHGAIYKQRGWLTSAGREIKNKEEILSLLEALHLPKRLAIIHCPGHQKAKDPISRGNQMADRVAKQAAQGVNLLAGKRTADGSEFEKRTADGSEFESPKKKAKVE

SEQ ID NO: 147 - protein, 2084 aa, synthetic construct
MPAAKRVKLDGGDKKYSIGLDIGTNSVGWAVITDEYKVPSKKFKVLGNTDRHSIKKNLIGALLFDSGETAEATRLKRTARRRYTRRKNRICYLQEIFSNEMAKVDDSFFHRLEESFLVEEDKKHERHPIFGNIVDEVAYHEKYPTIYHLRKKLVDSTDKADLRLIYLALAHMIKFRGHFLIEGDLNPDNSDVDKLFIQLVQTYNQLFEENPINASGVDAKAILSARLSKSRRLENLIAQLPGEKKNGLFGNLIALSLGLTPNFKSNFDLAEDAKLQLSKDTYDDDLDNLLAQIGDQYADLFLAAKNLSDAILLSDILRVNTEITKAPLSASMIKRYDEHHQDLTLLKALVRQQLPEKYKEIFFDQSKNGYAGYIDGGASQEEFYKFIKPILEKMDGTEELLVKLNREDLLRKQRTFDNGSIPHQIHLGELHAILRRQEDFYPFLKDNREKIEKILTFRIPYYVGPLARGNSRFAWMTRKSEETITPWNFEEVVDKGASAQSFIERMTNFDKNLPNEKVLPKHSLLYEYFTVYNELTKVKYVTEGMRKPAFLSGEQKKAIVDLLFKTNRKVTVKQLKEDYFKKIECFDSVEISGVEDRFNASLGTYHDLLKIIKDKDFLDNEENEDILEDIVLTLTLFEDREMIEERLKTYAHLFDDKVMKQLKRRRYTGWGRLSRKLINGIRDKQSGKTILDFLKSDGFANRNFMQLIHDDSLTFKEDIQKAQVSGQGDSLHEHIANLAGSPAIKKGILQTVKVVDELVKVMGRHKPENIVIEMARENQTTQKGQKNSRERMKRIEEGIKELGSQILKEHPVENTQLQNEKLYLYYLQNGRDMYVDQELDINRLSDYDVDHIVPQSFLKDDSIDNKVLTRSDKARGKSDNVPSEEVVKKMKNYWRQLLNAKLITQRKFDNLTKAERGGLSELDKAGFIKRQLVETRQITKHVAQILDSRMNTKYDENDKLIREVKVITLKSKLVSDFRKDFQFYKVREINNYHHAHDAYLNAVVGTALIKKYPKLESEFVYGDYKVYDVRKMIAKSEQEIGKATAKYFFYSNIMNFFKTEITLANGEIRKRPLIETNGETGEIVWDKGRDFATVRKVLSMPQVNIVKKTEVQTGGFSKESILPKRNSDKLIARKKDWDPKKYGGFDSPTVAYSVLVVAKVEKGKSKKLKSVKELLGITIMERSSFEKNPIDFLEAKGYKEVKKDLIIKLPKYSLFELENGRKRMLASAGELQKGNELALPSKYVNFLYLASHYEKLKGSPEDNEQKQLFVEQHKHYLDEIIEQISEFSKRVILADANLDKVLSAYNKHRDKPIREQAENIIHLFTLTNLGAPAAFKYFDTTIDRKRYTSTKEVLDATLIHQSITGLYETRIDLSQLGGDGGGGGGSGGTLQLDDEYRLYSPLVKPDQNIQFWLEQFPQAWAETAGMGLAKQVPPQVIQLKASATPVSVRQYPLSKEAQEGIRPHVQRLIQQGILVPVQSPWNTPLLPVRKPGTNDYRPVQDLREVNKRVQDIHPTVPNPYNLLCALPPQRSWYTVLDLKDAFFCLRLHPTSQPLFAFEWRDPGTGRTGQLTWTRLPQGFKNSPTIFNEALHRDLANFRIQHPQVTLLQYVDDLLLAGATKQDCLEGTKALLLELSDLGYRASAKKAQICRREVTYLGYSLRDGQRWLTEARKKTVVQIPAPTTAKQVREFLGTAGFCRLWIPGFATLAAPLYPLTKPKGEFSWAPEHQKAFDAIKKALLSAPALALPDVTKPFTLYVDERKGVARGVLTQTLGPWRRPVAYLSKKLDPVASGWPVCLKAIAAVAILVKDADKLTLGQNITVIAPHALENIVRQPPDRWMTNARMTHYQSLLLTERVTFAPPAALNPATLLPEETDEPVTHDCHQLLIEETGVRKDLTDIPLTGEVLTWFTDGSSYVVEGKRMAGAAVVDGTRTIWASSLPEGTSAQKAELMALTQALRLAEGKSINIYTDSRYAFATAHVHGAIYKQRGWLTSAGREIKNKEEILSLLEALHLPKRLAIIHCPGHQKAKDPISRGNQMADRVAKQAAQGVNLLAGKRTADGSEFEKRTADGSEFESPKKKAKVE

SEQ ID NO: 148 - protein, 2085 aa, synthetic construct
MPAAKRVKLDGGDKKYSIGLDIGTNSVGWAVITDEYKVPSKKFKVLGNTDRHSIKKNLIGALLFDSGETAEATRLKRTARRRYTRRKNRICYLQEIFSNEMAKVDDSFFHRLEESFLVEEDKKHERHPIFGNIVDEVAYHEKYPTIYHLRKKLVDSTDKADLRLIYLALAHMIKFRGHFLIEGDLNPDNSDVDKLFIQLVQTYNQLFEENPINASGVDAKAILSARLSKSRRLENLIAQLPGEKKNGLFGNLIALSLGLTPNFKSNFDLAEDAKLQLSKDTYDDDLDNLLAQIGDQYADLFLAAKNLSDAILLSDILRVNTEITKAPLSASMIKRYDEHHQDLTLLKALVRQQLPEKYKEIFFDQSKNGYAGYIDGGASQEEFYKFIKPILEKMDGTEELLVKLNREDLLRKQRTFDNGSIPHQIHLGELHAILRRQEDFYPFLKDNREKIEKILTFRIPYYVGPLARGNSRFAWMTRKSEETITPWNFEEVVDKGASAQSFIERMTNFDKNLPNEKVLPKHSLLYEYFTVYNELTKVKYVTEGMRKPAFLSGEQKKAIVDLLFKTNRKVTVKQLKEDYFKKIECFDSVEISGVEDRFNASLGTYHDLLKIIKDKDFLDNEENEDILEDIVLTLTLFEDREMIEERLKTYAHLFDDKVMKQLKRRRYTGWGRLSRKLINGIRDKQSGKTILDFLKSDGFANRNFMQLIHDDSLTFKEDIQKAQVSGQGDSLHEHIANLAGSPAIKKGILQTVKVVDELVKVMGRHKPENIVIEMARENQTTQKGQKNSRERMKRIEEGIKELGSQILKEHPVENTQLQNEKLYLYYLQNGRDMYVDQELDINRLSDYDVDHIVPQSFLKDDSIDNKVLTRSDKARGKSDNVPSEEVVKKMKNYWRQLLNAKLITQRKFDNLTKAERGGLSELDKAGFIKRQLVETRQITKHVAQILDSRMNTKYDENDKLIREVKVITLKSKLVSDFRKDFQFYKVREINNYHHAHDAYLNAVVGTALIKKYPKLESEFVYGDYKVYDVRKMIAKSEQEIGKATAKYFFYSNIMNFFKTEITLANGEIRKRPLIETNGETGEIVWDKGRDFATVRKVLSMPQVNIVKKTEVQTGGFSKESILPKRNSDKLIARKKDWDPKKYGGFDSPTVAYSVLVVAKVEKGKSKKLKSVKELLGITIMERSSFEKNPIDFLEAKGYKEVKKDLIIKLPKYSLFELENGRKRMLASAGELQKGNELALPSKYVNFLYLASHYEKLKGSPEDNEQKQLFVEQHKHYLDEIIEQISEFSKRVILADANLDKVLSAYNKHRDKPIREQAENIIHLFTLTNLGAPAAFKYFDTTIDRKRYTSTKEVLDATLIHQSITGLYETRIDLSQLGGDGGGSSPAPGGTLQLDDEYRLYSPLVKPDQNIQFWLEQFPQAWAETAGMGLAKQVPPQVIQLKASATPVSVRQYPLSKEAQEGIRPHVQRLIQQGILVPVQSPWNTPLLPVRKPGTNDYRPVQDLREVNKRVQDIHPTVPNPYNLLCALPPQRSWYTVLDLKDAFFCLRLHPTSQPLFAFEWRDPGTGRTGQLTWTRLPQGFKNSPTIFNEALHRDLANFRIQHPQVTLLQYVDDLLLAGATKQDCLEGTKALLLELSDLGYRASAKKAQICRREVTYLGYSLRDGQRWLTEARKKTVVQIPAPTTAKQVREFLGTAGFCRLWIPGFATLAAPLYPLTKPKGEFSWAPEHQKAFDAIKKALLSAPALALPDVTKPFTLYVDERKGVARGVLTQTLGPWRRPVAYLSKKLDPVASGWPVCLKAIAAVAILVKDADKLTLGQNITVIAPHALENIVRQPPDRWMTNARMTHYQSLLLTERVTFAPPAALNPATLLPEETDEPVTHDCHQLLIEETGVRKDLTDIPLTGEVLTWFTDGSSYVVEGKRMAGAAVVDGTRTIWASSLPEGTSAQKAELMALTQALRLAEGKSINIYTDSRYAFATAHVHGAIYKQRGWLTSAGREIKNKEEILSLLEALHLPKRLAIIHCPGHQKAKDPISRGNQMADRVAKQAAQGVNLLAGKRTADGSEFEKRTADGSEFESPKKKAKVE

SEQ ID NO: 149 - protein, 2083 aa, synthetic construct
MPAAKRVKLDGGDKKYSIGLDIGTNSVGWAVITDEYKVPSKKFKVLGNTDRHSIKKNLIGALLFDSGETAEATRLKRTARRRYTRRKNRICYLQEIFSNEMAKVDDSFFHRLEESFLVEEDKKHERHPIFGNIVDEVAYHEKYPTIYHLRKKLVDSTDKADLRLIYLALAHMIKFRGHFLIEGDLNPDNSDVDKLFIQLVQTYNQLFEENPINASGVDAKAILSARLSKSRRLENLIAQLPGEKKNGLFGNLIALSLGLTPNFKSNFDLAEDAKLQLSKDTYDDDLDNLLAQIGDQYADLFLAAKNLSDAILLSDILRVNTEITKAPLSASMIKRYDEHHQDLTLLKALVRQQLPEKYKEIFFDQSKNGYAGYIDGGASQEEFYKFIKPILEKMDGTEELLVKLNREDLLRKQRTFDNGSIPHQIHLGELHAILRRQEDFYPFLKDNREKIEKILTFRIPYYVGPLARGNSRFAWMTRKSEETITPWNFEEVVDKGASAQSFIERMTNFDKNLPNEKVLPKHSLLYEYFTVYNELTKVKYVTEGMRKPAFLSGEQKKAIVDLLFKTNRKVTVKQLKEDYFKKIECFDSVEISGVEDRFNASLGTYHDLLKIIKDKDFLDNEENEDILEDIVLTLTLFEDREMIEERLKTYAHLFDDKVMKQLKRRRYTGWGRLSRKLINGIRDKQSGKTILDFLKSDGFANRNFMQLIHDDSLTFKEDIQKAQVSGQGDSLHEHIANLAGSPAIKKGILQTVKVVDELVKVMGRHKPENIVIEMARENQTTQKGQKNSRERMKRIEEGIKELGSQILKEHPVENTQLQNEKLYLYYLQNGRDMYVDQELDINRLSDYDVDHIVPQSFLKDDSIDNKVLTRSDKARGKSDNVPSEEVVKKMKNYWRQLLNAKLITQRKFDNLTKAERGGLSELDKAGFIKRQLVETRQITKHVAQILDSRMNTKYDENDKLIREVKVITLKSKLVSDFRKDFQFYKVREINNYHHAHDAYLNAVVGTALIKKYPKLESEFVYGDYKVYDVRKMIAKSEQEIGKATAKYFFYSNIMNFFKTEITLANGEIRKRPLIETNGETGEIVWDKGRDFATVRKVLSMPQVNIVKKTEVQTGGFSKESILPKRNSDKLIARKKDWDPKKYGGFDSPTVAYSVLVVAKVEKGKSKKLKSVKELLGITIMERSSFEKNPIDFLEAKGYKEVKKDLIIKLPKYSLFELENGRKRMLASAGELQKGNELALPSKYVNFLYLASHYEKLKGSPEDNEQKQLFVEQHKHYLDEIIEQISEFSKRVILADANLDKVLSAYNKHRDKPIREQAENIIHLFTLTNLGAPAAFKYFDTTIDRKRYTSTKEVLDATLIHQSITGLYETRIDLSQLGGDGGGGGGGGTLQLDDEYRLYSPLVKPDQNIQFWLEQFPQAWAETAGMGLAKQVPPQVIQLKASATPVSVRQYPLSKEAQEGIRPHVQRLIQQGILVPVQSPWNTPLLPVRKPGTNDYRPVQDLREVNKRVQDIHPTVPNPYNLLCALPPQRSWYTVLDLKDAFFCLRLHPTSQPLFAFEWRDPGTGRTGQLTWTRLPQGFKNSPTIFNEALHRDLANFRIQHPQVTLLQYVDDLLLAGATKQDCLEGTKALLLELSDLGYRASAKKAQICRREVTYLGYSLRDGQRWLTEARKKTVVQIPAPTTAKQVREFLGTAGFCRLWIPGFATLAAPLYPLTKPKGEFSWAPEHQKAFDAIKKALLSAPALALPDVTKPFTLYVDERKGVARGVLTQTLGPWRRPVAYLSKKLDPVASGWPVCLKAIAAVAILVKDADKLTLGQNITVIAPHALENIVRQPPDRWMTNARMTHYQSLLLTERVTFAPPAALNPATLLPEETDEPVTHDCHQLLIEETGVRKDLTDIPLTGEVLTWFTDGSSYVVEGKRMAGAAVVDGTRTIWASSLPEGTSAQKAELMALTQALRLAEGKSINIYTDSRYAFATAHVHGAIYKQRGWLTSAGREIKNKEEILSLLEALHLPKRLAIIHCPGHQKAKDPISRGNQMADRVAKQAAQGVNLLAGKRTADGSEFEKRTADGSEFESPKKKAKVE

SEQ ID NO: 150 - protein, 2104 aa, synthetic construct
MPAAKRVKLDGGDKKYSIGLDIGTNSVGWAVITDEYKVPSKKFKVLGNTDRHSIKKNLIGALLFDSGETAEATRLKRTARRRYTRRKNRICYLQEIFSNEMAKVDDSFFHRLEESFLVEEDKKHERHPIFGNIVDEVAYHEKYPTIYHLRKKLVDSTDKADLRLIYLALAHMIKFRGHFLIEGDLNPDNSDVDKLFIQLVQTYNQLFEENPINASGVDAKAILSARLSKSRRLENLIAQLPGEKKNGLFGNLIALSLGLTPNFKSNFDLAEDAKLQLSKDTYDDDLDNLLAQIGDQYADLFLAAKNLSDAILLSDILRVNTEITKAPLSASMIKRYDEHHQDLTLLKALVRQQLPEKYKEIFFDQSKNGYAGYIDGGASQEEFYKFIKPILEKMDGTEELLVKLNREDLLRKQRTFDNGSIPHQIHLGELHAILRRQEDFYPFLKDNREKIEKILTFRIPYYVGPLARGNSRFAWMTRKSEETITPWNFEEVVDKGASAQSFIERMTNFDKNLPNEKVLPKHSLLYEYFTVYNELTKVKYVTEGMRKPAFLSGEQKKAIVDLLFKTNRKVTVKQLKEDYFKKIECFDSVEISGVEDRFNASLGTYHDLLKIIKDKDFLDNEENEDILEDIVLTLTLFEDREMIEERLKTYAHLFDDKVMKQLKRRRYTGWGRLSRKLINGIRDKQSGKTILDFLKSDGFANRNFMQLIHDDSLTFKEDIQKAQVSGQGDSLHEHIANLAGSPAIKKGILQTVKVVDELVKVMGRHKPENIVIEMARENQTTQKGQKNSRERMKRIEEGIKELGSQILKEHPVENTQLQNEKLYLYYLQNGRDMYVDQELDINRLSDYDVDHIVPQSFLKDDSIDNKVLTRSDKARGKSDNVPSEEVVKKMKNYWRQLLNAKLITQRKFDNLTKAERGGLSELDKAGFIKRQLVETRQITKHVAQILDSRMNTKYDENDKLIREVKVITLKSKLVSDFRKDFQFYKVREINNYHHAHDAYLNAVVGTALIKKYPKLESEFVYGDYKVYDVRKMIAKSEQEIGKATAKYFFYSNIMNFFKTEITLANGEIRKRPLIETNGETGEIVWDKGRDFATVRKVLSMPQVNIVKKTEVQTGGFSKESILPKRNSDKLIARKKDWDPKKYGGFDSPTVAYSVLVVAKVEKGKSKKLKSVKELLGITIMERSSFEKNPIDFLEAKGYKEVKKDLIIKLPKYSLFELENGRKRMLASAGELQKGNELALPSKYVNFLYLASHYEKLKGSPEDNEQKQLFVEQHKHYLDEIIEQISEFSKRVILADANLDKVLSAYNKHRDKPIREQAENIIHLFTLTNLGAPAAFKYFDTTIDRKRYTSTKEVLDATLIHQSITGLYETRIDLSQLGGDGGEAAAKEAAAKEAAAKEAAAKEAAAKGGTLQLDDEYRLYSPLVKPDQNIQFWLEQFPQAWAETAGMGLAKQVPPQVIQLKASATPVSVRQYPLSKEAQEGIRPHVQRLIQQGILVPVQSPWNTPLLPVRKPGTNDYRPVQDLREVNKRVQDIHPTVPNPYNLLCALPPQRSWYTVLDLKDAFFCLRLHPTSQPLFAFEWRDPGTGRTGQLTWTRLPQGFKNSPTIFNEALHRDLANFRIQHPQVTLLQYVDDLLLAGATKQDCLEGTKALLLELSDLGYRASAKKAQICRREVTYLGYSLRDGQRWLTEARKKTVVQIPAPTTAKQVREFLGTAGFCRLWIPGFATLAAPLYPLTKPKGEFSWAPEHQKAFDAIKKALLSAPALALPDVTKPFTLYVDERKGVARGVLTQTLGPWRRPVAYLSKKLDPVASGWPVCLKAIAAVAILVKDADKLTLGQNITVIAPHALENIVRQPPDRWMTNARMTHYQSLLLTERVTFAPPAALNPATLLPEETDEPVTHDCHQLLIEETGVRKDLTDIPLTGEVLTWFTDGSSYVVEGKRMAGAAVVDGTRTIWASSLPEGTSAQKAELMALTQALRLAEGKSINIYTDSRYAFATAHVHGAIYKQRGWLTSAGREIKNKEEILSLLEALHLPKRLAIIHCPGHQKAKDPISRGNQMADRVAKQAAQGVNLLAGKRTADGSEFEKRTADGSEFESPKKKAKVE

SEQ ID NO: 151 - protein, 2084 aa, synthetic construct
MPAAKRVKLDGGDKKYSIGLDIGTNSVGWAVITDEYKVPSKKFKVLGNTDRHSIKKNLIGALLFDSGETAEATRLKRTARRRYTRRKNRICYLQEIFSNEMAKVDDSFFHRLEESFLVEEDKKHERHPIFGNIVDEVAYHEKYPTIYHLRKKLVDSTDKADLRLIYLALAHMIKFRGHFLIEGDLNPDNSDVDKLFIQLVQTYNQLFEENPINASGVDAKAILSARLSKSRRLENLIAQLPGEKKNGLFGNLIALSLGLTPNFKSNFDLAEDAKLQLSKDTYDDDLDNLLAQIGDQYADLFLAAKNLSDAILLSDILRVNTEITKAPLSASMIKRYDEHHQDLTLLKALVRQQLPEKYKEIFFDQSKNGYAGYIDGGASQEEFYKFIKPILEKMDGTEELLVKLNREDLLRKQRTFDNGSIPHQIHLGELHAILRRQEDFYPFLKDNREKIEKILTFRIPYYVGPLARGNSRFAWMTRKSEETITPWNFEEVVDKGASAQSFIERMTNFDKNLPNEKVLPKHSLLYEYFTVYNELTKVKYVTEGMRKPAFLSGEQKKAIVDLLFKTNRKVTVKQLKEDYFKKIECFDSVEISGVEDRFNASLGTYHDLLKIIKDKDFLDNEENEDILEDIVLTLTLFEDREMIEERLKTYAHLFDDKVMKQLKRRRYTGWGRLSRKLINGIRDKQSGKTILDFLKSDGFANRNFMQLIHDDSLTFKEDIQKAQVSGQGDSLHEHIANLAGSPAIKKGILQTVKVVDELVKVMGRHKPENIVIEMARENQTTQKGQKNSRERMKRIEEGIKELGSQILKEHPVENTQLQNEKLYLYYLQNGRDMYVDQELDINRLSDYDVDHIVPQSFLKDDSIDNKVLTRSDKARGKSDNVPSEEVVKKMKNYWRQLLNAKLITQRKFDNLTKAERGGLSELDKAGFIKRQLVETRQITKHVAQILDSRMNTKYDENDKLIREVKVITLKSKLVSDFRKDFQFYKVREINNYHHAHDAYLNAVVGTALIKKYPKLESEFVYGDYKVYDVRKMIAKSEQEIGKATAKYFFYSNIMNFFKTEITLANGEIRKRPLIETNGETGEIVWDKGRDFATVRKVLSMPQVNIVKKTEVQTGGFSKESILPKRNSDKLIARKKDWDPKKYGGFDSPTVAYSVLVVAKVEKGKSKKLKSVKELLGITIMERSSFEKNPIDFLEAKGYKEVKKDLIIKLPKYSLFELENGRKRMLASAGELQKGNELALPSKYVNFLYLASHYEKLKGSPEDNEQKQLFVEQHKHYLDEIIEQISEFSKRVILADANLDKVLSAYNKHRDKPIREQAENIIHLFTLTNLGAPAAFKYFDTTIDRKRYTSTKEVLDATLIHQSITGLYETRIDLSQLGGDGGEAAAKGGTLQLDDEYRLYSPLVKPDQNIQFWLEQFPQAWAETAGMGLAKQVPPQVIQLKASATPVSVRQYPLSKEAQEGIRPHVQRLIQQGILVPVQSPWNTPLLPVRKPGTNDYRPVQDLREVNKRVQDIHPTVPNPYNLLCALPPQRSWYTVLDLKDAFFCLRLHPTSQPLFAFEWRDPGTGRTGQLTWTRLPQGFKNSPTIFNEALHRDLANFRIQHPQVTLLQYVDDLLLAGATKQDCLEGTKALLLELSDLGYRASAKKAQICRREVTYLGYSLRDGQRWLTEARKKTVVQIPAPTTAKQVREFLGTAGFCRLWIPGFATLAAPLYPLTKPKGEFSWAPEHQKAFDAIKKALLSAPALALPDVTKPFTLYVDERKGVARGVLTQTLGPWRRPVAYLSKKLDPVASGWPVCLKAIAAVAILVKDADKLTLGQNITVIAPHALENIVRQPPDRWMTNARMTHYQSLLLTERVTFAPPAALNPATLLPEETDEPVTHDCHQLLIEETGVRKDLTDIPLTGEVLTWFTDGSSYVVEGKRMAGAAVVDGTRTIWASSLPEGTSAQKAELMALTQALRLAEGKSINIYTDSRYAFATAHVHGAIYKQRGWLTSAGREIKNKEEILSLLEALHLPKRLAIIHCPGHQKAKDPISRGNQMADRVAKQAAQGVNLLAGKRTADGSEFEKRTADGSEFESPKKKAKVE

SEQ ID NO: 152 - protein, 2086 aa, synthetic construct
MPAAKRVKLDGGDKKYSIGLDIGTNSVGWAVITDEYKVPSKKFKVLGNTDRHSIKKNLIGALLFDSGETAEATRLKRTARRRYTRRKNRICYLQEIFSNEMAKVDDSFFHRLEESFLVEEDKKHERHPIFGNIVDEVAYHEKYPTIYHLRKKLVDSTDKADLRLIYLALAHMIKFRGHFLIEGDLNPDNSDVDKLFIQLVQTYNQLFEENPINASGVDAKAILSARLSKSRRLENLIAQLPGEKKNGLFGNLIALSLGLTPNFKSNFDLAEDAKLQLSKDTYDDDLDNLLAQIGDQYADLFLAAKNLSDAILLSDILRVNTEITKAPLSASMIKRYDEHHQDLTLLKALVRQQLPEKYKEIFFDQSKNGYAGYIDGGASQEEFYKFIKPILEKMDGTEELLVKLNREDLLRKQRTFDNGSIPHQIHLGELHAILRRQEDFYPFLKDNREKIEKILTFRIPYYVGPLARGNSRFAWMTRKSEETITPWNFEEVVDKGASAQSFIERMTNFDKNLPNEKVLPKHSLLYEYFTVYNELTKVKYVTEGMRKPAFLSGEQKKAIVDLLFKTNRKVTVKQLKEDYFKKIECFDSVEISGVEDRFNASLGTYHDLLKIIKDKDFLDNEENEDILEDIVLTLTLFEDREMIEERLKTYAHLFDDKVMKQLKRRRYTGWGRLSRKLINGIRDKQSGKTILDFLKSDGFANRNFMQLIHDDSLTFKEDIQKAQVSGQGDSLHEHIANLAGSPAIKKGILQTVKVVDELVKVMGRHKPENIVIEMARENQTTQKGQKNSRERMKRIEEGIKELGSQILKEHPVENTQLQNEKLYLYYLQNGRDMYVDQELDINRLSDYDVDHIVPQSFLKDDSIDNKVLTRSDKARGKSDNVPSEEVVKKMKNYWRQLLNAKLITQRKFDNLTKAERGGLSELDKAGFIKRQLVETRQITKHVAQILDSRMNTKYDENDKLIREVKVITLKSKLVSDFRKDFQFYKVREINNYHHAHDAYLNAVVGTALIKKYPKLESEFVYGDYKVYDVRKMIAKSEQEIGKATAKYFFYSNIMNFFKTEITLANGEIRKRPLIETNGETGEIVWDKGRDFATVRKVLSMPQVNIVKKTEVQTGGFSKESILPKRNSDKLIARKKDWDPKKYGGFDSPTVAYSVLVVAKVEKGKSKKLKSVKELLGITIMERSSFEKNPIDFLEAKGYKEVKKDLIIKLPKYSLFELENGRKRMLASAGELQKGNELALPSKYVNFLYLASHYEKLKGSPEDNEQKQLFVEQHKHYLDEIIEQISEFSKRVILADANLDKVLSAYNKHRDKPIREQAENIIHLFTLTNLGAPAAFKYFDTTIDRKRYTSTKEVLDATLIHQSITGLYETRIDLSQLGGDGGGGGGGGGGGTLQLDDEYRLYSPLVKPDQNIQFWLEQFPQAWAETAGMGLAKQVPPQVIQLKASATPVSVRQYPLSKEAQEGIRPHVQRLIQQGILVPVQSPWNTPLLPVRKPGTNDYRPVQDLREVNKRVQDIHPTVPNPYNLLCALPPQRSWYTVLDLKDAFFCLRLHPTSQPLFAFEWRDPGTGRTGQLTWTRLPQGFKNSPTIFNEALHRDLANFRIQHPQVTLLQYVDDLLLAGATKQDCLEGTKALLLELSDLGYRASAKKAQICRREVTYLGYSLRDGQRWLTEARKKTVVQIPAPTTAKQVREFLGTAGFCRLWIPGFATLAAPLYPLTKPKGEFSWAPEHQKAFDAIKKALLSAPALALPDVTKPFTLYVDERKGVARGVLTQTLGPWRRPVAYLSKKLDPVASGWPVCLKAIAAVAILVKDADKLTLGQNITVIAPHALENIVRQPPDRWMTNARMTHYQSLLLTERVTFAPPAALNPATLLPEETDEPVTHDCHQLLIEETGVRKDLTDIPLTGEVLTWFTDGSSYVVEGKRMAGAAVVDGTRTIWASSLPEGTSAQKAELMALTQALRLAEGKSINIYTDSRYAFATAHVHGAIYKQRGWLTSAGREIKNKEEILSLLEALHLPKRLAIIHCPGHQKAKDPISRGNQMADRVAKQAAQGVNLLAGKRTADGSEFEKRTADGSEFESPKKKAKVE

SEQ ID NO: 153 - protein, 2091 aa, synthetic construct
MPAAKRVKLDGGDKKYSIGLDIGTNSVGWAVITDEYKVPSKKFKVLGNTDRHSIKKNLIGALLFDSGETAEATRLKRTARRRYTRRKNRICYLQEIFSNEMAKVDDSFFHRLEESFLVEEDKKHERHPIFGNIVDEVAYHEKYPTIYHLRKKLVDSTDKADLRLIYLALAHMIKFRGHFLIEGDLNPDNSDVDKLFIQLVQTYNQLFEENPINASGVDAKAILSARLSKSRRLENLIAQLPGEKKNGLFGNLIALSLGLTPNFKSNFDLAEDAKLQLSKDTYDDDLDNLLAQIGDQYADLFLAAKNLSDAILLSDILRVNTEITKAPLSASMIKRYDEHHQDLTLLKALVRQQLPEKYKEIFFDQSKNGYAGYIDGGASQEEFYKFIKPILEKMDGTEELLVKLNREDLLRKQRTFDNGSIPHQIHLGELHAILRRQEDFYPFLKDNREKIEKILTFRIPYYVGPLARGNSRFAWMTRKSEETITPWNFEEVVDKGASAQSFIERMTNFDKNLPNEKVLPKHSLLYEYFTVYNELTKVKYVTEGMRKPAFLSGEQKKAIVDLLFKTNRKVTVKQLKEDYFKKIECFDSVEISGVEDRFNASLGTYHDLLKIIKDKDFLDNEENEDILEDIVLTLTLFEDREMIEERLKTYAHLFDDKVMKQLKRRRYTGWGRLSRKLINGIRDKQSGKTILDFLKSDGFANRNFMQLIHDDSLTFKEDIQKAQVSGQGDSLHEHIANLAGSPAIKKGILQTVKVVDELVKVMGRHKPENIVIEMARENQTTQKGQKNSRERMKRIEEGIKELGSQILKEHPVENTQLQNEKLYLYYLQNGRDMYVDQELDINRLSDYDVDHIVPQSFLKDDSIDNKVLTRSDKARGKSDNVPSEEVVKKMKNYWRQLLNAKLITQRKFDNLTKAERGGLSELDKAGFIKRQLVETRQITKHVAQILDSRMNTKYDENDKLIREVKVITLKSKLVSDFRKDFQFYKVREINNYHHAHDAYLNAVVGTALIKKYPKLESEFVYGDYKVYDVRKMIAKSEQEIGKATAKYFFYSNIMNFFKTEITLANGEIRKRPLIETNGETGEIVWDKGRDFATVRKVLSMPQVNIVKKTEVQTGGFSKESILPKRNSDKLIARKKDWDPKKYGGFDSPTVAYSVLVVAKVEKGKSKKLKSVKELLGITIMERSSFEKNPIDFLEAKGYKEVKKDLIIKLPKYSLFELENGRKRMLASAGELQKGNELALPSKYVNFLYLASHYEKLKGSPEDNEQKQLFVEQHKHYLDEIIEQISEFSKRVILADANLDKVLSAYNKHRDKPIREQAENIIHLFTLTNLGAPAAFKYFDTTIDRKRYTSTKEVLDATLIHQSITGLYETRIDLSQLGGDGGGSAGSAAGSGEFGGTLQLDDEYRLYSPLVKPDQNIQFWLEQFPQAWAETAGMGLAKQVPPQVIQLKASATPVSVRQYPLSKEAQEGIRPHVQRLIQQGILVPVQSPWNTPLLPVRKPGTNDYRPVQDLREVNKRVQDIHPTVPNPYNLLCALPPQRSWYTVLDLKDAFFCLRLHPTSQPLFAFEWRDPGTGRTGQLTWTRLPQGFKNSPTIFNEALHRDLANFRIQHPQVTLLQYVDDLLLAGATKQDCLEGTKALLLELSDLGYRASAKKAQICRREVTYLGYSLRDGQRWLTEARKKTVVQIPAPTTAKQVREFLGTAGFCRLWIPGFATLAAPLYPLTKPKGEFSWAPEHQKAFDAIKKALLSAPALALPDVTKPFTLYVDERKGVARGVLTQTLGPWRRPVAYLSKKLDPVASGWPVCLKAIAAVAILVKDADKLTLGQNITVIAPHALENIVRQPPDRWMTNARMTHYQSLLLTERVTFAPPAALNPATLLPEETDEPVTHDCHQLLIEETGVRKDLTDIPLTGEVLTWFTDGSSYVVEGKRMAGAAVVDGTRTIWASSLPEGTSAQKAELMALTQALRLAEGKSINIYTDSRYAFATAHVHGAIYKQRGWLTSAGREIKNKEEILSLLEALHLPKRLAIIHCPGHQKAKDPISRGNQMADRVAKQAAQGVNLLAGKRTADGSEFEKRTADGSEFESPKKKAKVE

SEQ ID NO: 154 - protein, 2090 aa, synthetic construct
MPAAKRVKLDGGDKKYSIGLDIGTNSVGWAVITDEYKVPSKKFKVLGNTDRHSIKKNLIGALLFDSGETAEATRLKRTARRRYTRRKNRICYLQEIFSNEMAKVDDSFFHRLEESFLVEEDKKHERHPIFGNIVDEVAYHEKYPTIYHLRKKLVDSTDKADLRLIYLALAHMIKFRGHFLIEGDLNPDNSDVDKLFIQLVQTYNQLFEENPINASGVDAKAILSARLSKSRRLENLIAQLPGEKKNGLFGNLIALSLGLTPNFKSNFDLAEDAKLQLSKDTYDDDLDNLLAQIGDQYADLFLAAKNLSDAILLSDILRVNTEITKAPLSASMIKRYDEHHQDLTLLKALVRQQLPEKYKEIFFDQSKNGYAGYIDGGASQEEFYKFIKPILEKMDGTEELLVKLNREDLLRKQRTFDNGSIPHQIHLGELHAILRRQEDFYPFLKDNREKIEKILTFRIPYYVGPLARGNSRFAWMTRKSEETITPWNFEEVVDKGASAQSFIERMTNFDKNLPNEKVLPKHSLLYEYFTVYNELTKVKYVTEGMRKPAFLSGEQKKAIVDLLFKTNRKVTVKQLKEDYFKKIECFDSVEISGVEDRFNASLGTYHDLLKIIKDKDFLDNEENEDILEDIVLTLTLFEDREMIEERLKTYAHLFDDKVMKQLKRRRYTGWGRLSRKLINGIRDKQSGKTILDFLKSDGFANRNFMQLIHDDSLTFKEDIQKAQVSGQGDSLHEHIANLAGSPAIKKGILQTVKVVDELVKVMGRHKPENIVIEMARENQTTQKGQKNSRERMKRIEEGIKELGSQILKEHPVENTQLQNEKLYLYYLQNGRDMYVDQELDINRLSDYDVDHIVPQSFLKDDSIDNKVLTRSDKARGKSDNVPSEEVVKKMKNYWRQLLNAKLITQRKFDNLTKAERGGLSELDKAGFIKRQLVETRQITKHVAQILDSRMNTKYDENDKLIREVKVITLKSKLVSDFRKDFQFYKVREINNYHHAHDAYLNAVVGTALIKKYPKLESEFVYGDYKVYDVRKMIAKSEQEIGKATAKYFFYSNIMNFFKTEITLANGEIRKRPLIETNGETGEIVWDKGRDFATVRKVLSMPQVNIVKKTEVQTGGFSKESILPKRNSDKLIARKKDWDPKKYGGFDSPTVAYSVLVVAKVEKGKSKKLKSVKELLGITIMERSSFEKNPIDFLEAKGYKEVKKDLIIKLPKYSLFELENGRKRMLASAGELQKGNELALPSKYVNFLYLASHYEKLKGSPEDNEQKQLFVEQHKHYLDEIIEQISEFSKRVILADANLDKVLSAYNKHRDKPIREQAENIIHLFTLTNLGAPAAFKYFDTTIDRKRYTSTKEVLDATLIHQSITGLYETRIDLSQLGGDGGGGSEAAAKPAPGGTLQLDDEYRLYSPLVKPDQNIQFWLEQFPQAWAETAGMGLAKQVPPQVIQLKASATPVSVRQYPLSKEAQEGIRPHVQRLIQQGILVPVQSPWNTPLLPVRKPGTNDYRPVQDLREVNKRVQDIHPTVPNPYNLLCALPPQRSWYTVLDLKDAFFCLRLHPTSQPLFAFEWRDPGTGRTGQLTWTRLPQGFKNSPTIFNEALHRDLANFRIQHPQVTLLQYVDDLLLAGATKQDCLEGTKALLLELSDLGYRASAKKAQICRREVTYLGYSLRDGQRWLTEARKKTVVQIPAPTTAKQVREFLGTAGFCRLWIPGFATLAAPLYPLTKPKGEFSWAPEHQKAFDAIKKALLSAPALALPDVTKPFTLYVDERKGVARGVLTQTLGPWRRPVAYLSKKLDPVASGWPVCLKAIAAVAILVKDADKLTLGQNITVIAPHALENIVRQPPDRWMTNARMTHYQSLLLTERVTFAPPAALNPATLLPEETDEPVTHDCHQLLIEETGVRKDLTDIPLTGEVLTWFTDGSSYVVEGKRMAGAAVVDGTRTIWASSLPEGTSAQKAELMALTQALRLAEGKSINIYTDSRYAFATAHVHGAIYKQRGWLTSAGREIKNKEEILSLLEALHLPKRLAIIHCPGHQKAKDPISRGNQMADRVAKQAAQGVNLLAGKRTADGSEFEKRTADGSEFESPKKKAKVE

SEQ ID NO: 155 - protein, 2088 aa, synthetic construct
MPAAKRVKLDGGDKKYSIGLDIGTNSVGWAVITDEYKVPSKKFKVLGNTDRHSIKKNLIGALLFDSGETAEATRLKRTARRRYTRRKNRICYLQEIFSNEMAKVDDSFFHRLEESFLVEEDKKHERHPIFGNIVDEVAYHEKYPTIYHLRKKLVDSTDKADLRLIYLALAHMIKFRGHFLIEGDLNPDNSDVDKLFIQLVQTYNQLFEENPINASGVDAKAILSARLSKSRRLENLIAQLPGEKKNGLFGNLIALSLGLTPNFKSNFDLAEDAKLQLSKDTYDDDLDNLLAQIGDQYADLFLAAKNLSDAILLSDILRVNTEITKAPLSASMIKRYDEHHQDLTLLKALVRQQLPEKYKEIFFDQSKNGYAGYIDGGASQEEFYKFIKPILEKMDGTEELLVKLNREDLLRKQRTFDNGSIPHQIHLGELHAILRRQEDFYPFLKDNREKIEKILTFRIPYYVGPLARGNSRFAWMTRKSEETITPWNFEEVVDKGASAQSFIERMTNFDKNLPNEKVLPKHSLLYEYFTVYNELTKVKYVTEGMRKPAFLSGEQKKAIVDLLFKTNRKVTVKQLKEDYFKKIECFDSVEISGVEDRFNASLGTYHDLLKIIKDKDFLDNEENEDILEDIVLTLTLFEDREMIEERLKTYAHLFDDKVMKQLKRRRYTGWGRLSRKLINGIRDKQSGKTILDFLKSDGFANRNFMQLIHDDSLTFKEDIQKAQVSGQGDSLHEHIANLAGSPAIKKGILQTVKVVDELVKVMGRHKPENIVIEMARENQTTQKGQKNSRERMKRIEEGIKELGSQILKEHPVENTQLQNEKLYLYYLQNGRDMYVDQELDINRLSDYDVDHIVPQSFLKDDSIDNKVLTRSDKARGKSDNVPSEEVVKKMKNYWRQLLNAKLITQRKFDNLTKAERGGLSELDKAGFIKRQLVETRQITKHVAQILDSRMNTKYDENDKLIREVKVITLKSKLVSDFRKDFQFYKVREINNYHHAHDAYLNAVVGTALIKKYPKLESEFVYGDYKVYDVRKMIAKSEQEIGKATAKYFFYSNIMNFFKTEITLANGEIRKRPLIETNGETGEIVWDKGRDFATVRKVLSMPQVNIVKKTEVQTGGFSKESILPKRNSDKLIARKKDWDPKKYGGFDSPTVAYSVLVVAKVEKGKSKKLKSVKELLGITIMERSSFEKNPIDFLEAKGYKEVKKDLIIKLPKYSLFELENGRKRMLASAGELQKGNELALPSKYVNFLYLASHYEKLKGSPEDNEQKQLFVEQHKHYLDEIIEQISEFSKRVILADANLDKVLSAYNKHRDKPIREQAENIIHLFTLTNLGAPAAFKYFDTTIDRKRYTSTKEVLDATLIHQSITGLYETRIDLSQLGGDGGGGSGSSPAPGGTLQLDDEYRLYSPLVKPDQNIQFWLEQFPQAWAETAGMGLAKQVPPQVIQLKASATPVSVRQYPLSKEAQEGIRPHVQRLIQQGILVPVQSPWNTPLLPVRKPGTNDYRPVQDLREVNKRVQDIHPTVPNPYNLLCALPPQRSWYTVLDLKDAFFCLRLHPTSQPLFAFEWRDPGTGRTGQLTWTRLPQGFKNSPTIFNEALHRDLANFRIQHPQVTLLQYVDDLLLAGATKQDCLEGTKALLLELSDLGYRASAKKAQICRREVTYLGYSLRDGQRWLTEARKKTVVQIPAPTTAKQVREFLGTAGFCRLWIPGFATLAAPLYPLTKPKGEFSWAPEHQKAFDAIKKALLSAPALALPDVTKPFTLYVDERKGVARGVLTQTLGPWRRPVAYLSKKLDPVASGWPVCLKAIAAVAILVKDADKLTLGQNITVIAPHALENIVRQPPDRWMTNARMTHYQSLLLTERVTFAPPAALNPATLLPEETDEPVTHDCHQLLIEETGVRKDLTDIPLTGEVLTWFTDGSSYVVEGKRMAGAAVVDGTRTIWASSLPEGTSAQKAELMALTQALRLAEGKSINIYTDSRYAFATAHVHGAIYKQRGWLTSAGREIKNKEEILSLLEALHLPKRLAIIHCPGHQKAKDPISRGNQMADRVAKQAAQGVNLLAGKRTADGSEFEKRTADGSEFESPKKKAKVE

SEQ ID NO: 156 - protein, 2125 aa, synthetic construct
MPAAKRVKLDGGDKKYSIGLDIGTNSVGWAVITDEYKVPSKKFKVLGNTDRHSIKKNLIGALLFDSGETAEATRLKRTARRRYTRRKNRICYLQEIFSNEMAKVDDSFFHRLEESFLVEEDKKHERHPIFGNIVDEVAYHEKYPTIYHLRKKLVDSTDKADLRLIYLALAHMIKFRGHFLIEGDLNPDNSDVDKLFIQLVQTYNQLFEENPINASGVDAKAILSARLSKSRRLENLIAQLPGEKKNGLFGNLIALSLGLTPNFKSNFDLAEDAKLQLSKDTYDDDLDNLLAQIGDQYADLFLAAKNLSDAILLSDILRVNTEITKAPLSASMIKRYDEHHQDLTLLKALVRQQLPEKYKEIFFDQSKNGYAGYIDGGASQEEFYKFIKPILEKMDGTEELLVKLNREDLLRKQRTFDNGSIPHQIHLGELHAILRRQEDFYPFLKDNREKIEKILTFRIPYYVGPLARGNSRFAWMTRKSEETITPWNFEEVVDKGASAQSFIERMTNFDKNLPNEKVLPKHSLLYEYFTVYNELTKVKYVTEGMRKPAFLSGEQKKAIVDLLFKTNRKVTVKQLKEDYFKKIECFDSVEISGVEDRFNASLGTYHDLLKIIKDKDFLDNEENEDILEDIVLTLTLFEDREMIEERLKTYAHLFDDKVMKQLKRRRYTGWGRLSRKLINGIRDKQSGKTILDFLKSDGFANRNFMQLIHDDSLTFKEDIQKAQVSGQGDSLHEHIANLAGSPAIKKGILQTVKVVDELVKVMGRHKPENIVIEMARENQTTQKGQKNSRERMKRIEEGIKELGSQILKEHPVENTQLQNEKLYLYYLQNGRDMYVDQELDINRLSDYDVDHIVPQSFLKDDSIDNKVLTRSDKARGKSDNVPSEEVVKKMKNYWRQLLNAKLITQRKFDNLTKAERGGLSELDKAGFIKRQLVETRQITKHVAQILDSRMNTKYDENDKLIREVKVITLKSKLVSDFRKDFQFYKVREINNYHHAHDAYLNAVVGTALIKKYPKLESEFVYGDYKVYDVRKMIAKSEQEIGKATAKYFFYSNIMNFFKTEITLANGEIRKRPLIETNGETGEIVWDKGRDFATVRKVLSMPQVNIVKKTEVQTGGFSKESILPKRNSDKLIARKKDWDPKKYGGFDSPTVAYSVLVVAKVEKGKSKKLKSVKELLGITIMERSSFEKNPIDFLEAKGYKEVKKDLIIKLPKYSLFELENGRKRMLASAGELQKGNELALPSKYVNFLYLASHYEKLKGSPEDNEQKQLFVEQHKHYLDEIIEQISEFSKRVILADANLDKVLSAYNKHRDKPIREQAENIIHLFTLTNLGAPAAFKYFDTTIDRKRYTSTKEVLDATLIHQSITGLYETRIDLSQLGGDGGAEAAAKEAAAKEAAAKEAAAKALEAEAAAKEAAAKEAAAKEAAAKAGGTLQLDDEYRLYSPLVKPDQNIQFWLEQFPQAWAETAGMGLAKQVPPQVIQLKASATPVSVRQYPLSKEAQEGIRPHVQRLIQQGILVPVQSPWNTPLLPVRKPGTNDYRPVQDLREVNKRVQDIHPTVPNPYNLLCALPPQRSWYTVLDLKDAFFCLRLHPTSQPLFAFEWRDPGTGRTGQLTWTRLPQGFKNSPTIFNEALHRDLANFRIQHPQVTLLQYVDDLLLAGATKQDCLEGTKALLLELSDLGYRASAKKAQICRREVTYLGYSLRDGQRWLTEARKKTVVQIPAPTTAKQVREFLGTAGFCRLWIPGFATLAAPLYPLTKPKGEFSWAPEHQKAFDAIKKALLSAPALALPDVTKPFTLYVDERKGVARGVLTQTLGPWRRPVAYLSKKLDPVASGWPVCLKAIAAVAILVKDADKLTLGQNITVIAPHALENIVRQPPDRWMTNARMTHYQSLLLTERVTFAPPAALNPATLLPEETDEPVTHDCHQLLIEETGVRKDLTDIPLTGEVLTWFTDGSSYVVEGKRMAGAAVVDGTRTIWASSLPEGTSAQKAELMALTQALRLAEGKSINIYTDSRYAFATAHVHGAIYKQRGWLTSAGREIKNKEEILSLLEALHLPKRLAIIHCPGHQKAKDPISRGNQMADRVAKQAAQGVNLLAGKRTADGSEFEKRTADGSEFESPKKKAKVE

SEQ ID NO: 157 - protein, 2092 aa, synthetic construct
MPAAKRVKLDGGDKKYSIGLDIGTNSVGWAVITDEYKVPSKKFKVLGNTDRHSIKKNLIGALLFDSGETAEATRLKRTARRRYTRRKNRICYLQEIFSNEMAKVDDSFFHRLEESFLVEEDKKHERHPIFGNIVDEVAYHEKYPTIYHLRKKLVDSTDKADLRLIYLALAHMIKFRGHFLIEGDLNPDNSDVDKLFIQLVQTYNQLFEENPINASGVDAKAILSARLSKSRRLENLIAQLPGEKKNGLFGNLIALSLGLTPNFKSNFDLAEDAKLQLSKDTYDDDLDNLLAQIGDQYADLFLAAKNLSDAILLSDILRVNTEITKAPLSASMIKRYDEHHQDLTLLKALVRQQLPEKYKEIFFDQSKNGYAGYIDGGASQEEFYKFIKPILEKMDGTEELLVKLNREDLLRKQRTFDNGSIPHQIHLGELHAILRRQEDFYPFLKDNREKIEKILTFRIPYYVGPLARGNSRFAWMTRKSEETITPWNFEEVVDKGASAQSFIERMTNFDKNLPNEKVLPKHSLLYEYFTVYNELTKVKYVTEGMRKPAFLSGEQKKAIVDLLFKTNRKVTVKQLKEDYFKKIECFDSVEISGVEDRFNASLGTYHDLLKIIKDKDFLDNEENEDILEDIVLTLTLFEDREMIEERLKTYAHLFDDKVMKQLKRRRYTGWGRLSRKLINGIRDKQSGKTILDFLKSDGFANRNFMQLIHDDSLTFKEDIQKAQVSGQGDSLHEHIANLAGSPAIKKGILQTVKVVDELVKVMGRHKPENIVIEMARENQTTQKGQKNSRERMKRIEEGIKELGSQILKEHPVENTQLQNEKLYLYYLQNGRDMYVDQELDINRLSDYDVDHIVPQSFLKDDSIDNKVLTRSDKARGKSDNVPSEEVVKKMKNYWRQLLNAKLITQRKFDNLTKAERGGLSELDKAGFIKRQLVETRQITKHVAQILDSRMNTKYDENDKLIREVKVITLKSKLVSDFRKDFQFYKVREINNYHHAHDAYLNAVVGTALIKKYPKLESEFVYGDYKVYDVRKMIAKSEQEIGKATAKYFFYSNIMNFFKTEITLANGEIRKRPLIETNGETGEIVWDKGRDFATVRKVLSMPQVNIVKKTEVQTGGFSKESILPKRNSDKLIARKKDWDPKKYGGFDSPTVAYSVLVVAKVEKGKSKKLKSVKELLGITIMERSSFEKNPIDFLEAKGYKEVKKDLIIKLPKYSLFELENGRKRMLASAGELQKGNELALPSKYVNFLYLASHYEKLKGSPEDNEQKQLFVEQHKHYLDEIIEQISEFSKRVILADANLDKVLSAYNKHRDKPIREQAENIIHLFTLTNLGAPAAFKYFDTTIDRKRYTSTKEVLDATLIHQSITGLYETRIDLSQLGGDGGPAPAPAPAPAPAPGGTLQLDDEYRLYSPLVKPDQNIQFWLEQFPQAWAETAGMGLAKQVPPQVIQLKASATPVSVRQYPLSKEAQEGIRPHVQRLIQQGILVPVQSPWNTPLLPVRKPGTNDYRPVQDLREVNKRVQDIHPTVPNPYNLLCALPPQRSWYTVLDLKDAFFCLRLHPTSQPLFAFEWRDPGTGRTGQLTWTRLPQGFKNSPTIFNEALHRDLANFRIQHPQVTLLQYVDDLLLAGATKQDCLEGTKALLLELSDLGYRASAKKAQICRREVTYLGYSLRDGQRWLTEARKKTVVQIPAPTTAKQVREFLGTAGFCRLWIPGFATLAAPLYPLTKPKGEFSWAPEHQKAFDAIKKALLSAPALALPDVTKPFTLYVDERKGVARGVLTQTLGPWRRPVAYLSKKLDPVASGWPVCLKAIAAVAILVKDADKLTLGQNITVIAPHALENIVRQPPDRWMTNARMTHYQSLLLTERVTFAPPAALNPATLLPEETDEPVTHDCHQLLIEETGVRKDLTDIPLTGEVLTWFTDGSSYVVEGKRMAGAAVVDGTRTIWASSLPEGTSAQKAELMALTQALRLAEGKSINIYTDSRYAFATAHVHGAIYKQRGWLTSAGREIKNKEEILSLLEALHLPKRLAIIHCPGHQKAKDPISRGNQMADRVAKQAAQGVNLLAGKRTADGSEFEKRTADGSEFESPKKKAKVE

SEQ ID NO: 158 - protein, 2087 aa, synthetic construct
MPAAKRVKLDGGDKKYSIGLDIGTNSVGWAVITDEYKVPSKKFKVLGNTDRHSIKKNLIGALLFDSGETAEATRLKRTARRRYTRRKNRICYLQEIFSNEMAKVDDSFFHRLEESFLVEEDKKHERHPIFGNIVDEVAYHEKYPTIYHLRKKLVDSTDKADLRLIYLALAHMIKFRGHFLIEGDLNPDNSDVDKLFIQLVQTYNQLFEENPINASGVDAKAILSARLSKSRRLENLIAQLPGEKKNGLFGNLIALSLGLTPNFKSNFDLAEDAKLQLSKDTYDDDLDNLLAQIGDQYADLFLAAKNLSDAILLSDILRVNTEITKAPLSASMIKRYDEHHQDLTLLKALVRQQLPEKYKEIFFDQSKNGYAGYIDGGASQEEFYKFIKPILEKMDGTEELLVKLNREDLLRKQRTFDNGSIPHQIHLGELHAILRRQEDFYPFLKDNREKIEKILTFRIPYYVGPLARGNSRFAWMTRKSEETITPWNFEEVVDKGASAQSFIERMTNFDKNLPNEKVLPKHSLLYEYFTVYNELTKVKYVTEGMRKPAFLSGEQKKAIVDLLFKTNRKVTVKQLKEDYFKKIECFDSVEISGVEDRFNASLGTYHDLLKIIKDKDFLDNEENEDILEDIVLTLTLFEDREMIEERLKTYAHLFDDKVMKQLKRRRYTGWGRLSRKLINGIRDKQSGKTILDFLKSDGFANRNFMQLIHDDSLTFKEDIQKAQVSGQGDSLHEHIANLAGSPAIKKGILQTVKVVDELVKVMGRHKPENIVIEMARENQTTQKGQKNSRERMKRIEEGIKELGSQILKEHPVENTQLQNEKLYLYYLQNGRDMYVDQELDINRLSDYDVDHIVPQSFLKDDSIDNKVLTRSDKARGKSDNVPSEEVVKKMKNYWRQLLNAKLITQRKFDNLTKAERGGLSELDKAGFIKRQLVETRQITKHVAQILDSRMNTKYDENDKLIREVKVITLKSKLVSDFRKDFQFYKVREINNYHHAHDAYLNAVVGTALIKKYPKLESEFVYGDYKVYDVRKMIAKSEQEIGKATAKYFFYSNIMNFFKTEITLANGEIRKRPLIETNGETGEIVWDKGRDFATVRKVLSMPQVNIVKKTEVQTGGFSKESILPKRNSDKLIARKKDWDPKKYGGFDSPTVAYSVLVVAKVEKGKSKKLKSVKELLGITIMERSSFEKNPIDFLEAKGYKEVKKDLIIKLPKYSLFELENGRKRMLASAGELQKGNELALPSKYVNFLYLASHYEKLKGSPEDNEQKQLFVEQHKHYLDEIIEQISEFSKRVILADANLDKVLSAYNKHRDKPIREQAENIIHLFTLTNLGAPAAFKYFDTTIDRKRYTSTKEVLDATLIHQSITGLYETRIDLSQLGGDGGEAAAKGGSGGTLQLDDEYRLYSPLVKPDQNIQFWLEQFPQAWAETAGMGLAKQVPPQVIQLKASATPVSVRQYPLSKEAQEGIRPHVQRLIQQGILVPVQSPWNTPLLPVRKPGTNDYRPVQDLREVNKRVQDIHPTVPNPYNLLCALPPQRSWYTVLDLKDAFFCLRLHPTSQPLFAFEWRDPGTGRTGQLTWTRLPQGFKNSPTIFNEALHRDLANFRIQHPQVTLLQYVDDLLLAGATKQDCLEGTKALLLELSDLGYRASAKKAQICRREVTYLGYSLRDGQRWLTEARKKTVVQIPAPTTAKQVREFLGTAGFCRLWIPGFATLAAPLYPLTKPKGEFSWAPEHQKAFDAIKKALLSAPALALPDVTKPFTLYVDERKGVARGVLTQTLGPWRRPVAYLSKKLDPVASGWPVCLKAIAAVAILVKDADKLTLGQNITVIAPHALENIVRQPPDRWMTNARMTHYQSLLLTERVTFAPPAALNPATLLPEETDEPVTHDCHQLLIEETGVRKDLTDIPLTGEVLTWFTDGSSYVVEGKRMAGAAVVDGTRTIWASSLPEGTSAQKAELMALTQALRLAEGKSINIYTDSRYAFATAHVHGAIYKQRGWLTSAGREIKNKEEILSLLEALHLPKRLAIIHCPGHQKAKDPISRGNQMADRVAKQAAQGVNLLAGKRTADGSEFEKRTADGSEFESPKKKAKVE

SEQ ID NO: 159 - protein, 2094 aa, synthetic construct
MPAAKRVKLDGGDKKYSIGLDIGTNSVGWAVITDEYKVPSKKFKVLGNTDRHSIKKNLIGALLFDSGETAEATRLKRTARRRYTRRKNRICYLQEIFSNEMAKVDDSFFHRLEESFLVEEDKKHERHPIFGNIVDEVAYHEKYPTIYHLRKKLVDSTDKADLRLIYLALAHMIKFRGHFLIEGDLNPDNSDVDKLFIQLVQTYNQLFEENPINASGVDAKAILSARLSKSRRLENLIAQLPGEKKNGLFGNLIALSLGLTPNFKSNFDLAEDAKLQLSKDTYDDDLDNLLAQIGDQYADLFLAAKNLSDAILLSDILRVNTEITKAPLSASMIKRYDEHHQDLTLLKALVRQQLPEKYKEIFFDQSKNGYAGYIDGGASQEEFYKFIKPILEKMDGTEELLVKLNREDLLRKQRTFDNGSIPHQIHLGELHAILRRQEDFYPFLKDNREKIEKILTFRIPYYVGPLARGNSRFAWMTRKSEETITPWNFEEVVDKGASAQSFIERMTNFDKNLPNEKVLPKHSLLYEYFTVYNELTKVKYVTEGMRKPAFLSGEQKKAIVDLLFKTNRKVTVKQLKEDYFKKIECFDSVEISGVEDRFNASLGTYHDLLKIIKDKDFLDNEENEDILEDIVLTLTLFEDREMIEERLKTYAHLFDDKVMKQLKRRRYTGWGRLSRKLINGIRDKQSGKTILDFLKSDGFANRNFMQLIHDDSLTFKEDIQKAQVSGQGDSLHEHIANLAGSPAIKKGILQTVKVVDELVKVMGRHKPENIVIEMARENQTTQKGQKNSRERMKRIEEGIKELGSQILKEHPVENTQLQNEKLYLYYLQNGRDMYVDQELDINRLSDYDVDHIVPQSFLKDDSIDNKVLTRSDKARGKSDNVPSEEVVKKMKNYWRQLLNAKLITQRKFDNLTKAERGGLSELDKAGFIKRQLVETRQITKHVAQILDSRMNTKYDENDKLIREVKVITLKSKLVSDFRKDFQFYKVREINNYHHAHDAYLNAVVGTALIKKYPKLESEFVYGDYKVYDVRKMIAKSEQEIGKATAKYFFYSNIMNFFKTEITLANGEIRKRPLIETNGETGEIVWDKGRDFATVRKVLSMPQVNIVKKTEVQTGGFSKESILPKRNSDKLIARKKDWDPKKYGGFDSPTVAYSVLVVAKVEKGKSKKLKSVKELLGITIMERSSFEKNPIDFLEAKGYKEVKKDLIIKLPKYSLFELENGRKRMLASAGELQKGNELALPSKYVNFLYLASHYEKLKGSPEDNEQKQLFVEQHKHYLDEIIEQISEFSKRVILADANLDKVLSAYNKHRDKPIREQAENIIHLFTLTNLGAPAAFKYFDTTIDRKRYTSTKEVLDATLIHQSITGLYETRIDLSQLGGDGGGGGGSGGGGSGGGGSGGTLQLDDEYRLYSPLVKPDQNIQFWLEQFPQAWAETAGMGLAKQVPPQVIQLKASATPVSVRQYPLSKEAQEGIRPHVQRLIQQGILVPVQSPWNTPLLPVRKPGTNDYRPVQDLREVNKRVQDIHPTVPNPYNLLCALPPQRSWYTVLDLKDAFFCLRLHPTSQPLFAFEWRDPGTGRTGQLTWTRLPQGFKNSPTIFNEALHRDLANFRIQHPQVTLLQYVDDLLLAGATKQDCLEGTKALLLELSDLGYRASAKKAQICRREVTYLGYSLRDGQRWLTEARKKTVVQIPAPTTAKQVREFLGTAGFCRLWIPGFATLAAPLYPLTKPKGEFSWAPEHQKAFDAIKKALLSAPALALPDVTKPFTLYVDERKGVARGVLTQTLGPWRRPVAYLSKKLDPVASGWPVCLKAIAAVAILVKDADKLTLGQNITVIAPHALENIVRQPPDRWMTNARMTHYQSLLLTERVTFAPPAALNPATLLPEETDEPVTHDCHQLLIEETGVRKDLTDIPLTGEVLTWFTDGSSYVVEGKRMAGAAVVDGTRTIWASSLPEGTSAQKAELMALTQALRLAEGKSINIYTDSRYAFATAHVHGAIYKQRGWLTSAGREIKNKEEILSLLEALHLPKRLAIIHCPGHQKAKDPISRGNQMADRVAKQAAQGVNLLAGKRTADGSEFEKRTADGSEFESPKKKAKVE

SEQ ID NO: 160 - protein, 2090 aa, synthetic construct
MPAAKRVKLDGGDKKYSIGLDIGTNSVGWAVITDEYKVPSKKFKVLGNTDRHSIKKNLIGALLFDSGETAEATRLKRTARRRYTRRKNRICYLQEIFSNEMAKVDDSFFHRLEESFLVEEDKKHERHPIFGNIVDEVAYHEKYPTIYHLRKKLVDSTDKADLRLIYLALAHMIKFRGHFLIEGDLNPDNSDVDKLFIQLVQTYNQLFEENPINASGVDAKAILSARLSKSRRLENLIAQLPGEKKNGLFGNLIALSLGLTPNFKSNFDLAEDAKLQLSKDTYDDDLDNLLAQIGDQYADLFLAAKNLSDAILLSDILRVNTEITKAPLSASMIKRYDEHHQDLTLLKALVRQQLPEKYKEIFFDQSKNGYAGYIDGGASQEEFYKFIKPILEKMDGTEELLVKLNREDLLRKQRTFDNGSIPHQIHLGELHAILRRQEDFYPFLKDNREKIEKILTFRIPYYVGPLARGNSRFAWMTRKSEETITPWNFEEVVDKGASAQSFIERMTNFDKNLPNEKVLPKHSLLYEYFTVYNELTKVKYVTEGMRKPAFLSGEQKKAIVDLLFKTNRKVTVKQLKEDYFKKIECFDSVEISGVEDRFNASLGTYHDLLKIIKDKDFLDNEENEDILEDIVLTLTLFEDREMIEERLKTYAHLFDDKVMKQLKRRRYTGWGRLSRKLINGIRDKQSGKTILDFLKSDGFANRNFMQLIHDDSLTFKEDIQKAQVSGQGDSLHEHIANLAGSPAIKKGILQTVKVVDELVKVMGRHKPENIVIEMARENQTTQKGQKNSRERMKRIEEGIKELGSQILKEHPVENTQLQNEKLYLYYLQNGRDMYVDQELDINRLSDYDVDHIVPQSFLKDDSIDNKVLTRSDKARGKSDNVPSEEVVKKMKNYWRQLLNAKLITQRKFDNLTKAERGGLSELDKAGFIKRQLVETRQITKHVAQILDSRMNTKYDENDKLIREVKVITLKSKLVSDFRKDFQFYKVREINNYHHAHDAYLNAVVGTALIKKYPKLESEFVYGDYKVYDVRKMIAKSEQEIGKATAKYFFYSNIMNFFKTEITLANGEIRKRPLIETNGETGEIVWDKGRDFATVRKVLSMPQVNIVKKTEVQTGGFSKESILPKRNSDKLIARKKDWDPKKYGGFDSPTVAYSVLVVAKVEKGKSKKLKSVKELLGITIMERSSFEKNPIDFLEAKGYKEVKKDLIIKLPKYSLFELENGRKRMLASAGELQKGNELALPSKYVNFLYLASHYEKLKGSPEDNEQKQLFVEQHKHYLDEIIEQISEFSKRVILADANLDKVLSAYNKHRDKPIREQAENIIHLFTLTNLGAPAAFKYFDTTIDRKRYTSTKEVLDATLIHQSITGLYETRIDLSQLGGDGGEAAAKGSSGGGGGTLQLDDEYRLYSPLVKPDQNIQFWLEQFPQAWAETAGMGLAKQVPPQVIQLKASATPVSVRQYPLSKEAQEGIRPHVQRLIQQGILVPVQSPWNTPLLPVRKPGTNDYRPVQDLREVNKRVQDIHPTVPNPYNLLCALPPQRSWYTVLDLKDAFFCLRLHPTSQPLFAFEWRDPGTGRTGQLTWTRLPQGFKNSPTIFNEALHRDLANFRIQHPQVTLLQYVDDLLLAGATKQDCLEGTKALLLELSDLGYRASAKKAQICRREVTYLGYSLRDGQRWLTEARKKTVVQIPAPTTAKQVREFLGTAGFCRLWIPGFATLAAPLYPLTKPKGEFSWAPEHQKAFDAIKKALLSAPALALPDVTKPFTLYVDERKGVARGVLTQTLGPWRRPVAYLSKKLDPVASGWPVCLKAIAAVAILVKDADKLTLGQNITVIAPHALENIVRQPPDRWMTNARMTHYQSLLLTERVTFAPPAALNPATLLPEETDEPVTHDCHQLLIEETGVRKDLTDIPLTGEVLTWFTDGSSYVVEGKRMAGAAVVDGTRTIWASSLPEGTSAQKAELMALTQALRLAEGKSINIYTDSRYAFATAHVHGAIYKQRGWLTSAGREIKNKEEILSLLEALHLPKRLAIIHCPGHQKAKDPISRGNQMADRVAKQAAQGVNLLAGKRTADGSEFEKRTADGSEFESPKKKAKVE

SEQ ID NO: 161 - protein, 2094 aa, synthetic construct
MPAAKRVKLDGGDKKYSIGLDIGTNSVGWAVITDEYKVPSKKFKVLGNTDRHSIKKNLIGALLFDSGETAEATRLKRTARRRYTRRKNRICYLQEIFSNEMAKVDDSFFHRLEESFLVEEDKKHERHPIFGNIVDEVAYHEKYPTIYHLRKKLVDSTDKADLRLIYLALAHMIKFRGHFLIEGDLNPDNSDVDKLFIQLVQTYNQLFEENPINASGVDAKAILSARLSKSRRLENLIAQLPGEKKNGLFGNLIALSLGLTPNFKSNFDLAEDAKLQLSKDTYDDDLDNLLAQIGDQYADLFLAAKNLSDAILLSDILRVNTEITKAPLSASMIKRYDEHHQDLTLLKALVRQQLPEKYKEIFFDQSKNGYAGYIDGGASQEEFYKFIKPILEKMDGTEELLVKLNREDLLRKQRTFDNGSIPHQIHLGELHAILRRQEDFYPFLKDNREKIEKILTFRIPYYVGPLARGNSRFAWMTRKSEETITPWNFEEVVDKGASAQSFIERMTNFDKNLPNEKVLPKHSLLYEYFTVYNELTKVKYVTEGMRKPAFLSGEQKKAIVDLLFKTNRKVTVKQLKEDYFKKIECFDSVEISGVEDRFNASLGTYHDLLKIIKDKDFLDNEENEDILEDIVLTLTLFEDREMIEERLKTYAHLFDDKVMKQLKRRRYTGWGRLSRKLINGIRDKQSGKTILDFLKSDGFANRNFMQLIHDDSLTFKEDIQKAQVSGQGDSLHEHIANLAGSPAIKKGILQTVKVVDELVKVMGRHKPENIVIEMARENQTTQKGQKNSRERMKRIEEGIKELGSQILKEHPVENTQLQNEKLYLYYLQNGRDMYVDQELDINRLSDYDVDHIVPQSFLKDDSIDNKVLTRSDKARGKSDNVPSEEVVKKMKNYWRQLLNAKLITQRKFDNLTKAERGGLSELDKAGFIKRQLVETRQITKHVAQILDSRMNTKYDENDKLIREVKVITLKSKLVSDFRKDFQFYKVREINNYHHAHDAYLNAVVGTALIKKYPKLESEFVYGDYKVYDVRKMIAKSEQEIGKATAKYFFYSNIMNFFKTEITLANGEIRKRPLIETNGETGEIVWDKGRDFATVRKVLSMPQVNIVKKTEVQTGGFSKESILPKRNSDKLIARKKDWDPKKYGGFDSPTVAYSVLVVAKVEKGKSKKLKSVKELLGITIMERSSFEKNPIDFLEAKGYKEVKKDLIIKLPKYSLFELENGRKRMLASAGELQKGNELALPSKYVNFLYLASHYEKLKGSPEDNEQKQLFVEQHKHYLDEIIEQISEFSKRVILADANLDKVLSAYNKHRDKPIREQAENIIHLFTLTNLGAPAAFKYFDTTIDRKRYTSTKEVLDATLIHQSITGLYETRIDLSQLGGDGGGGGGSEAAAKGGGGSGGTLQLDDEYRLYSPLVKPDQNIQFWLEQFPQAWAETAGMGLAKQVPPQVIQLKASATPVSVRQYPLSKEAQEGIRPHVQRLIQQGILVPVQSPWNTPLLPVRKPGTNDYRPVQDLREVNKRVQDIHPTVPNPYNLLCALPPQRSWYTVLDLKDAFFCLRLHPTSQPLFAFEWRDPGTGRTGQLTWTRLPQGFKNSPTIFNEALHRDLANFRIQHPQVTLLQYVDDLLLAGATKQDCLEGTKALLLELSDLGYRASAKKAQICRREVTYLGYSLRDGQRWLTEARKKTVVQIPAPTTAKQVREFLGTAGFCRLWIPGFATLAAPLYPLTKPKGEFSWAPEHQKAFDAIKKALLSAPALALPDVTKPFTLYVDERKGVARGVLTQTLGPWRRPVAYLSKKLDPVASGWPVCLKAIAAVAILVKDADKLTLGQNITVIAPHALENIVRQPPDRWMTNARMTHYQSLLLTERVTFAPPAALNPATLLPEETDEPVTHDCHQLLIEETGVRKDLTDIPLTGEVLTWFTDGSSYVVEGKRMAGAAVVDGTRTIWASSLPEGTSAQKAELMALTQALRLAEGKSINIYTDSRYAFATAHVHGAIYKQRGWLTSAGREIKNKEEILSLLEALHLPKRLAIIHCPGHQKAKDPISRGNQMADRVAKQAAQGVNLLAGKRTADGSEFEKRTADGSEFESPKKKAKVE

SEQ ID NO: 162 - protein, 2088 aa, synthetic construct
MPAAKRVKLDGGDKKYSIGLDIGTNSVGWAVITDEYKVPSKKFKVLGNTDRHSIKKNLIGALLFDSGETAEATRLKRTARRRYTRRKNRICYLQEIFSNEMAKVDDSFFHRLEESFLVEEDKKHERHPIFGNIVDEVAYHEKYPTIYHLRKKLVDSTDKADLRLIYLALAHMIKFRGHFLIEGDLNPDNSDVDKLFIQLVQTYNQLFEENPINASGVDAKAILSARLSKSRRLENLIAQLPGEKKNGLFGNLIALSLGLTPNFKSNFDLAEDAKLQLSKDTYDDDLDNLLAQIGDQYADLFLAAKNLSDAILLSDILRVNTEITKAPLSASMIKRYDEHHQDLTLLKALVRQQLPEKYKEIFFDQSKNGYAGYIDGGASQEEFYKFIKPILEKMDGTEELLVKLNREDLLRKQRTFDNGSIPHQIHLGELHAILRRQEDFYPFLKDNREKIEKILTFRIPYYVGPLARGNSRFAWMTRKSEETITPWNFEEVVDKGASAQSFIERMTNFDKNLPNEKVLPKHSLLYEYFTVYNELTKVKYVTEGMRKPAFLSGEQKKAIVDLLFKTNRKVTVKQLKEDYFKKIECFDSVEISGVEDRFNASLGTYHDLLKIIKDKDFLDNEENEDILEDIVLTLTLFEDREMIEERLKTYAHLFDDKVMKQLKRRRYTGWGRLSRKLINGIRDKQSGKTILDFLKSDGFANRNFMQLIHDDSLTFKEDIQKAQVSGQGDSLHEHIANLAGSPAIKKGILQTVKVVDELVKVMGRHKPENIVIEMARENQTTQKGQKNSRERMKRIEEGIKELGSQILKEHPVENTQLQNEKLYLYYLQNGRDMYVDQELDINRLSDYDVDHIVPQSFLKDDSIDNKVLTRSDKARGKSDNVPSEEVVKKMKNYWRQLLNAKLITQRKFDNLTKAERGGLSELDKAGFIKRQLVETRQITKHVAQILDSRMNTKYDENDKLIREVKVITLKSKLVSDFRKDFQFYKVREINNYHHAHDAYLNAVVGTALIKKYPKLESEFVYGDYKVYDVRKMIAKSEQEIGKATAKYFFYSNIMNFFKTEITLANGEIRKRPLIETNGETGEIVWDKGRDFATVRKVLSMPQVNIVKKTEVQTGGFSKESILPKRNSDKLIARKKDWDPKKYGGFDSPTVAYSVLVVAKVEKGKSKKLKSVKELLGITIMERSSFEKNPIDFLEAKGYKEVKKDLIIKLPKYSLFELENGRKRMLASAGELQKGNELALPSKYVNFLYLASHYEKLKGSPEDNEQKQLFVEQHKHYLDEIIEQISEFSKRVILADANLDKVLSAYNKHRDKPIREQAENIIHLFTLTNLGAPAAFKYFDTTIDRKRYTSTKEVLDATLIHQSITGLYETRIDLSQLGGDGGGSSGGGGGSGGTLQLDDEYRLYSPLVKPDQNIQFWLEQFPQAWAETAGMGLAKQVPPQVIQLKASATPVSVRQYPLSKEAQEGIRPHVQRLIQQGILVPVQSPWNTPLLPVRKPGTNDYRPVQDLREVNKRVQDIHPTVPNPYNLLCALPPQRSWYTVLDLKDAFFCLRLHPTSQPLFAFEWRDPGTGRTGQLTWTRLPQGFKNSPTIFNEALHRDLANFRIQHPQVTLLQYVDDLLLAGATKQDCLEGTKALLLELSDLGYRASAKKAQICRREVTYLGYSLRDGQRWLTEARKKTVVQIPAPTTAKQVREFLGTAGFCRLWIPGFATLAAPLYPLTKPKGEFSWAPEHQKAFDAIKKALLSAPALALPDVTKPFTLYVDERKGVARGVLTQTLGPWRRPVAYLSKKLDPVASGWPVCLKAIAAVAILVKDADKLTLGQNITVIAPHALENIVRQPPDRWMTNARMTHYQSLLLTERVTFAPPAALNPATLLPEETDEPVTHDCHQLLIEETGVRKDLTDIPLTGEVLTWFTDGSSYVVEGKRMAGAAVVDGTRTIWASSLPEGTSAQKAELMALTQALRLAEGKSINIYTDSRYAFATAHVHGAIYKQRGWLTSAGREIKNKEEILSLLEALHLPKRLAIIHCPGHQKAKDPISRGNQMADRVAKQAAQGVNLLAGKRTADGSEFEKRTADGSEFESPKKKAKVE

SEQ ID NO: 163 - protein, 2084 aa, synthetic construct
MPAAKRVKLDGGDKKYSIGLDIGTNSVGWAVITDEYKVPSKKFKVLGNTDRHSIKKNLIGALLFDSGETAEATRLKRTARRRYTRRKNRICYLQEIFSNEMAKVDDSFFHRLEESFLVEEDKKHERHPIFGNIVDEVAYHEKYPTIYHLRKKLVDSTDKADLRLIYLALAHMIKFRGHFLIEGDLNPDNSDVDKLFIQLVQTYNQLFEENPINASGVDAKAILSARLSKSRRLENLIAQLPGEKKNGLFGNLIALSLGLTPNFKSNFDLAEDAKLQLSKDTYDDDLDNLLAQIGDQYADLFLAAKNLSDAILLSDILRVNTEITKAPLSASMIKRYDEHHQDLTLLKALVRQQLPEKYKEIFFDQSKNGYAGYIDGGASQEEFYKFIKPILEKMDGTEELLVKLNREDLLRKQRTFDNGSIPHQIHLGELHAILRRQEDFYPFLKDNREKIEKILTFRIPYYVGPLARGNSRFAWMTRKSEETITPWNFEEVVDKGASAQSFIERMTNFDKNLPNEKVLPKHSLLYEYFTVYNELTKVKYVTEGMRKPAFLSGEQKKAIVDLLFKTNRKVTVKQLKEDYFKKIECFDSVEISGVEDRFNASLGTYHDLLKIIKDKDFLDNEENEDILEDIVLTLTLFEDREMIEERLKTYAHLFDDKVMKQLKRRRYTGWGRLSRKLINGIRDKQSGKTILDFLKSDGFANRNFMQLIHDDSLTFKEDIQKAQVSGQGDSLHEHIANLAGSPAIKKGILQTVKVVDELVKVMGRHKPENIVIEMARENQTTQKGQKNSRERMKRIEEGIKELGSQILKEHPVENTQLQNEKLYLYYLQNGRDMYVDQELDINRLSDYDVDHIVPQSFLKDDSIDNKVLTRSDKARGKSDNVPSEEVVKKMKNYWRQLLNAKLITQRKFDNLTKAERGGLSELDKAGFIKRQLVETRQITKHVAQILDSRMNTKYDENDKLIREVKVITLKSKLVSDFRKDFQFYKVREINNYHHAHDAYLNAVVGTALIKKYPKLESEFVYGDYKVYDVRKMIAKSEQEIGKATAKYFFYSNIMNFFKTEITLANGEIRKRPLIETNGETGEIVWDKGRDFATVRKVLSMPQVNIVKKTEVQTGGFSKESILPKRNSDKLIARKKDWDPKKYGGFDSPTVAYSVLVVAKVEKGKSKKLKSVKELLGITIMERSSFEKNPIDFLEAKGYKEVKKDLIIKLPKYSLFELENGRKRMLASAGELQKGNELALPSKYVNFLYLASHYEKLKGSPEDNEQKQLFVEQHKHYLDEIIEQISEFSKRVILADANLDKVLSAYNKHRDKPIREQAENIIHLFTLTNLGAPAAFKYFDTTIDRKRYTSTKEVLDATLIHQSITGLYETRIDLSQLGGDGGPAPAPGGTLQLDDEYRLYSPLVKPDQNIQFWLEQFPQAWAETAGMGLAKQVPPQVIQLKASATPVSVRQYPLSKEAQEGIRPHVQRLIQQGILVPVQSPWNTPLLPVRKPGTNDYRPVQDLREVNKRVQDIHPTVPNPYNLLCALPPQRSWYTVLDLKDAFFCLRLHPTSQPLFAFEWRDPGTGRTGQLTWTRLPQGFKNSPTIFNEALHRDLANFRIQHPQVTLLQYVDDLLLAGATKQDCLEGTKALLLELSDLGYRASAKKAQICRREVTYLGYSLRDGQRWLTEARKKTVVQIPAPTTAKQVREFLGTAGFCRLWIPGFATLAAPLYPLTKPKGEFSWAPEHQKAFDAIKKALLSAPALALPDVTKPFTLYVDERKGVARGVLTQTLGPWRRPVAYLSKKLDPVASGWPVCLKAIAAVAILVKDADKLTLGQNITVIAPHALENIVRQPPDRWMTNARMTHYQSLLLTERVTFAPPAALNPATLLPEETDEPVTHDCHQLLIEETGVRKDLTDIPLTGEVLTWFTDGSSYVVEGKRMAGAAVVDGTRTIWASSLPEGTSAQKAELMALTQALRLAEGKSINIYTDSRYAFATAHVHGAIYKQRGWLTSAGREIKNKEEILSLLEALHLPKRLAIIHCPGHQKAKDPISRGNQMADRVAKQAAQGVNLLAGKRTADGSEFEKRTADGSEFESPKKKAKVE

SEQ ID NO: 164 - protein, 2090 aa, synthetic construct
MPAAKRVKLDGGDKKYSIGLDIGTNSVGWAVITDEYKVPSKKFKVLGNTDRHSIKKNLIGALLFDSGETAEATRLKRTARRRYTRRKNRICYLQEIFSNEMAKVDDSFFHRLEESFLVEEDKKHERHPIFGNIVDEVAYHEKYPTIYHLRKKLVDSTDKADLRLIYLALAHMIKFRGHFLIEGDLNPDNSDVDKLFIQLVQTYNQLFEENPINASGVDAKAILSARLSKSRRLENLIAQLPGEKKNGLFGNLIALSLGLTPNFKSNFDLAEDAKLQLSKDTYDDDLDNLLAQIGDQYADLFLAAKNLSDAILLSDILRVNTEITKAPLSASMIKRYDEHHQDLTLLKALVRQQLPEKYKEIFFDQSKNGYAGYIDGGASQEEFYKFIKPILEKMDGTEELLVKLNREDLLRKQRTFDNGSIPHQIHLGELHAILRRQEDFYPFLKDNREKIEKILTFRIPYYVGPLARGNSRFAWMTRKSEETITPWNFEEVVDKGASAQSFIERMTNFDKNLPNEKVLPKHSLLYEYFTVYNELTKVKYVTEGMRKPAFLSGEQKKAIVDLLFKTNRKVTVKQLKEDYFKKIECFDSVEISGVEDRFNASLGTYHDLLKIIKDKDFLDNEENEDILEDIVLTLTLFEDREMIEERLKTYAHLFDDKVMKQLKRRRYTGWGRLSRKLINGIRDKQSGKTILDFLKSDGFANRNFMQLIHDDSLTFKEDIQKAQVSGQGDSLHEHIANLAGSPAIKKGILQTVKVVDELVKVMGRHKPENIVIEMARENQTTQKGQKNSRERMKRIEEGIKELGSQILKEHPVENTQLQNEKLYLYYLQNGRDMYVDQELDINRLSDYDVDHIVPQSFLKDDSIDNKVLTRSDKARGKSDNVPSEEVVKKMKNYWRQLLNAKLITQRKFDNLTKAERGGLSELDKAGFIKRQLVETRQITKHVAQILDSRMNTKYDENDKLIREVKVITLKSKLVSDFRKDFQFYKVREINNYHHAHDAYLNAVVGTALIKKYPKLESEFVYGDYKVYDVRKMIAKSEQEIGKATAKYFFYSNIMNFFKTEITLANGEIRKRPLIETNGETGEIVWDKGRDFATVRKVLSMPQVNIVKKTEVQTGGFSKESILPKRNSDKLIARKKDWDPKKYGGFDSPTVAYSVLVVAKVEKGKSKKLKSVKELLGITIMERSSFEKNPIDFLEAKGYKEVKKDLIIKLPKYSLFELENGRKRMLASAGELQKGNELALPSKYVNFLYLASHYEKLKGSPEDNEQKQLFVEQHKHYLDEIIEQISEFSKRVILADANLDKVLSAYNKHRDKPIREQAENIIHLFTLTNLGAPAAFKYFDTTIDRKRYTSTKEVLDATLIHQSITGLYETRIDLSQLGGDGGGGSPAPEAAAKGGTLQLDDEYRLYSPLVKPDQNIQFWLEQFPQAWAETAGMGLAKQVPPQVIQLKASATPVSVRQYPLSKEAQEGIRPHVQRLIQQGILVPVQSPWNTPLLPVRKPGTNDYRPVQDLREVNKRVQDIHPTVPNPYNLLCALPPQRSWYTVLDLKDAFFCLRLHPTSQPLFAFEWRDPGTGRTGQLTWTRLPQGFKNSPTIFNEALHRDLANFRIQHPQVTLLQYVDDLLLAGATKQDCLEGTKALLLELSDLGYRASAKKAQICRREVTYLGYSLRDGQRWLTEARKKTVVQIPAPTTAKQVREFLGTAGFCRLWIPGFATLAAPLYPLTKPKGEFSWAPEHQKAFDAIKKALLSAPALALPDVTKPFTLYVDERKGVARGVLTQTLGPWRRPVAYLSKKLDPVASGWPVCLKAIAAVAILVKDADKLTLGQNITVIAPHALENIVRQPPDRWMTNARMTHYQSLLLTERVTFAPPAALNPATLLPEETDEPVTHDCHQLLIEETGVRKDLTDIPLTGEVLTWFTDGSSYVVEGKRMAGAAVVDGTRTIWASSLPEGTSAQKAELMALTQALRLAEGKSINIYTDSRYAFATAHVHGAIYKQRGWLTSAGREIKNKEEILSLLEALHLPKRLAIIHCPGHQKAKDPISRGNQMADRVAKQAAQGVNLLAGKRTADGSEFEKRTADGSEFESPKKKAKVE

SEQ ID NO: 165 - protein, 2085 aa, synthetic construct
MPAAKRVKLDGGDKKYSIGLDIGTNSVGWAVITDEYKVPSKKFKVLGNTDRHSIKKNLIGALLFDSGETAEATRLKRTARRRYTRRKNRICYLQEIFSNEMAKVDDSFFHRLEESFLVEEDKKHERHPIFGNIVDEVAYHEKYPTIYHLRKKLVDSTDKADLRLIYLALAHMIKFRGHFLIEGDLNPDNSDVDKLFIQLVQTYNQLFEENPINASGVDAKAILSARLSKSRRLENLIAQLPGEKKNGLFGNLIALSLGLTPNFKSNFDLAEDAKLQLSKDTYDDDLDNLLAQIGDQYADLFLAAKNLSDAILLSDILRVNTEITKAPLSASMIKRYDEHHQDLTLLKALVRQQLPEKYKEIFFDQSKNGYAGYIDGGASQEEFYKFIKPILEKMDGTEELLVKLNREDLLRKQRTFDNGSIPHQIHLGELHAILRRQEDFYPFLKDNREKIEKILTFRIPYYVGPLARGNSRFAWMTRKSEETITPWNFEEVVDKGASAQSFIERMTNFDKNLPNEKVLPKHSLLYEYFTVYNELTKVKYVTEGMRKPAFLSGEQKKAIVDLLFKTNRKVTVKQLKEDYFKKIECFDSVEISGVEDRFNASLGTYHDLLKIIKDKDFLDNEENEDILEDIVLTLTLFEDREMIEERLKTYAHLFDDKVMKQLKRRRYTGWGRLSRKLINGIRDKQSGKTILDFLKSDGFANRNFMQLIHDDSLTFKEDIQKAQVSGQGDSLHEHIANLAGSPAIKKGILQTVKVVDELVKVMGRHKPENIVIEMARENQTTQKGQKNSRERMKRIEEGIKELGSQILKEHPVENTQLQNEKLYLYYLQNGRDMYVDQELDINRLSDYDVDHIVPQSFLKDDSIDNKVLTRSDKARGKSDNVPSEEVVKKMKNYWRQLLNAKLITQRKFDNLTKAERGGLSELDKAGFIKRQLVETRQITKHVAQILDSRMNTKYDENDKLIREVKVITLKSKLVSDFRKDFQFYKVREINNYHHAHDAYLNAVVGTALIKKYPKLESEFVYGDYKVYDVRKMIAKSEQEIGKATAKYFFYSNIMNFFKTEITLANGEIRKRPLIETNGETGEIVWDKGRDFATVRKVLSMPQVNIVKKTEVQTGGFSKESILPKRNSDKLIARKKDWDPKKYGGFDSPTVAYSVLVVAKVEKGKSKKLKSVKELLGITIMERSSFEKNPIDFLEAKGYKEVKKDLIIKLPKYSLFELENGRKRMLASAGELQKGNELALPSKYVNFLYLASHYEKLKGSPEDNEQKQLFVEQHKHYLDEIIEQISEFSKRVILADANLDKVLSAYNKHRDKPIREQAENIIHLFTLTNLGAPAAFKYFDTTIDRKRYTSTKEVLDATLIHQSITGLYETRIDLSQLGGDGGGSSGGSGGTLQLDDEYRLYSPLVKPDQNIQFWLEQFPQAWAETAGMGLAKQVPPQVIQLKASATPVSVRQYPLSKEAQEGIRPHVQRLIQQGILVPVQSPWNTPLLPVRKPGTNDYRPVQDLREVNKRVQDIHPTVPNPYNLLCALPPQRSWYTVLDLKDAFFCLRLHPTSQPLFAFEWRDPGTGRTGQLTWTRLPQGFKNSPTIFNEALHRDLANFRIQHPQVTLLQYVDDLLLAGATKQDCLEGTKALLLELSDLGYRASAKKAQICRREVTYLGYSLRDGQRWLTEARKKTVVQIPAPTTAKQVREFLGTAGFCRLWIPGFATLAAPLYPLTKPKGEFSWAPEHQKAFDAIKKALLSAPALALPDVTKPFTLYVDERKGVARGVLTQTLGPWRRPVAYLSKKLDPVASGWPVCLKAIAAVAILVKDADKLTLGQNITVIAPHALENIVRQPPDRWMTNARMTHYQSLLLTERVTFAPPAALNPATLLPEETDEPVTHDCHQLLIEETGVRKDLTDIPLTGEVLTWFTDGSSYVVEGKRMAGAAVVDGTRTIWASSLPEGTSAQKAELMALTQALRLAEGKSINIYTDSRYAFATAHVHGAIYKQRGWLTSAGREIKNKEEILSLLEALHLPKRLAIIHCPGHQKAKDPISRGNQMADRVAKQAAQGVNLLAGKRTADGSEFEKRTADGSEFESPKKKAKVE

SEQ ID NO: 166 - protein, 2084 aa, synthetic construct
MPAAKRVKLDGGDKKYSIGLDIGTNSVGWAVITDEYKVPSKKFKVLGNTDRHSIKKNLIGALLFDSGETAEATRLKRTARRRYTRRKNRICYLQEIFSNEMAKVDDSFFHRLEESFLVEEDKKHERHPIFGNIVDEVAYHEKYPTIYHLRKKLVDSTDKADLRLIYLALAHMIKFRGHFLIEGDLNPDNSDVDKLFIQLVQTYNQLFEENPINASGVDAKAILSARLSKSRRLENLIAQLPGEKKNGLFGNLIALSLGLTPNFKSNFDLAEDAKLQLSKDTYDDDLDNLLAQIGDQYADLFLAAKNLSDAILLSDILRVNTEITKAPLSASMIKRYDEHHQDLTLLKALVRQQLPEKYKEIFFDQSKNGYAGYIDGGASQEEFYKFIKPILEKMDGTEELLVKLNREDLLRKQRTFDNGSIPHQIHLGELHAILRRQEDFYPFLKDNREKIEKILTFRIPYYVGPLARGNSRFAWMTRKSEETITPWNFEEVVDKGASAQSFIERMTNFDKNLPNEKVLPKHSLLYEYFTVYNELTKVKYVTEGMRKPAFLSGEQKKAIVDLLFKTNRKVTVKQLKEDYFKKIECFDSVEISGVEDRFNASLGTYHDLLKIIKDKDFLDNEENEDILEDIVLTLTLFEDREMIEERLKTYAHLFDDKVMKQLKRRRYTGWGRLSRKLINGIRDKQSGKTILDFLKSDGFANRNFMQLIHDDSLTFKEDIQKAQVSGQGDSLHEHIANLAGSPAIKKGILQTVKVVDELVKVMGRHKPENIVIEMARENQTTQKGQKNSRERMKRIEEGIKELGSQILKEHPVENTQLQNEKLYLYYLQNGRDMYVDQELDINRLSDYDVDHIVPQSFLKDDSIDNKVLTRSDKARGKSDNVPSEEVVKKMKNYWRQLLNAKLITQRKFDNLTKAERGGLSELDKAGFIKRQLVETRQITKHVAQILDSRMNTKYDENDKLIREVKVITLKSKLVSDFRKDFQFYKVREINNYHHAHDAYLNAVVGTALIKKYPKLESEFVYGDYKVYDVRKMIAKSEQEIGKATAKYFFYSNIMNFFKTEITLANGEIRKRPLIETNGETGEIVWDKGRDFATVRKVLSMPQVNIVKKTEVQTGGFSKESILPKRNSDKLIARKKDWDPKKYGGFDSPTVAYSVLVVAKVEKGKSKKLKSVKELLGITIMERSSFEKNPIDFLEAKGYKEVKKDLIIKLPKYSLFELENGRKRMLASAGELQKGNELALPSKYVNFLYLASHYEKLKGSPEDNEQKQLFVEQHKHYLDEIIEQISEFSKRVILADANLDKVLSAYNKHRDKPIREQAENIIHLFTLTNLGAPAAFKYFDTTIDRKRYTSTKEVLDATLIHQSITGLYETRIDLSQLGGDGGGGGGGGGTLQLDDEYRLYSPLVKPDQNIQFWLEQFPQAWAETAGMGLAKQVPPQVIQLKASATPVSVRQYPLSKEAQEGIRPHVQRLIQQGILVPVQSPWNTPLLPVRKPGTNDYRPVQDLREVNKRVQDIHPTVPNPYNLLCALPPQRSWYTVLDLKDAFFCLRLHPTSQPLFAFEWRDPGTGRTGQLTWTRLPQGFKNSPTIFNEALHRDLANFRIQHPQVTLLQYVDDLLLAGATKQDCLEGTKALLLELSDLGYRASAKKAQICRREVTYLGYSLRDGQRWLTEARKKTVVQIPAPTTAKQVREFLGTAGFCRLWIPGFATLAAPLYPLTKPKGEFSWAPEHQKAFDAIKKALLSAPALALPDVTKPFTLYVDERKGVARGVLTQTLGPWRRPVAYLSKKLDPVASGWPVCLKAIAAVAILVKDADKLTLGQNITVIAPHALENIVRQPPDRWMTNARMTHYQSLLLTERVTFAPPAALNPATLLPEETDEPVTHDCHQLLIEETGVRKDLTDIPLTGEVLTWFTDGSSYVVEGKRMAGAAVVDGTRTIWASSLPEGTSAQKAELMALTQALRLAEGKSINIYTDSRYAFATAHVHGAIYKQRGWLTSAGREIKNKEEILSLLEALHLPKRLAIIHCPGHQKAKDPISRGNQMADRVAKQAAQGVNLLAGKRTADGSEFEKRTADGSEFESPKKKAKVE

SEQ ID NO: 167 - protein, 2088 aa, synthetic construct
MPAAKRVKLDGGDKKYSIGLDIGTNSVGWAVITDEYKVPSKKFKVLGNTDRHSIKKNLIGALLFDSGETAEATRLKRTARRRYTRRKNRICYLQEIFSNEMAKVDDSFFHRLEESFLVEEDKKHERHPIFGNIVDEVAYHEKYPTIYHLRKKLVDSTDKADLRLIYLALAHMIKFRGHFLIEGDLNPDNSDVDKLFIQLVQTYNQLFEENPINASGVDAKAILSARLSKSRRLENLIAQLPGEKKNGLFGNLIALSLGLTPNFKSNFDLAEDAKLQLSKDTYDDDLDNLLAQIGDQYADLFLAAKNLSDAILLSDILRVNTEITKAPLSASMIKRYDEHHQDLTLLKALVRQQLPEKYKEIFFDQSKNGYAGYIDGGASQEEFYKFIKPILEKMDGTEELLVKLNREDLLRKQRTFDNGSIPHQIHLGELHAILRRQEDFYPFLKDNREKIEKILTFRIPYYVGPLARGNSRFAWMTRKSEETITPWNFEEVVDKGASAQSFIERMTNFDKNLPNEKVLPKHSLLYEYFTVYNELTKVKYVTEGMRKPAFLSGEQKKAIVDLLFKTNRKVTVKQLKEDYFKKIECFDSVEISGVEDRFNASLGTYHDLLKIIKDKDFLDNEENEDILEDIVLTLTLFEDREMIEERLKTYAHLFDDKVMKQLKRRRYTGWGRLSRKLINGIRDKQSGKTILDFLKSDGFANRNFMQLIHDDSLTFKEDIQKAQVSGQGDSLHEHIANLAGSPAIKKGILQTVKVVDELVKVMGRHKPENIVIEMARENQTTQKGQKNSRERMKRIEEGIKELGSQILKEHPVENTQLQNEKLYLYYLQNGRDMYVDQELDINRLSDYDVDHIVPQSFLKDDSIDNKVLTRSDKARGKSDNVPSEEVVKKMKNYWRQLLNAKLITQRKFDNLTKAERGGLSELDKAGFIKRQLVETRQITKHVAQILDSRMNTKYDENDKLIREVKVITLKSKLVSDFRKDFQFYKVREINNYHHAHDAYLNAVVGTALIKKYPKLESEFVYGDYKVYDVRKMIAKSEQEIGKATAKYFFYSNIMNFFKTEITLANGEIRKRPLIETNGETGEIVWDKGRDFATVRKVLSMPQVNIVKKTEVQTGGFSKESILPKRNSDKLIARKKDWDPKKYGGFDSPTVAYSVLVVAKVEKGKSKKLKSVKELLGITIMERSSFEKNPIDFLEAKGYKEVKKDLIIKLPKYSLFELENGRKRMLASAGELQKGNELALPSKYVNFLYLASHYEKLKGSPEDNEQKQLFVEQHKHYLDEIIEQISEFSKRVILADANLDKVLSAYNKHRDKPIREQAENIIHLFTLTNLGAPAAFKYFDTTIDRKRYTSTKEVLDATLIHQSITGLYETRIDLSQLGGDGGPAPGGSGGGGGTLQLDDEYRLYSPLVKPDQNIQFWLEQFPQAWAETAGMGLAKQVPPQVIQLKASATPVSVRQYPLSKEAQEGIRPHVQRLIQQGILVPVQSPWNTPLLPVRKPGTNDYRPVQDLREVNKRVQDIHPTVPNPYNLLCALPPQRSWYTVLDLKDAFFCLRLHPTSQPLFAFEWRDPGTGRTGQLTWTRLPQGFKNSPTIFNEALHRDLANFRIQHPQVTLLQYVDDLLLAGATKQDCLEGTKALLLELSDLGYRASAKKAQICRREVTYLGYSLRDGQRWLTEARKKTVVQIPAPTTAKQVREFLGTAGFCRLWIPGFATLAAPLYPLTKPKGEFSWAPEHQKAFDAIKKALLSAPALALPDVTKPFTLYVDERKGVARGVLTQTLGPWRRPVAYLSKKLDPVASGWPVCLKAIAAVAILVKDADKLTLGQNITVIAPHALENIVRQPPDRWMTNARMTHYQSLLLTERVTFAPPAALNPATLLPEETDEPVTHDCHQLLIEETGVRKDLTDIPLTGEVLTWFTDGSSYVVEGKRMAGAAVVDGTRTIWASSLPEGTSAQKAELMALTQALRLAEGKSINIYTDSRYAFATAHVHGAIYKQRGWLTSAGREIKNKEEILSLLEALHLPKRLAIIHCPGHQKAKDPISRGNQMADRVAKQAAQGVNLLAGKRTADGSEFEKRTADGSEFESPKKKAKVE

SEQ ID NO: 168 - protein, 2090 aa, synthetic construct
MPAAKRVKLDGGDKKYSIGLDIGTNSVGWAVITDEYKVPSKKFKVLGNTDRHSIKKNLIGALLFDSGETAEATRLKRTARRRYTRRKNRICYLQEIFSNEMAKVDDSFFHRLEESFLVEEDKKHERHPIFGNIVDEVAYHEKYPTIYHLRKKLVDSTDKADLRLIYLALAHMIKFRGHFLIEGDLNPDNSDVDKLFIQLVQTYNQLFEENPINASGVDAKAILSARLSKSRRLENLIAQLPGEKKNGLFGNLIALSLGLTPNFKSNFDLAEDAKLQLSKDTYDDDLDNLLAQIGDQYADLFLAAKNLSDAILLSDILRVNTEITKAPLSASMIKRYDEHHQDLTLLKALVRQQLPEKYKEIFFDQSKNGYAGYIDGGASQEEFYKFIKPILEKMDGTEELLVKLNREDLLRKQRTFDNGSIPHQIHLGELHAILRRQEDFYPFLKDNREKIEKILTFRIPYYVGPLARGNSRFAWMTRKSEETITPWNFEEVVDKGASAQSFIERMTNFDKNLPNEKVLPKHSLLYEYFTVYNELTKVKYVTEGMRKPAFLSGEQKKAIVDLLFKTNRKVTVKQLKEDYFKKIECFDSVEISGVEDRFNASLGTYHDLLKIIKDKDFLDNEENEDILEDIVLTLTLFEDREMIEERLKTYAHLFDDKVMKQLKRRRYTGWGRLSRKLINGIRDKQSGKTILDFLKSDGFANRNFMQLIHDDSLTFKEDIQKAQVSGQGDSLHEHIANLAGSPAIKKGILQTVKVVDELVKVMGRHKPENIVIEMARENQTTQKGQKNSRERMKRIEEGIKELGSQILKEHPVENTQLQNEKLYLYYLQNGRDMYVDQELDINRLSDYDVDHIVPQSFLKDDSIDNKVLTRSDKARGKSDNVPSEEVVKKMKNYWRQLLNAKLITQRKFDNLTKAERGGLSELDKAGFIKRQLVETRQITKHVAQILDSRMNTKYDENDKLIREVKVITLKSKLVSDFRKDFQFYKVREINNYHHAHDAYLNAVVGTALIKKYPKLESEFVYGDYKVYDVRKMIAKSEQEIGKATAKYFFYSNIMNFFKTEITLANGEIRKRPLIETNGETGEIVWDKGRDFATVRKVLSMPQVNIVKKTEVQTGGFSKESILPKRNSDKLIARKKDWDPKKYGGFDSPTVAYSVLVVAKVEKGKSKKLKSVKELLGITIMERSSFEKNPIDFLEAKGYKEVKKDLIIKLPKYSLFELENGRKRMLASAGELQKGNELALPSKYVNFLYLASHYEKLKGSPEDNEQKQLFVEQHKHYLDEIIEQISEFSKRVILADANLDKVLSAYNKHRDKPIREQAENIIHLFTLTNLGAPAAFKYFDTTIDRKRYTSTKEVLDATLIHQSITGLYETRIDLSQLGGDGGEAAAKPAPGGSGGTLQLDDEYRLYSPLVKPDQNIQFWLEQFPQAWAETAGMGLAKQVPPQVIQLKASATPVSVRQYPLSKEAQEGIRPHVQRLIQQGILVPVQSPWNTPLLPVRKPGTNDYRPVQDLREVNKRVQDIHPTVPNPYNLLCALPPQRSWYTVLDLKDAFFCLRLHPTSQPLFAFEWRDPGTGRTGQLTWTRLPQGFKNSPTIFNEALHRDLANFRIQHPQVTLLQYVDDLLLAGATKQDCLEGTKALLLELSDLGYRASAKKAQICRREVTYLGYSLRDGQRWLTEARKKTVVQIPAPTTAKQVREFLGTAGFCRLWIPGFATLAAPLYPLTKPKGEFSWAPEHQKAFDAIKKALLSAPALALPDVTKPFTLYVDERKGVARGVLTQTLGPWRRPVAYLSKKLDPVASGWPVCLKAIAAVAILVKDADKLTLGQNITVIAPHALENIVRQPPDRWMTNARMTHYQSLLLTERVTFAPPAALNPATLLPEETDEPVTHDCHQLLIEETGVRKDLTDIPLTGEVLTWFTDGSSYVVEGKRMAGAAVVDGTRTIWASSLPEGTSAQKAELMALTQALRLAEGKSINIYTDSRYAFATAHVHGAIYKQRGWLTSAGREIKNKEEILSLLEALHLPKRLAIIHCPGHQKAKDPISRGNQMADRVAKQAAQGVNLLAGKRTADGSEFEKRTADGSEFESPKKKAKVE

SEQ ID NO: 169 - protein, 2088 aa, synthetic construct
MPAAKRVKLDGGDKKYSIGLDIGTNSVGWAVITDEYKVPSKKFKVLGNTDRHSIKKNLIGALLFDSGETAEATRLKRTARRRYTRRKNRICYLQEIFSNEMAKVDDSFFHRLEESFLVEEDKKHERHPIFGNIVDEVAYHEKYPTIYHLRKKLVDSTDKADLRLIYLALAHMIKFRGHFLIEGDLNPDNSDVDKLFIQLVQTYNQLFEENPINASGVDAKAILSARLSKSRRLENLIAQLPGEKKNGLFGNLIALSLGLTPNFKSNFDLAEDAKLQLSKDTYDDDLDNLLAQIGDQYADLFLAAKNLSDAILLSDILRVNTEITKAPLSASMIKRYDEHHQDLTLLKALVRQQLPEKYKEIFFDQSKNGYAGYIDGGASQEEFYKFIKPILEKMDGTEELLVKLNREDLLRKQRTFDNGSIPHQIHLGELHAILRRQEDFYPFLKDNREKIEKILTFRIPYYVGPLARGNSRFAWMTRKSEETITPWNFEEVVDKGASAQSFIERMTNFDKNLPNEKVLPKHSLLYEYFTVYNELTKVKYVTEGMRKPAFLSGEQKKAIVDLLFKTNRKVTVKQLKEDYFKKIECFDSVEISGVEDRFNASLGTYHDLLKIIKDKDFLDNEENEDILEDIVLTLTLFEDREMIEERLKTYAHLFDDKVMKQLKRRRYTGWGRLSRKLINGIRDKQSGKTILDFLKSDGFANRNFMQLIHDDSLTFKEDIQKAQVSGQGDSLHEHIANLAGSPAIKKGILQTVKVVDELVKVMGRHKPENIVIEMARENQTTQKGQKNSRERMKRIEEGIKELGSQILKEHPVENTQLQNEKLYLYYLQNGRDMYVDQELDINRLSDYDVDHIVPQSFLKDDSIDNKVLTRSDKARGKSDNVPSEEVVKKMKNYWRQLLNAKLITQRKFDNLTKAERGGLSELDKAGFIKRQLVETRQITKHVAQILDSRMNTKYDENDKLIREVKVITLKSKLVSDFRKDFQFYKVREINNYHHAHDAYLNAVVGTALIKKYPKLESEFVYGDYKVYDVRKMIAKSEQEIGKATAKYFFYSNIMNFFKTEITLANGEIRKRPLIETNGETGEIVWDKGRDFATVRKVLSMPQVNIVKKTEVQTGGFSKESILPKRNSDKLIARKKDWDPKKYGGFDSPTVAYSVLVVAKVEKGKSKKLKSVKELLGITIMERSSFEKNPIDFLEAKGYKEVKKDLIIKLPKYSLFELENGRKRMLASAGELQKGNELALPSKYVNFLYLASHYEKLKGSPEDNEQKQLFVEQHKHYLDEIIEQISEFSKRVILADANLDKVLSAYNKHRDKPIREQAENIIHLFTLTNLGAPAAFKYFDTTIDRKRYTSTKEVLDATLIHQSITGLYETRIDLSQLGGDGGGGGPAPGGSGGTLQLDDEYRLYSPLVKPDQNIQFWLEQFPQAWAETAGMGLAKQVPPQVIQLKASATPVSVRQYPLSKEAQEGIRPHVQRLIQQGILVPVQSPWNTPLLPVRKPGTNDYRPVQDLREVNKRVQDIHPTVPNPYNLLCALPPQRSWYTVLDLKDAFFCLRLHPTSQPLFAFEWRDPGTGRTGQLTWTRLPQGFKNSPTIFNEALHRDLANFRIQHPQVTLLQYVDDLLLAGATKQDCLEGTKALLLELSDLGYRASAKKAQICRREVTYLGYSLRDGQRWLTEARKKTVVQIPAPTTAKQVREFLGTAGFCRLWIPGFATLAAPLYPLTKPKGEFSWAPEHQKAFDAIKKALLSAPALALPDVTKPFTLYVDERKGVARGVLTQTLGPWRRPVAYLSKKLDPVASGWPVCLKAIAAVAILVKDADKLTLGQNITVIAPHALENIVRQPPDRWMTNARMTHYQSLLLTERVTFAPPAALNPATLLPEETDEPVTHDCHQLLIEETGVRKDLTDIPLTGEVLTWFTDGSSYVVEGKRMAGAAVVDGTRTIWASSLPEGTSAQKAELMALTQALRLAEGKSINIYTDSRYAFATAHVHGAIYKQRGWLTSAGREIKNKEEILSLLEALHLPKRLAIIHCPGHQKAKDPISRGNQMADRVAKQAAQGVNLLAGKRTADGSEFEKRTADGSEFESPKKKAKVE

SEQ ID NO: 170 - protein, 2090 aa, synthetic construct
MPAAKRVKLDGGDKKYSIGLDIGTNSVGWAVITDEYKVPSKKFKVLGNTDRHSIKKNLIGALLFDSGETAEATRLKRTARRRYTRRKNRICYLQEIFSNEMAKVDDSFFHRLEESFLVEEDKKHERHPIFGNIVDEVAYHEKYPTIYHLRKKLVDSTDKADLRLIYLALAHMIKFRGHFLIEGDLNPDNSDVDKLFIQLVQTYNQLFEENPINASGVDAKAILSARLSKSRRLENLIAQLPGEKKNGLFGNLIALSLGLTPNFKSNFDLAEDAKLQLSKDTYDDDLDNLLAQIGDQYADLFLAAKNLSDAILLSDILRVNTEITKAPLSASMIKRYDEHHQDLTLLKALVRQQLPEKYKEIFFDQSKNGYAGYIDGGASQEEFYKFIKPILEKMDGTEELLVKLNREDLLRKQRTFDNGSIPHQIHLGELHAILRRQEDFYPFLKDNREKIEKILTFRIPYYVGPLARGNSRFAWMTRKSEETITPWNFEEVVDKGASAQSFIERMTNFDKNLPNEKVLPKHSLLYEYFTVYNELTKVKYVTEGMRKPAFLSGEQKKAIVDLLFKTNRKVTVKQLKEDYFKKIECFDSVEISGVEDRFNASLGTYHDLLKIIKDKDFLDNEENEDILEDIVLTLTLFEDREMIEERLKTYAHLFDDKVMKQLKRRRYTGWGRLSRKLINGIRDKQSGKTILDFLKSDGFANRNFMQLIHDDSLTFKEDIQKAQVSGQGDSLHEHIANLAGSPAIKKGILQTVKVVDELVKVMGRHKPENIVIEMARENQTTQKGQKNSRERMKRIEEGIKELGSQILKEHPVENTQLQNEKLYLYYLQNGRDMYVDQELDINRLSDYDVDHIVPQSFLKDDSIDNKVLTRSDKARGKSDNVPSEEVVKKMKNYWRQLLNAKLITQRKFDNLTKAERGGLSELDKAGFIKRQLVETRQITKHVAQILDSRMNTKYDENDKLIREVKVITLKSKLVSDFRKDFQFYKVREINNYHHAHDAYLNAVVGTALIKKYPKLESEFVYGDYKVYDVRKMIAKSEQEIGKATAKYFFYSNIMNFFKTEITLANGEIRKRPLIETNGETGEIVWDKGRDFATVRKVLSMPQVNIVKKTEVQTGGFSKESILPKRNSDKLIARKKDWDPKKYGGFDSPTVAYSVLVVAKVEKGKSKKLKSVKELLGITIMERSSFEKNPIDFLEAKGYKEVKKDLIIKLPKYSLFELENGRKRMLASAGELQKGNELALPSKYVNFLYLASHYEKLKGSPEDNEQKQLFVEQHKHYLDEIIEQISEFSKRVILADANLDKVLSAYNKHRDKPIREQAENIIHLFTLTNLGAPAAFKYFDTTIDRKRYTSTKEVLDATLIHQSITGLYETRIDLSQLGGDGGGSSGGSEAAAKGGTLQLDDEYRLYSPLVKPDQNIQFWLEQFPQAWAETAGMGLAKQVPPQVIQLKASATPVSVRQYPLSKEAQEGIRPHVQRLIQQGILVPVQSPWNTPLLPVRKPGTNDYRPVQDLREVNKRVQDIHPTVPNPYNLLCALPPQRSWYTVLDLKDAFFCLRLHPTSQPLFAFEWRDPGTGRTGQLTWTRLPQGFKNSPTIFNEALHRDLANFRIQHPQVTLLQYVDDLLLAGATKQDCLEGTKALLLELSDLGYRASAKKAQICRREVTYLGYSLRDGQRWLTEARKKTVVQIPAPTTAKQVREFLGTAGFCRLWIPGFATLAAPLYPLTKPKGEFSWAPEHQKAFDAIKKALLSAPALALPDVTKPFTLYVDERKGVARGVLTQTLGPWRRPVAYLSKKLDPVASGWPVCLKAIAAVAILVKDADKLTLGQNITVIAPHALENIVRQPPDRWMTNARMTHYQSLLLTERVTFAPPAALNPATLLPEETDEPVTHDCHQLLIEETGVRKDLTDIPLTGEVLTWFTDGSSYVVEGKRMAGAAVVDGTRTIWASSLPEGTSAQKAELMALTQALRLAEGKSINIYTDSRYAFATAHVHGAIYKQRGWLTSAGREIKNKEEILSLLEALHLPKRLAIIHCPGHQKAKDPISRGNQMADRVAKQAAQGVNLLAGKRTADGSEFEKRTADGSEFESPKKKAKVE

SEQ ID NO: 171 - protein, 2088 aa, synthetic construct
MPAAKRVKLDGGDKKYSIGLDIGTNSVGWAVITDEYKVPSKKFKVLGNTDRHSIKKNLIGALLFDSGETAEATRLKRTARRRYTRRKNRICYLQEIFSNEMAKVDDSFFHRLEESFLVEEDKKHERHPIFGNIVDEVAYHEKYPTIYHLRKKLVDSTDKADLRLIYLALAHMIKFRGHFLIEGDLNPDNSDVDKLFIQLVQTYNQLFEENPINASGVDAKAILSARLSKSRRLENLIAQLPGEKKNGLFGNLIALSLGLTPNFKSNFDLAEDAKLQLSKDTYDDDLDNLLAQIGDQYADLFLAAKNLSDAILLSDILRVNTEITKAPLSASMIKRYDEHHQDLTLLKALVRQQLPEKYKEIFFDQSKNGYAGYIDGGASQEEFYKFIKPILEKMDGTEELLVKLNREDLLRKQRTFDNGSIPHQIHLGELHAILRRQEDFYPFLKDNREKIEKILTFRIPYYVGPLARGNSRFAWMTRKSEETITPWNFEEVVDKGASAQSFIERMTNFDKNLPNEKVLPKHSLLYEYFTVYNELTKVKYVTEGMRKPAFLSGEQKKAIVDLLFKTNRKVTVKQLKEDYFKKIECFDSVEISGVEDRFNASLGTYHDLLKIIKDKDFLDNEENEDILEDIVLTLTLFEDREMIEERLKTYAHLFDDKVMKQLKRRRYTGWGRLSRKLINGIRDKQSGKTILDFLKSDGFANRNFMQLIHDDSLTFKEDIQKAQVSGQGDSLHEHIANLAGSPAIKKGILQTVKVVDELVKVMGRHKPENIVIEMARENQTTQKGQKNSRERMKRIEEGIKELGSQILKEHPVENTQLQNEKLYLYYLQNGRDMYVDQELDINRLSDYDVDHIVPQSFLKDDSIDNKVLTRSDKARGKSDNVPSEEVVKKMKNYWRQLLNAKLITQRKFDNLTKAERGGLSELDKAGFIKRQLVETRQITKHVAQILDSRMNTKYDENDKLIREVKVITLKSKLVSDFRKDFQFYKVREINNYHHAHDAYLNAVVGTALIKKYPKLESEFVYGDYKVYDVRKMIAKSEQEIGKATAKYFFYSNIMNFFKTEITLANGEIRKRPLIETNGETGEIVWDKGRDFATVRKVLSMPQVNIVKKTEVQTGGFSKESILPKRNSDKLIARKKDWDPKKYGGFDSPTVAYSVLVVAKVEKGKSKKLKSVKELLGITIMERSSFEKNPIDFLEAKGYKEVKKDLIIKLPKYSLFELENGRKRMLASAGELQKGNELALPSKYVNFLYLASHYEKLKGSPEDNEQKQLFVEQHKHYLDEIIEQISEFSKRVILADANLDKVLSAYNKHRDKPIREQAENIIHLFTLTNLGAPAAFKYFDTTIDRKRYTSTKEVLDATLIHQSITGLYETRIDLSQLGGDGGGSSPAPGGSGGTLQLDDEYRLYSPLVKPDQNIQFWLEQFPQAWAETAGMGLAKQVPPQVIQLKASATPVSVRQYPLSKEAQEGIRPHVQRLIQQGILVPVQSPWNTPLLPVRKPGTNDYRPVQDLREVNKRVQDIHPTVPNPYNLLCALPPQRSWYTVLDLKDAFFCLRLHPTSQPLFAFEWRDPGTGRTGQLTWTRLPQGFKNSPTIFNEALHRDLANFRIQHPQVTLLQYVDDLLLAGATKQDCLEGTKALLLELSDLGYRASAKKAQICRREVTYLGYSLRDGQRWLTEARKKTVVQIPAPTTAKQVREFLGTAGFCRLWIPGFATLAAPLYPLTKPKGEFSWAPEHQKAFDAIKKALLSAPALALPDVTKPFTLYVDERKGVARGVLTQTLGPWRRPVAYLSKKLDPVASGWPVCLKAIAAVAILVKDADKLTLGQNITVIAPHALENIVRQPPDRWMTNARMTHYQSLLLTERVTFAPPAALNPATLLPEETDEPVTHDCHQLLIEETGVRKDLTDIPLTGEVLTWFTDGSSYVVEGKRMAGAAVVDGTRTIWASSLPEGTSAQKAELMALTQALRLAEGKSINIYTDSRYAFATAHVHGAIYKQRGWLTSAGREIKNKEEILSLLEALHLPKRLAIIHCPGHQKAKDPISRGNQMADRVAKQAAQGVNLLAGKRTADGSEFEKRTADGSEFESPKKKAKVE

SEQ ID NO: 172 - protein, 2090 aa, synthetic construct
MPAAKRVKLDGGDKKYSIGLDIGTNSVGWAVITDEYKVPSKKFKVLGNTDRHSIKKNLIGALLFDSGETAEATRLKRTARRRYTRRKNRICYLQEIFSNEMAKVDDSFFHRLEESFLVEEDKKHERHPIFGNIVDEVAYHEKYPTIYHLRKKLVDSTDKADLRLIYLALAHMIKFRGHFLIEGDLNPDNSDVDKLFIQLVQTYNQLFEENPINASGVDAKAILSARLSKSRRLENLIAQLPGEKKNGLFGNLIALSLGLTPNFKSNFDLAEDAKLQLSKDTYDDDLDNLLAQIGDQYADLFLAAKNLSDAILLSDILRVNTEITKAPLSASMIKRYDEHHQDLTLLKALVRQQLPEKYKEIFFDQSKNGYAGYIDGGASQEEFYKFIKPILEKMDGTEELLVKLNREDLLRKQRTFDNGSIPHQIHLGELHAILRRQEDFYPFLKDNREKIEKILTFRIPYYVGPLARGNSRFAWMTRKSEETITPWNFEEVVDKGASAQSFIERMTNFDKNLPNEKVLPKHSLLYEYFTVYNELTKVKYVTEGMRKPAFLSGEQKKAIVDLLFKTNRKVTVKQLKEDYFKKIECFDSVEISGVEDRFNASLGTYHDLLKIIKDKDFLDNEENEDILEDIVLTLTLFEDREMIEERLKTYAHLFDDKVMKQLKRRRYTGWGRLSRKLINGIRDKQSGKTILDFLKSDGFANRNFMQLIHDDSLTFKEDIQKAQVSGQGDSLHEHIANLAGSPAIKKGILQTVKVVDELVKVMGRHKPENIVIEMARENQTTQKGQKNSRERMKRIEEGIKELGSQILKEHPVENTQLQNEKLYLYYLQNGRDMYVDQELDINRLSDYDVDHIVPQSFLKDDSIDNKVLTRSDKARGKSDNVPSEEVVKKMKNYWRQLLNAKLITQRKFDNLTKAERGGLSELDKAGFIKRQLVETRQITKHVAQILDSRMNTKYDENDKLIREVKVITLKSKLVSDFRKDFQFYKVREINNYHHAHDAYLNAVVGTALIKKYPKLESEFVYGDYKVYDVRKMIAKSEQEIGKATAKYFFYSNIMNFFKTEITLANGEIRKRPLIETNGETGEIVWDKGRDFATVRKVLSMPQVNIVKKTEVQTGGFSKESILPKRNSDKLIARKKDWDPKKYGGFDSPTVAYSVLVVAKVEKGKSKKLKSVKELLGITIMERSSFEKNPIDFLEAKGYKEVKKDLIIKLPKYSLFELENGRKRMLASAGELQKGNELALPSKYVNFLYLASHYEKLKGSPEDNEQKQLFVEQHKHYLDEIIEQISEFSKRVILADANLDKVLSAYNKHRDKPIREQAENIIHLFTLTNLGAPAAFKYFDTTIDRKRYTSTKEVLDATLIHQSITGLYETRIDLSQLGGDGGGGSGGGEAAAKGGTLQLDDEYRLYSPLVKPDQNIQFWLEQFPQAWAETAGMGLAKQVPPQVIQLKASATPVSVRQYPLSKEAQEGIRPHVQRLIQQGILVPVQSPWNTPLLPVRKPGTNDYRPVQDLREVNKRVQDIHPTVPNPYNLLCALPPQRSWYTVLDLKDAFFCLRLHPTSQPLFAFEWRDPGTGRTGQLTWTRLPQGFKNSPTIFNEALHRDLANFRIQHPQVTLLQYVDDLLLAGATKQDCLEGTKALLLELSDLGYRASAKKAQICRREVTYLGYSLRDGQRWLTEARKKTVVQIPAPTTAKQVREFLGTAGFCRLWIPGFATLAAPLYPLTKPKGEFSWAPEHQKAFDAIKKALLSAPALALPDVTKPFTLYVDERKGVARGVLTQTLGPWRRPVAYLSKKLDPVASGWPVCLKAIAAVAILVKDADKLTLGQNITVIAPHALENIVRQPPDRWMTNARMTHYQSLLLTERVTFAPPAALNPATLLPEETDEPVTHDCHQLLIEETGVRKDLTDIPLTGEVLTWFTDGSSYVVEGKRMAGAAVVDGTRTIWASSLPEGTSAQKAELMALTQALRLAEGKSINIYTDSRYAFATAHVHGAIYKQRGWLTSAGREIKNKEEILSLLEALHLPKRLAIIHCPGHQKAKDPISRGNQMADRVAKQAAQGVNLLAGKRTADGSEFEKRTADGSEFESPKKKAKVE

SEQ ID NO: 173 - protein, 2088 aa, synthetic construct
MPAAKRVKLDGGDKKYSIGLDIGTNSVGWAVITDEYKVPSKKFKVLGNTDRHSIKKNLIGALLFDSGETAEATRLKRTARRRYTRRKNRICYLQEIFSNEMAKVDDSFFHRLEESFLVEEDKKHERHPIFGNIVDEVAYHEKYPTIYHLRKKLVDSTDKADLRLIYLALAHMIKFRGHFLIEGDLNPDNSDVDKLFIQLVQTYNQLFEENPINASGVDAKAILSARLSKSRRLENLIAQLPGEKKNGLFGNLIALSLGLTPNFKSNFDLAEDAKLQLSKDTYDDDLDNLLAQIGDQYADLFLAAKNLSDAILLSDILRVNTEITKAPLSASMIKRYDEHHQDLTLLKALVRQQLPEKYKEIFFDQSKNGYAGYIDGGASQEEFYKFIKPILEKMDGTEELLVKLNREDLLRKQRTFDNGSIPHQIHLGELHAILRRQEDFYPFLKDNREKIEKILTFRIPYYVGPLARGNSRFAWMTRKSEETITPWNFEEVVDKGASAQSFIERMTNFDKNLPNEKVLPKHSLLYEYFTVYNELTKVKYVTEGMRKPAFLSGEQKKAIVDLLFKTNRKVTVKQLKEDYFKKIECFDSVEISGVEDRFNASLGTYHDLLKIIKDKDFLDNEENEDILEDIVLTLTLFEDREMIEERLKTYAHLFDDKVMKQLKRRRYTGWGRLSRKLINGIRDKQSGKTILDFLKSDGFANRNFMQLIHDDSLTFKEDIQKAQVSGQGDSLHEHIANLAGSPAIKKGILQTVKVVDELVKVMGRHKPENIVIEMARENQTTQKGQKNSRERMKRIEEGIKELGSQILKEHPVENTQLQNEKLYLYYLQNGRDMYVDQELDINRLSDYDVDHIVPQSFLKDDSIDNKVLTRSDKARGKSDNVPSEEVVKKMKNYWRQLLNAKLITQRKFDNLTKAERGGLSELDKAGFIKRQLVETRQITKHVAQILDSRMNTKYDENDKLIREVKVITLKSKLVSDFRKDFQFYKVREINNYHHAHDAYLNAVVGTALIKKYPKLESEFVYGDYKVYDVRKMIAKSEQEIGKATAKYFFYSNIMNFFKTEITLANGEIRKRPLIETNGETGEIVWDKGRDFATVRKVLSMPQVNIVKKTEVQTGGFSKESILPKRNSDKLIARKKDWDPKKYGGFDSPTVAYSVLVVAKVEKGKSKKLKSVKELLGITIMERSSFEKNPIDFLEAKGYKEVKKDLIIKLPKYSLFELENGRKRMLASAGELQKGNELALPSKYVNFLYLASHYEKLKGSPEDNEQKQLFVEQHKHYLDEIIEQISEFSKRVILADANLDKVLSAYNKHRDKPIREQAENIIHLFTLTNLGAPAAFKYFDTTIDRKRYTSTKEVLDATLIHQSITGLYETRIDLSQLGGDGGPAPGGGGGSGGTLQLDDEYRLYSPLVKPDQNIQFWLEQFPQAWAETAGMGLAKQVPPQVIQLKASATPVSVRQYPLSKEAQEGIRPHVQRLIQQGILVPVQSPWNTPLLPVRKPGTNDYRPVQDLREVNKRVQDIHPTVPNPYNLLCALPPQRSWYTVLDLKDAFFCLRLHPTSQPLFAFEWRDPGTGRTGQLTWTRLPQGFKNSPTIFNEALHRDLANFRIQHPQVTLLQYVDDLLLAGATKQDCLEGTKALLLELSDLGYRASAKKAQICRREVTYLGYSLRDGQRWLTEARKKTVVQIPAPTTAKQVREFLGTAGFCRLWIPGFATLAAPLYPLTKPKGEFSWAPEHQKAFDAIKKALLSAPALALPDVTKPFTLYVDERKGVARGVLTQTLGPWRRPVAYLSKKLDPVASGWPVCLKAIAAVAILVKDADKLTLGQNITVIAPHALENIVRQPPDRWMTNARMTHYQSLLLTERVTFAPPAALNPATLLPEETDEPVTHDCHQLLIEETGVRKDLTDIPLTGEVLTWFTDGSSYVVEGKRMAGAAVVDGTRTIWASSLPEGTSAQKAELMALTQALRLAEGKSINIYTDSRYAFATAHVHGAIYKQRGWLTSAGREIKNKEEILSLLEALHLPKRLAIIHCPGHQKAKDPISRGNQMADRVAKQAAQGVNLLAGKRTADGSEFEKRTADGSEFESPKKKAKVE

SEQ ID NO: 174 - protein, 2085 aa, synthetic construct
MPAAKRVKLDGGDKKYSIGLDIGTNSVGWAVITDEYKVPSKKFKVLGNTDRHSIKKNLIGALLFDSGETAEATRLKRTARRRYTRRKNRICYLQEIFSNEMAKVDDSFFHRLEESFLVEEDKKHERHPIFGNIVDEVAYHEKYPTIYHLRKKLVDSTDKADLRLIYLALAHMIKFRGHFLIEGDLNPDNSDVDKLFIQLVQTYNQLFEENPINASGVDAKAILSARLSKSRRLENLIAQLPGEKKNGLFGNLIALSLGLTPNFKSNFDLAEDAKLQLSKDTYDDDLDNLLAQIGDQYADLFLAAKNLSDAILLSDILRVNTEITKAPLSASMIKRYDEHHQDLTLLKALVRQQLPEKYKEIFFDQSKNGYAGYIDGGASQEEFYKFIKPILEKMDGTEELLVKLNREDLLRKQRTFDNGSIPHQIHLGELHAILRRQEDFYPFLKDNREKIEKILTFRIPYYVGPLARGNSRFAWMTRKSEETITPWNFEEVVDKGASAQSFIERMTNFDKNLPNEKVLPKHSLLYEYFTVYNELTKVKYVTEGMRKPAFLSGEQKKAIVDLLFKTNRKVTVKQLKEDYFKKIECFDSVEISGVEDRFNASLGTYHDLLKIIKDKDFLDNEENEDILEDIVLTLTLFEDREMIEERLKTYAHLFDDKVMKQLKRRRYTGWGRLSRKLINGIRDKQSGKTILDFLKSDGFANRNFMQLIHDDSLTFKEDIQKAQVSGQGDSLHEHIANLAGSPAIKKGILQTVKVVDELVKVMGRHKPENIVIEMARENQTTQKGQKNSRERMKRIEEGIKELGSQILKEHPVENTQLQNEKLYLYYLQNGRDMYVDQELDINRLSDYDVDHIVPQSFLKDDSIDNKVLTRSDKARGKSDNVPSEEVVKKMKNYWRQLLNAKLITQRKFDNLTKAERGGLSELDKAGFIKRQLVETRQITKHVAQILDSRMNTKYDENDKLIREVKVITLKSKLVSDFRKDFQFYKVREINNYHHAHDAYLNAVVGTALIKKYPKLESEFVYGDYKVYDVRKMIAKSEQEIGKATAKYFFYSNIMNFFKTEITLANGEIRKRPLIETNGETGEIVWDKGRDFATVRKVLSMPQVNIVKKTEVQTGGFSKESILPKRNSDKLIARKKDWDPKKYGGFDSPTVAYSVLVVAKVEKGKSKKLKSVKELLGITIMERSSFEKNPIDFLEAKGYKEVKKDLIIKLPKYSLFELENGRKRMLASAGELQKGNELALPSKYVNFLYLASHYEKLKGSPEDNEQKQLFVEQHKHYLDEIIEQISEFSKRVILADANLDKVLSAYNKHRDKPIREQAENIIHLFTLTNLGAPAAFKYFDTTIDRKRYTSTKEVLDATLIHQSITGLYETRIDLSQLGGDGGGSSGGGGGTLQLDDEYRLYSPLVKPDQNIQFWLEQFPQAWAETAGMGLAKQVPPQVIQLKASATPVSVRQYPLSKEAQEGIRPHVQRLIQQGILVPVQSPWNTPLLPVRKPGTNDYRPVQDLREVNKRVQDIHPTVPNPYNLLCALPPQRSWYTVLDLKDAFFCLRLHPTSQPLFAFEWRDPGTGRTGQLTWTRLPQGFKNSPTIFNEALHRDLANFRIQHPQVTLLQYVDDLLLAGATKQDCLEGTKALLLELSDLGYRASAKKAQICRREVTYLGYSLRDGQRWLTEARKKTVVQIPAPTTAKQVREFLGTAGFCRLWIPGFATLAAPLYPLTKPKGEFSWAPEHQKAFDAIKKALLSAPALALPDVTKPFTLYVDERKGVARGVLTQTLGPWRRPVAYLSKKLDPVASGWPVCLKAIAAVAILVKDADKLTLGQNITVIAPHALENIVRQPPDRWMTNARMTHYQSLLLTERVTFAPPAALNPATLLPEETDEPVTHDCHQLLIEETGVRKDLTDIPLTGEVLTWFTDGSSYVVEGKRMAGAAVVDGTRTIWASSLPEGTSAQKAELMALTQALRLAEGKSINIYTDSRYAFATAHVHGAIYKQRGWLTSAGREIKNKEEILSLLEALHLPKRLAIIHCPGHQKAKDPISRGNQMADRVAKQAAQGVNLLAGKRTADGSEFEKRTADGSEFESPKKKAKVE

SEQ ID NO: 175 - protein, 2088 aa, synthetic construct
MPAAKRVKLDGGDKKYSIGLDIGTNSVGWAVITDEYKVPSKKFKVLGNTDRHSIKKNLIGALLFDSGETAEATRLKRTARRRYTRRKNRICYLQEIFSNEMAKVDDSFFHRLEESFLVEEDKKHERHPIFGNIVDEVAYHEKYPTIYHLRKKLVDSTDKADLRLIYLALAHMIKFRGHFLIEGDLNPDNSDVDKLFIQLVQTYNQLFEENPINASGVDAKAILSARLSKSRRLENLIAQLPGEKKNGLFGNLIALSLGLTPNFKSNFDLAEDAKLQLSKDTYDDDLDNLLAQIGDQYADLFLAAKNLSDAILLSDILRVNTEITKAPLSASMIKRYDEHHQDLTLLKALVRQQLPEKYKEIFFDQSKNGYAGYIDGGASQEEFYKFIKPILEKMDGTEELLVKLNREDLLRKQRTFDNGSIPHQIHLGELHAILRRQEDFYPFLKDNREKIEKILTFRIPYYVGPLARGNSRFAWMTRKSEETITPWNFEEVVDKGASAQSFIERMTNFDKNLPNEKVLPKHSLLYEYFTVYNELTKVKYVTEGMRKPAFLSGEQKKAIVDLLFKTNRKVTVKQLKEDYFKKIECFDSVEISGVEDRFNASLGTYHDLLKIIKDKDFLDNEENEDILEDIVLTLTLFEDREMIEERLKTYAHLFDDKVMKQLKRRRYTGWGRLSRKLINGIRDKQSGKTILDFLKSDGFANRNFMQLIHDDSLTFKEDIQKAQVSGQGDSLHEHIANLAGSPAIKKGILQTVKVVDELVKVMGRHKPENIVIEMARENQTTQKGQKNSRERMKRIEEGIKELGSQILKEHPVENTQLQNEKLYLYYLQNGRDMYVDQELDINRLSDYDVDHIVPQSFLKDDSIDNKVLTRSDKARGKSDNVPSEEVVKKMKNYWRQLLNAKLITQRKFDNLTKAERGGLSELDKAGFIKRQLVETRQITKHVAQILDSRMNTKYDENDKLIREVKVITLKSKLVSDFRKDFQFYKVREINNYHHAHDAYLNAVVGTALIKKYPKLESEFVYGDYKVYDVRKMIAKSEQEIGKATAKYFFYSNIMNFFKTEITLANGEIRKRPLIETNGETGEIVWDKGRDFATVRKVLSMPQVNIVKKTEVQTGGFSKESILPKRNSDKLIARKKDWDPKKYGGFDSPTVAYSVLVVAKVEKGKSKKLKSVKELLGITIMERSSFEKNPIDFLEAKGYKEVKKDLIIKLPKYSLFELENGRKRMLASAGELQKGNELALPSKYVNFLYLASHYEKLKGSPEDNEQKQLFVEQHKHYLDEIIEQISEFSKRVILADANLDKVLSAYNKHRDKPIREQAENIIHLFTLTNLGAPAAFKYFDTTIDRKRYTSTKEVLDATLIHQSITGLYETRIDLSQLGGDGGGGSPAPGSSGGTLQLDDEYRLYSPLVKPDQNIQFWLEQFPQAWAETAGMGLAKQVPPQVIQLKASATPVSVRQYPLSKEAQEGIRPHVQRLIQQGILVPVQSPWNTPLLPVRKPGTNDYRPVQDLREVNKRVQDIHPTVPNPYNLLCALPPQRSWYTVLDLKDAFFCLRLHPTSQPLFAFEWRDPGTGRTGQLTWTRLPQGFKNSPTIFNEALHRDLANFRIQHPQVTLLQYVDDLLLAGATKQDCLEGTKALLLELSDLGYRASAKKAQICRREVTYLGYSLRDGQRWLTEARKKTVVQIPAPTTAKQVREFLGTAGFCRLWIPGFATLAAPLYPLTKPKGEFSWAPEHQKAFDAIKKALLSAPALALPDVTKPFTLYVDERKGVARGVLTQTLGPWRRPVAYLSKKLDPVASGWPVCLKAIAAVAILVKDADKLTLGQNITVIAPHALENIVRQPPDRWMTNARMTHYQSLLLTERVTFAPPAALNPATLLPEETDEPVTHDCHQLLIEETGVRKDLTDIPLTGEVLTWFTDGSSYVVEGKRMAGAAVVDGTRTIWASSLPEGTSAQKAELMALTQALRLAEGKSINIYTDSRYAFATAHVHGAIYKQRGWLTSAGREIKNKEEILSLLEALHLPKRLAIIHCPGHQKAKDPISRGNQMADRVAKQAAQGVNLLAGKRTADGSEFEKRTADGSEFESPKKKAKVE

SEQ ID NO: 176 - protein, 2085 aa, synthetic construct
MPAAKRVKLDGGDKKYSIGLDIGTNSVGWAVITDEYKVPSKKFKVLGNTDRHSIKKNLIGALLFDSGETAEATRLKRTARRRYTRRKNRICYLQEIFSNEMAKVDDSFFHRLEESFLVEEDKKHERHPIFGNIVDEVAYHEKYPTIYHLRKKLVDSTDKADLRLIYLALAHMIKFRGHFLIEGDLNPDNSDVDKLFIQLVQTYNQLFEENPINASGVDAKAILSARLSKSRRLENLIAQLPGEKKNGLFGNLIALSLGLTPNFKSNFDLAEDAKLQLSKDTYDDDLDNLLAQIGDQYADLFLAAKNLSDAILLSDILRVNTEITKAPLSASMIKRYDEHHQDLTLLKALVRQQLPEKYKEIFFDQSKNGYAGYIDGGASQEEFYKFIKPILEKMDGTEELLVKLNREDLLRKQRTFDNGSIPHQIHLGELHAILRRQEDFYPFLKDNREKIEKILTFRIPYYVGPLARGNSRFAWMTRKSEETITPWNFEEVVDKGASAQSFIERMTNFDKNLPNEKVLPKHSLLYEYFTVYNELTKVKYVTEGMRKPAFLSGEQKKAIVDLLFKTNRKVTVKQLKEDYFKKIECFDSVEISGVEDRFNASLGTYHDLLKIIKDKDFLDNEENEDILEDIVLTLTLFEDREMIEERLKTYAHLFDDKVMKQLKRRRYTGWGRLSRKLINGIRDKQSGKTILDFLKSDGFANRNFMQLIHDDSLTFKEDIQKAQVSGQGDSLHEHIANLAGSPAIKKGILQTVKVVDELVKVMGRHKPENIVIEMARENQTTQKGQKNSRERMKRIEEGIKELGSQILKEHPVENTQLQNEKLYLYYLQNGRDMYVDQELDINRLSDYDVDHIVPQSFLKDDSIDNKVLTRSDKARGKSDNVPSEEVVKKMKNYWRQLLNAKLITQRKFDNLTKAERGGLSELDKAGFIKRQLVETRQITKHVAQILDSRMNTKYDENDKLIREVKVITLKSKLVSDFRKDFQFYKVREINNYHHAHDAYLNAVVGTALIKKYPKLESEFVYGDYKVYDVRKMIAKSEQEIGKATAKYFFYSNIMNFFKTEITLANGEIRKRPLIETNGETGEIVWDKGRDFATVRKVLSMPQVNIVKKTEVQTGGFSKESILPKRNSDKLIARKKDWDPKKYGGFDSPTVAYSVLVVAKVEKGKSKKLKSVKELLGITIMERSSFEKNPIDFLEAKGYKEVKKDLIIKLPKYSLFELENGRKRMLASAGELQKGNELALPSKYVNFLYLASHYEKLKGSPEDNEQKQLFVEQHKHYLDEIIEQISEFSKRVILADANLDKVLSAYNKHRDKPIREQAENIIHLFTLTNLGAPAAFKYFDTTIDRKRYTSTKEVLDATLIHQSITGLYETRIDLSQLGGDGGGGSGSSGGTLQLDDEYRLYSPLVKPDQNIQFWLEQFPQAWAETAGMGLAKQVPPQVIQLKASATPVSVRQYPLSKEAQEGIRPHVQRLIQQGILVPVQSPWNTPLLPVRKPGTNDYRPVQDLREVNKRVQDIHPTVPNPYNLLCALPPQRSWYTVLDLKDAFFCLRLHPTSQPLFAFEWRDPGTGRTGQLTWTRLPQGFKNSPTIFNEALHRDLANFRIQHPQVTLLQYVDDLLLAGATKQDCLEGTKALLLELSDLGYRASAKKAQICRREVTYLGYSLRDGQRWLTEARKKTVVQIPAPTTAKQVREFLGTAGFCRLWIPGFATLAAPLYPLTKPKGEFSWAPEHQKAFDAIKKALLSAPALALPDVTKPFTLYVDERKGVARGVLTQTLGPWRRPVAYLSKKLDPVASGWPVCLKAIAAVAILVKDADKLTLGQNITVIAPHALENIVRQPPDRWMTNARMTHYQSLLLTERVTFAPPAALNPATLLPEETDEPVTHDCHQLLIEETGVRKDLTDIPLTGEVLTWFTDGSSYVVEGKRMAGAAVVDGTRTIWASSLPEGTSAQKAELMALTQALRLAEGKSINIYTDSRYAFATAHVHGAIYKQRGWLTSAGREIKNKEEILSLLEALHLPKRLAIIHCPGHQKAKDPISRGNQMADRVAKQAAQGVNLLAGKRTADGSEFEKRTADGSEFESPKKKAKVE

SEQ ID NO: 177 - protein, 2082 aa, synthetic construct
MPAAKRVKLDGGDKKYSIGLDIGTNSVGWAVITDEYKVPSKKFKVLGNTDRHSIKKNLIGALLFDSGETAEATRLKRTARRRYTRRKNRICYLQEIFSNEMAKVDDSFFHRLEESFLVEEDKKHERHPIFGNIVDEVAYHEKYPTIYHLRKKLVDSTDKADLRLIYLALAHMIKFRGHFLIEGDLNPDNSDVDKLFIQLVQTYNQLFEENPINASGVDAKAILSARLSKSRRLENLIAQLPGEKKNGLFGNLIALSLGLTPNFKSNFDLAEDAKLQLSKDTYDDDLDNLLAQIGDQYADLFLAAKNLSDAILLSDILRVNTEITKAPLSASMIKRYDEHHQDLTLLKALVRQQLPEKYKEIFFDQSKNGYAGYIDGGASQEEFYKFIKPILEKMDGTEELLVKLNREDLLRKQRTFDNGSIPHQIHLGELHAILRRQEDFYPFLKDNREKIEKILTFRIPYYVGPLARGNSRFAWMTRKSEETITPWNFEEVVDKGASAQSFIERMTNFDKNLPNEKVLPKHSLLYEYFTVYNELTKVKYVTEGMRKPAFLSGEQKKAIVDLLFKTNRKVTVKQLKEDYFKKIECFDSVEISGVEDRFNASLGTYHDLLKIIKDKDFLDNEENEDILEDIVLTLTLFEDREMIEERLKTYAHLFDDKVMKQLKRRRYTGWGRLSRKLINGIRDKQSGKTILDFLKSDGFANRNFMQLIHDDSLTFKEDIQKAQVSGQGDSLHEHIANLAGSPAIKKGILQTVKVVDELVKVMGRHKPENIVIEMARENQTTQKGQKNSRERMKRIEEGIKELGSQILKEHPVENTQLQNEKLYLYYLQNGRDMYVDQELDINRLSDYDVDHIVPQSFLKDDSIDNKVLTRSDKARGKSDNVPSEEVVKKMKNYWRQLLNAKLITQRKFDNLTKAERGGLSELDKAGFIKRQLVETRQITKHVAQILDSRMNTKYDENDKLIREVKVITLKSKLVSDFRKDFQFYKVREINNYHHAHDAYLNAVVGTALIKKYPKLESEFVYGDYKVYDVRKMIAKSEQEIGKATAKYFFYSNIMNFFKTEITLANGEIRKRPLIETNGETGEIVWDKGRDFATVRKVLSMPQVNIVKKTEVQTGGFSKESILPKRNSDKLIARKKDWDPKKYGGFDSPTVAYSVLVVAKVEKGKSKKLKSVKELLGITIMERSSFEKNPIDFLEAKGYKEVKKDLIIKLPKYSLFELENGRKRMLASAGELQKGNELALPSKYVNFLYLASHYEKLKGSPEDNEQKQLFVEQHKHYLDEIIEQISEFSKRVILADANLDKVLSAYNKHRDKPIREQAENIIHLFTLTNLGAPAAFKYFDTTIDRKRYTSTKEVLDATLIHQSITGLYETRIDLSQLGGDGGPAPGGTLQLDDEYRLYSPLVKPDQNIQFWLEQFPQAWAETAGMGLAKQVPPQVIQLKASATPVSVRQYPLSKEAQEGIRPHVQRLIQQGILVPVQSPWNTPLLPVRKPGTNDYRPVQDLREVNKRVQDIHPTVPNPYNLLCALPPQRSWYTVLDLKDAFFCLRLHPTSQPLFAFEWRDPGTGRTGQLTWTRLPQGFKNSPTIFNEALHRDLANFRIQHPQVTLLQYVDDLLLAGATKQDCLEGTKALLLELSDLGYRASAKKAQICRREVTYLGYSLRDGQRWLTEARKKTVVQIPAPTTAKQVREFLGTAGFCRLWIPGFATLAAPLYPLTKPKGEFSWAPEHQKAFDAIKKALLSAPALALPDVTKPFTLYVDERKGVARGVLTQTLGPWRRPVAYLSKKLDPVASGWPVCLKAIAAVAILVKDADKLTLGQNITVIAPHALENIVRQPPDRWMTNARMTHYQSLLLTERVTFAPPAALNPATLLPEETDEPVTHDCHQLLIEETGVRKDLTDIPLTGEVLTWFTDGSSYVVEGKRMAGAAVVDGTRTIWASSLPEGTSAQKAELMALTQALRLAEGKSINIYTDSRYAFATAHVHGAIYKQRGWLTSAGREIKNKEEILSLLEALHLPKRLAIIHCPGHQKAKDPISRGNQMADRVAKQAAQGVNLLAGKRTADGSEFEKRTADGSEFESPKKKAKVE

SEQ ID NO: 178 - protein, 2085 aa, synthetic construct
MPAAKRVKLDGGDKKYSIGLDIGTNSVGWAVITDEYKVPSKKFKVLGNTDRHSIKKNLIGALLFDSGETAEATRLKRTARRRYTRRKNRICYLQEIFSNEMAKVDDSFFHRLEESFLVEEDKKHERHPIFGNIVDEVAYHEKYPTIYHLRKKLVDSTDKADLRLIYLALAHMIKFRGHFLIEGDLNPDNSDVDKLFIQLVQTYNQLFEENPINASGVDAKAILSARLSKSRRLENLIAQLPGEKKNGLFGNLIALSLGLTPNFKSNFDLAEDAKLQLSKDTYDDDLDNLLAQIGDQYADLFLAAKNLSDAILLSDILRVNTEITKAPLSASMIKRYDEHHQDLTLLKALVRQQLPEKYKEIFFDQSKNGYAGYIDGGASQEEFYKFIKPILEKMDGTEELLVKLNREDLLRKQRTFDNGSIPHQIHLGELHAILRRQEDFYPFLKDNREKIEKILTFRIPYYVGPLARGNSRFAWMTRKSEETITPWNFEEVVDKGASAQSFIERMTNFDKNLPNEKVLPKHSLLYEYFTVYNELTKVKYVTEGMRKPAFLSGEQKKAIVDLLFKTNRKVTVKQLKEDYFKKIECFDSVEISGVEDRFNASLGTYHDLLKIIKDKDFLDNEENEDILEDIVLTLTLFEDREMIEERLKTYAHLFDDKVMKQLKRRRYTGWGRLSRKLINGIRDKQSGKTILDFLKSDGFANRNFMQLIHDDSLTFKEDIQKAQVSGQGDSLHEHIANLAGSPAIKKGILQTVKVVDELVKVMGRHKPENIVIEMARENQTTQKGQKNSRERMKRIEEGIKELGSQILKEHPVENTQLQNEKLYLYYLQNGRDMYVDQELDINRLSDYDVDHIVPQSFLKDDSIDNKVLTRSDKARGKSDNVPSEEVVKKMKNYWRQLLNAKLITQRKFDNLTKAERGGLSELDKAGFIKRQLVETRQITKHVAQILDSRMNTKYDENDKLIREVKVITLKSKLVSDFRKDFQFYKVREINNYHHAHDAYLNAVVGTALIKKYPKLESEFVYGDYKVYDVRKMIAKSEQEIGKATAKYFFYSNIMNFFKTEITLANGEIRKRPLIETNGETGEIVWDKGRDFATVRKVLSMPQVNIVKKTEVQTGGFSKESILPKRNSDKLIARKKDWDPKKYGGFDSPTVAYSVLVVAKVEKGKSKKLKSVKELLGITIMERSSFEKNPIDFLEAKGYKEVKKDLIIKLPKYSLFELENGRKRMLASAGELQKGNELALPSKYVNFLYLASHYEKLKGSPEDNEQKQLFVEQHKHYLDEIIEQISEFSKRVILADANLDKVLSAYNKHRDKPIREQAENIIHLFTLTNLGAPAAFKYFDTTIDRKRYTSTKEVLDATLIHQSITGLYETRIDLSQLGGDGGGSSGSSGGTLQLDDEYRLYSPLVKPDQNIQFWLEQFPQAWAETAGMGLAKQVPPQVIQLKASATPVSVRQYPLSKEAQEGIRPHVQRLIQQGILVPVQSPWNTPLLPVRKPGTNDYRPVQDLREVNKRVQDIHPTVPNPYNLLCALPPQRSWYTVLDLKDAFFCLRLHPTSQPLFAFEWRDPGTGRTGQLTWTRLPQGFKNSPTIFNEALHRDLANFRIQHPQVTLLQYVDDLLLAGATKQDCLEGTKALLLELSDLGYRASAKKAQICRREVTYLGYSLRDGQRWLTEARKKTVVQIPAPTTAKQVREFLGTAGFCRLWIPGFATLAAPLYPLTKPKGEFSWAPEHQKAFDAIKKALLSAPALALPDVTKPFTLYVDERKGVARGVLTQTLGPWRRPVAYLSKKLDPVASGWPVCLKAIAAVAILVKDADKLTLGQNITVIAPHALENIVRQPPDRWMTNARMTHYQSLLLTERVTFAPPAALNPATLLPEETDEPVTHDCHQLLIEETGVRKDLTDIPLTGEVLTWFTDGSSYVVEGKRMAGAAVVDGTRTIWASSLPEGTSAQKAELMALTQALRLAEGKSINIYTDSRYAFATAHVHGAIYKQRGWLTSAGREIKNKEEILSLLEALHLPKRLAIIHCPGHQKAKDPISRGNQMADRVAKQAAQGVNLLAGKRTADGSEFEKRTADGSEFESPKKKAKVE

SEQ ID NO: 179 - protein, 2085 aa, synthetic construct
MPAAKRVKLDGGDKKYSIGLDIGTNSVGWAVITDEYKVPSKKFKVLGNTDRHSIKKNLIGALLFDSGETAEATRLKRTARRRYTRRKNRICYLQEIFSNEMAKVDDSFFHRLEESFLVEEDKKHERHPIFGNIVDEVAYHEKYPTIYHLRKKLVDSTDKADLRLIYLALAHMIKFRGHFLIEGDLNPDNSDVDKLFIQLVQTYNQLFEENPINASGVDAKAILSARLSKSRRLENLIAQLPGEKKNGLFGNLIALSLGLTPNFKSNFDLAEDAKLQLSKDTYDDDLDNLLAQIGDQYADLFLAAKNLSDAILLSDILRVNTEITKAPLSASMIKRYDEHHQDLTLLKALVRQQLPEKYKEIFFDQSKNGYAGYIDGGASQEEFYKFIKPILEKMDGTEELLVKLNREDLLRKQRTFDNGSIPHQIHLGELHAILRRQEDFYPFLKDNREKIEKILTFRIPYYVGPLARGNSRFAWMTRKSEETITPWNFEEVVDKGASAQSFIERMTNFDKNLPNEKVLPKHSLLYEYFTVYNELTKVKYVTEGMRKPAFLSGEQKKAIVDLLFKTNRKVTVKQLKEDYFKKIECFDSVEISGVEDRFNASLGTYHDLLKIIKDKDFLDNEENEDILEDIVLTLTLFEDREMIEERLKTYAHLFDDKVMKQLKRRRYTGWGRLSRKLINGIRDKQSGKTILDFLKSDGFANRNFMQLIHDDSLTFKEDIQKAQVSGQGDSLHEHIANLAGSPAIKKGILQTVKVVDELVKVMGRHKPENIVIEMARENQTTQKGQKNSRERMKRIEEGIKELGSQILKEHPVENTQLQNEKLYLYYLQNGRDMYVDQELDINRLSDYDVDHIVPQSFLKDDSIDNKVLTRSDKARGKSDNVPSEEVVKKMKNYWRQLLNAKLITQRKFDNLTKAERGGLSELDKAGFIKRQLVETRQITKHVAQILDSRMNTKYDENDKLIREVKVITLKSKLVSDFRKDFQFYKVREINNYHHAHDAYLNAVVGTALIKKYPKLESEFVYGDYKVYDVRKMIAKSEQEIGKATAKYFFYSNIMNFFKTEITLANGEIRKRPLIETNGETGEIVWDKGRDFATVRKVLSMPQVNIVKKTEVQTGGFSKESILPKRNSDKLIARKKDWDPKKYGGFDSPTVAYSVLVVAKVEKGKSKKLKSVKELLGITIMERSSFEKNPIDFLEAKGYKEVKKDLIIKLPKYSLFELENGRKRMLASAGELQKGNELALPSKYVNFLYLASHYEKLKGSPEDNEQKQLFVEQHKHYLDEIIEQISEFSKRVILADANLDKVLSAYNKHRDKPIREQAENIIHLFTLTNLGAPAAFKYFDTTIDRKRYTSTKEVLDATLIHQSITGLYETRIDLSQLGGDGGGGGGGSGGTLQLDDEYRLYSPLVKPDQNIQFWLEQFPQAWAETAGMGLAKQVPPQVIQLKASATPVSVRQYPLSKEAQEGIRPHVQRLIQQGILVPVQSPWNTPLLPVRKPGTNDYRPVQDLREVNKRVQDIHPTVPNPYNLLCALPPQRSWYTVLDLKDAFFCLRLHPTSQPLFAFEWRDPGTGRTGQLTWTRLPQGFKNSPTIFNEALHRDLANFRIQHPQVTLLQYVDDLLLAGATKQDCLEGTKALLLELSDLGYRASAKKAQICRREVTYLGYSLRDGQRWLTEARKKTVVQIPAPTTAKQVREFLGTAGFCRLWIPGFATLAAPLYPLTKPKGEFSWAPEHQKAFDAIKKALLSAPALALPDVTKPFTLYVDERKGVARGVLTQTLGPWRRPVAYLSKKLDPVASGWPVCLKAIAAVAILVKDADKLTLGQNITVIAPHALENIVRQPPDRWMTNARMTHYQSLLLTERVTFAPPAALNPATLLPEETDEPVTHDCHQLLIEETGVRKDLTDIPLTGEVLTWFTDGSSYVVEGKRMAGAAVVDGTRTIWASSLPEGTSAQKAELMALTQALRLAEGKSINIYTDSRYAFATAHVHGAIYKQRGWLTSAGREIKNKEEILSLLEALHLPKRLAIIHCPGHQKAKDPISRGNQMADRVAKQAAQGVNLLAGKRTADGSEFEKRTADGSEFESPKKKAKVE

SEQ ID NO: 180 - protein, 2088 aa, synthetic construct
MPAAKRVKLDGGDKKYSIGLDIGTNSVGWAVITDEYKVPSKKFKVLGNTDRHSIKKNLIGALLFDSGETAEATRLKRTARRRYTRRKNRICYLQEIFSNEMAKVDDSFFHRLEESFLVEEDKKHERHPIFGNIVDEVAYHEKYPTIYHLRKKLVDSTDKADLRLIYLALAHMIKFRGHFLIEGDLNPDNSDVDKLFIQLVQTYNQLFEENPINASGVDAKAILSARLSKSRRLENLIAQLPGEKKNGLFGNLIALSLGLTPNFKSNFDLAEDAKLQLSKDTYDDDLDNLLAQIGDQYADLFLAAKNLSDAILLSDILRVNTEITKAPLSASMIKRYDEHHQDLTLLKALVRQQLPEKYKEIFFDQSKNGYAGYIDGGASQEEFYKFIKPILEKMDGTEELLVKLNREDLLRKQRTFDNGSIPHQIHLGELHAILRRQEDFYPFLKDNREKIEKILTFRIPYYVGPLARGNSRFAWMTRKSEETITPWNFEEVVDKGASAQSFIERMTNFDKNLPNEKVLPKHSLLYEYFTVYNELTKVKYVTEGMRKPAFLSGEQKKAIVDLLFKTNRKVTVKQLKEDYFKKIECFDSVEISGVEDRFNASLGTYHDLLKIIKDKDFLDNEENEDILEDIVLTLTLFEDREMIEERLKTYAHLFDDKVMKQLKRRRYTGWGRLSRKLINGIRDKQSGKTILDFLKSDGFANRNFMQLIHDDSLTFKEDIQKAQVSGQGDSLHEHIANLAGSPAIKKGILQTVKVVDELVKVMGRHKPENIVIEMARENQTTQKGQKNSRERMKRIEEGIKELGSQILKEHPVENTQLQNEKLYLYYLQNGRDMYVDQELDINRLSDYDVDHIVPQSFLKDDSIDNKVLTRSDKARGKSDNVPSEEVVKKMKNYWRQLLNAKLITQRKFDNLTKAERGGLSELDKAGFIKRQLVETRQITKHVAQILDSRMNTKYDENDKLIREVKVITLKSKLVSDFRKDFQFYKVREINNYHHAHDAYLNAVVGTALIKKYPKLESEFVYGDYKVYDVRKMIAKSEQEIGKATAKYFFYSNIMNFFKTEITLANGEIRKRPLIETNGETGEIVWDKGRDFATVRKVLSMPQVNIVKKTEVQTGGFSKESILPKRNSDKLIARKKDWDPKKYGGFDSPTVAYSVLVVAKVEKGKSKKLKSVKELLGITIMERSSFEKNPIDFLEAKGYKEVKKDLIIKLPKYSLFELENGRKRMLASAGELQKGNELALPSKYVNFLYLASHYEKLKGSPEDNEQKQLFVEQHKHYLDEIIEQISEFSKRVILADANLDKVLSAYNKHRDKPIREQAENIIHLFTLTNLGAPAAFKYFDTTIDRKRYTSTKEVLDATLIHQSITGLYETRIDLSQLGGDGGGGGGSSGGSGGTLQLDDEYRLYSPLVKPDQNIQFWLEQFPQAWAETAGMGLAKQVPPQVIQLKASATPVSVRQYPLSKEAQEGIRPHVQRLIQQGILVPVQSPWNTPLLPVRKPGTNDYRPVQDLREVNKRVQDIHPTVPNPYNLLCALPPQRSWYTVLDLKDAFFCLRLHPTSQPLFAFEWRDPGTGRTGQLTWTRLPQGFKNSPTIFNEALHRDLANFRIQHPQVTLLQYVDDLLLAGATKQDCLEGTKALLLELSDLGYRASAKKAQICRREVTYLGYSLRDGQRWLTEARKKTVVQIPAPTTAKQVREFLGTAGFCRLWIPGFATLAAPLYPLTKPKGEFSWAPEHQKAFDAIKKALLSAPALALPDVTKPFTLYVDERKGVARGVLTQTLGPWRRPVAYLSKKLDPVASGWPVCLKAIAAVAILVKDADKLTLGQNITVIAPHALENIVRQPPDRWMTNARMTHYQSLLLTERVTFAPPAALNPATLLPEETDEPVTHDCHQLLIEETGVRKDLTDIPLTGEVLTWFTDGSSYVVEGKRMAGAAVVDGTRTIWASSLPEGTSAQKAELMALTQALRLAEGKSINIYTDSRYAFATAHVHGAIYKQRGWLTSAGREIKNKEEILSLLEALHLPKRLAIIHCPGHQKAKDPISRGNQMADRVAKQAAQGVNLLAGKRTADGSEFEKRTADGSEFESPKKKAKVE

SEQ ID NO: 181 - protein, 2088 aa, synthetic construct
MPAAKRVKLDGGDKKYSIGLDIGTNSVGWAVITDEYKVPSKKFKVLGNTDRHSIKKNLIGALLFDSGETAEATRLKRTARRRYTRRKNRICYLQEIFSNEMAKVDDSFFHRLEESFLVEEDKKHERHPIFGNIVDEVAYHEKYPTIYHLRKKLVDSTDKADLRLIYLALAHMIKFRGHFLIEGDLNPDNSDVDKLFIQLVQTYNQLFEENPINASGVDAKAILSARLSKSRRLENLIAQLPGEKKNGLFGNLIALSLGLTPNFKSNFDLAEDAKLQLSKDTYDDDLDNLLAQIGDQYADLFLAAKNLSDAILLSDILRVNTEITKAPLSASMIKRYDEHHQDLTLLKALVRQQLPEKYKEIFFDQSKNGYAGYIDGGASQEEFYKFIKPILEKMDGTEELLVKLNREDLLRKQRTFDNGSIPHQIHLGELHAILRRQEDFYPFLKDNREKIEKILTFRIPYYVGPLARGNSRFAWMTRKSEETITPWNFEEVVDKGASAQSFIERMTNFDKNLPNEKVLPKHSLLYEYFTVYNELTKVKYVTEGMRKPAFLSGEQKKAIVDLLFKTNRKVTVKQLKEDYFKKIECFDSVEISGVEDRFNASLGTYHDLLKIIKDKDFLDNEENEDILEDIVLTLTLFEDREMIEERLKTYAHLFDDKVMKQLKRRRYTGWGRLSRKLINGIRDKQSGKTILDFLKSDGFANRNFMQLIHDDSLTFKEDIQKAQVSGQGDSLHEHIANLAGSPAIKKGILQTVKVVDELVKVMGRHKPENIVIEMARENQTTQKGQKNSRERMKRIEEGIKELGSQILKEHPVENTQLQNEKLYLYYLQNGRDMYVDQELDINRLSDYDVDHIVPQSFLKDDSIDNKVLTRSDKARGKSDNVPSEEVVKKMKNYWRQLLNAKLITQRKFDNLTKAERGGLSELDKAGFIKRQLVETRQITKHVAQILDSRMNTKYDENDKLIREVKVITLKSKLVSDFRKDFQFYKVREINNYHHAHDAYLNAVVGTALIKKYPKLESEFVYGDYKVYDVRKMIAKSEQEIGKATAKYFFYSNIMNFFKTEITLANGEIRKRPLIETNGETGEIVWDKGRDFATVRKVLSMPQVNIVKKTEVQTGGFSKESILPKRNSDKLIARKKDWDPKKYGGFDSPTVAYSVLVVAKVEKGKSKKLKSVKELLGITIMERSSFEKNPIDFLEAKGYKEVKKDLIIKLPKYSLFELENGRKRMLASAGELQKGNELALPSKYVNFLYLASHYEKLKGSPEDNEQKQLFVEQHKHYLDEIIEQISEFSKRVILADANLDKVLSAYNKHRDKPIREQAENIIHLFTLTNLGAPAAFKYFDTTIDRKRYTSTKEVLDATLIHQSITGLYETRIDLSQLGGDGGGSSGSSGSSGGTLQLDDEYRLYSPLVKPDQNIQFWLEQFPQAWAETAGMGLAKQVPPQVIQLKASATPVSVRQYPLSKEAQEGIRPHVQRLIQQGILVPVQSPWNTPLLPVRKPGTNDYRPVQDLREVNKRVQDIHPTVPNPYNLLCALPPQRSWYTVLDLKDAFFCLRLHPTSQPLFAFEWRDPGTGRTGQLTWTRLPQGFKNSPTIFNEALHRDLANFRIQHPQVTLLQYVDDLLLAGATKQDCLEGTKALLLELSDLGYRASAKKAQICRREVTYLGYSLRDGQRWLTEARKKTVVQIPAPTTAKQVREFLGTAGFCRLWIPGFATLAAPLYPLTKPKGEFSWAPEHQKAFDAIKKALLSAPALALPDVTKPFTLYVDERKGVARGVLTQTLGPWRRPVAYLSKKLDPVASGWPVCLKAIAAVAILVKDADKLTLGQNITVIAPHALENIVRQPPDRWMTNARMTHYQSLLLTERVTFAPPAALNPATLLPEETDEPVTHDCHQLLIEETGVRKDLTDIPLTGEVLTWFTDGSSYVVEGKRMAGAAVVDGTRTIWASSLPEGTSAQKAELMALTQALRLAEGKSINIYTDSRYAFATAHVHGAIYKQRGWLTSAGREIKNKEEILSLLEALHLPKRLAIIHCPGHQKAKDPISRGNQMADRVAKQAAQGVNLLAGKRTADGSEFEKRTADGSEFESPKKKAKVE

SEQ ID NO: 182 - protein, 2088 aa, synthetic construct
MPAAKRVKLDGGDKKYSIGLDIGTNSVGWAVITDEYKVPSKKFKVLGNTDRHSIKKNLIGALLFDSGETAEATRLKRTARRRYTRRKNRICYLQEIFSNEMAKVDDSFFHRLEESFLVEEDKKHERHPIFGNIVDEVAYHEKYPTIYHLRKKLVDSTDKADLRLIYLALAHMIKFRGHFLIEGDLNPDNSDVDKLFIQLVQTYNQLFEENPINASGVDAKAILSARLSKSRRLENLIAQLPGEKKNGLFGNLIALSLGLTPNFKSNFDLAEDAKLQLSKDTYDDDLDNLLAQIGDQYADLFLAAKNLSDAILLSDILRVNTEITKAPLSASMIKRYDEHHQDLTLLKALVRQQLPEKYKEIFFDQSKNGYAGYIDGGASQEEFYKFIKPILEKMDGTEELLVKLNREDLLRKQRTFDNGSIPHQIHLGELHAILRRQEDFYPFLKDNREKIEKILTFRIPYYVGPLARGNSRFAWMTRKSEETITPWNFEEVVDKGASAQSFIERMTNFDKNLPNEKVLPKHSLLYEYFTVYNELTKVKYVTEGMRKPAFLSGEQKKAIVDLLFKTNRKVTVKQLKEDYFKKIECFDSVEISGVEDRFNASLGTYHDLLKIIKDKDFLDNEENEDILEDIVLTLTLFEDREMIEERLKTYAHLFDDKVMKQLKRRRYTGWGRLSRKLINGIRDKQSGKTILDFLKSDGFANRNFMQLIHDDSLTFKEDIQKAQVSGQGDSLHEHIANLAGSPAIKKGILQTVKVVDELVKVMGRHKPENIVIEMARENQTTQKGQKNSRERMKRIEEGIKELGSQILKEHPVENTQLQNEKLYLYYLQNGRDMYVDQELDINRLSDYDVDHIVPQSFLKDDSIDNKVLTRSDKARGKSDNVPSEEVVKKMKNYWRQLLNAKLITQRKFDNLTKAERGGLSELDKAGFIKRQLVETRQITKHVAQILDSRMNTKYDENDKLIREVKVITLKSKLVSDFRKDFQFYKVREINNYHHAHDAYLNAVVGTALIKKYPKLESEFVYGDYKVYDVRKMIAKSEQEIGKATAKYFFYSNIMNFFKTEITLANGEIRKRPLIETNGETGEIVWDKGRDFATVRKVLSMPQVNIVKKTEVQTGGFSKESILPKRNSDKLIARKKDWDPKKYGGFDSPTVAYSVLVVAKVEKGKSKKLKSVKELLGITIMERSSFEKNPIDFLEAKGYKEVKKDLIIKLPKYSLFELENGRKRMLASAGELQKGNELALPSKYVNFLYLASHYEKLKGSPEDNEQKQLFVEQHKHYLDEIIEQISEFSKRVILADANLDKVLSAYNKHRDKPIREQAENIIHLFTLTNLGAPAAFKYFDTTIDRKRYTSTKEVLDATLIHQSITGLYETRIDLSQLGGDGGGSSGGSGGGGGTLQLDDEYRLYSPLVKPDQNIQFWLEQFPQAWAETAGMGLAKQVPPQVIQLKASATPVSVRQYPLSKEAQEGIRPHVQRLIQQGILVPVQSPWNTPLLPVRKPGTNDYRPVQDLREVNKRVQDIHPTVPNPYNLLCALPPQRSWYTVLDLKDAFFCLRLHPTSQPLFAFEWRDPGTGRTGQLTWTRLPQGFKNSPTIFNEALHRDLANFRIQHPQVTLLQYVDDLLLAGATKQDCLEGTKALLLELSDLGYRASAKKAQICRREVTYLGYSLRDGQRWLTEARKKTVVQIPAPTTAKQVREFLGTAGFCRLWIPGFATLAAPLYPLTKPKGEFSWAPEHQKAFDAIKKALLSAPALALPDVTKPFTLYVDERKGVARGVLTQTLGPWRRPVAYLSKKLDPVASGWPVCLKAIAAVAILVKDADKLTLGQNITVIAPHALENIVRQPPDRWMTNARMTHYQSLLLTERVTFAPPAALNPATLLPEETDEPVTHDCHQLLIEETGVRKDLTDIPLTGEVLTWFTDGSSYVVEGKRMAGAAVVDGTRTIWASSLPEGTSAQKAELMALTQALRLAEGKSINIYTDSRYAFATAHVHGAIYKQRGWLTSAGREIKNKEEILSLLEALHLPKRLAIIHCPGHQKAKDPISRGNQMADRVAKQAAQGVNLLAGKRTADGSEFEKRTADGSEFESPKKKAKVE

SEQ ID NO: 183 - protein, 2085 aa, synthetic construct
MPAAKRVKLDGGDKKYSIGLDIGTNSVGWAVITDEYKVPSKKFKVLGNTDRHSIKKNLIGALLFDSGETAEATRLKRTARRRYTRRKNRICYLQEIFSNEMAKVDDSFFHRLEESFLVEEDKKHERHPIFGNIVDEVAYHEKYPTIYHLRKKLVDSTDKADLRLIYLALAHMIKFRGHFLIEGDLNPDNSDVDKLFIQLVQTYNQLFEENPINASGVDAKAILSARLSKSRRLENLIAQLPGEKKNGLFGNLIALSLGLTPNFKSNFDLAEDAKLQLSKDTYDDDLDNLLAQIGDQYADLFLAAKNLSDAILLSDILRVNTEITKAPLSASMIKRYDEHHQDLTLLKALVRQQLPEKYKEIFFDQSKNGYAGYIDGGASQEEFYKFIKPILEKMDGTEELLVKLNREDLLRKQRTFDNGSIPHQIHLGELHAILRRQEDFYPFLKDNREKIEKILTFRIPYYVGPLARGNSRFAWMTRKSEETITPWNFEEVVDKGASAQSFIERMTNFDKNLPNEKVLPKHSLLYEYFTVYNELTKVKYVTEGMRKPAFLSGEQKKAIVDLLFKTNRKVTVKQLKEDYFKKIECFDSVEISGVEDRFNASLGTYHDLLKIIKDKDFLDNEENEDILEDIVLTLTLFEDREMIEERLKTYAHLFDDKVMKQLKRRRYTGWGRLSRKLINGIRDKQSGKTILDFLKSDGFANRNFMQLIHDDSLTFKEDIQKAQVSGQGDSLHEHIANLAGSPAIKKGILQTVKVVDELVKVMGRHKPENIVIEMARENQTTQKGQKNSRERMKRIEEGIKELGSQILKEHPVENTQLQNEKLYLYYLQNGRDMYVDQELDINRLSDYDVDHIVPQSFLKDDSIDNKVLTRSDKARGKSDNVPSEEVVKKMKNYWRQLLNAKLITQRKFDNLTKAERGGLSELDKAGFIKRQLVETRQITKHVAQILDSRMNTKYDENDKLIREVKVITLKSKLVSDFRKDFQFYKVREINNYHHAHDAYLNAVVGTALIKKYPKLESEFVYGDYKVYDVRKMIAKSEQEIGKATAKYFFYSNIMNFFKTEITLANGEIRKRPLIETNGETGEIVWDKGRDFATVRKVLSMPQVNIVKKTEVQTGGFSKESILPKRNSDKLIARKKDWDPKKYGGFDSPTVAYSVLVVAKVEKGKSKKLKSVKELLGITIMERSSFEKNPIDFLEAKGYKEVKKDLIIKLPKYSLFELENGRKRMLASAGELQKGNELALPSKYVNFLYLASHYEKLKGSPEDNEQKQLFVEQHKHYLDEIIEQISEFSKRVILADANLDKVLSAYNKHRDKPIREQAENIIHLFTLTNLGAPAAFKYFDTTIDRKRYTSTKEVLDATLIHQSITGLYETRIDLSQLGGDGGGGGGGGGGTLQLDDEYRLYSPLVKPDQNIQFWLEQFPQAWAETAGMGLAKQVPPQVIQLKASATPVSVRQYPLSKEAQEGIRPHVQRLIQQGILVPVQSPWNTPLLPVRKPGTNDYRPVQDLREVNKRVQDIHPTVPNPYNLLCALPPQRSWYTVLDLKDAFFCLRLHPTSQPLFAFEWRDPGTGRTGQLTWTRLPQGFKNSPTIFNEALHRDLANFRIQHPQVTLLQYVDDLLLAGATKQDCLEGTKALLLELSDLGYRASAKKAQICRREVTYLGYSLRDGQRWLTEARKKTVVQIPAPTTAKQVREFLGTAGFCRLWIPGFATLAAPLYPLTKPKGEFSWAPEHQKAFDAIKKALLSAPALALPDVTKPFTLYVDERKGVARGVLTQTLGPWRRPVAYLSKKLDPVASGWPVCLKAIAAVAILVKDADKLTLGQNITVIAPHALENIVRQPPDRWMTNARMTHYQSLLLTERVTFAPPAALNPATLLPEETDEPVTHDCHQLLIEETGVRKDLTDIPLTGEVLTWFTDGSSYVVEGKRMAGAAVVDGTRTIWASSLPEGTSAQKAELMALTQALRLAEGKSINIYTDSRYAFATAHVHGAIYKQRGWLTSAGREIKNKEEILSLLEALHLPKRLAIIHCPGHQKAKDPISRGNQMADRVAKQAAQGVNLLAGKRTADGSEFEKRTADGSEFESPKKKAKVE

SEQ ID NO: 184 - protein, 2085 aa, synthetic construct
MPAAKRVKLDGGDKKYSIGLDIGTNSVGWAVITDEYKVPSKKFKVLGNTDRHSIKKNLIGALLFDSGETAEATRLKRTARRRYTRRKNRICYLQEIFSNEMAKVDDSFFHRLEESFLVEEDKKHERHPIFGNIVDEVAYHEKYPTIYHLRKKLVDSTDKADLRLIYLALAHMIKFRGHFLIEGDLNPDNSDVDKLFIQLVQTYNQLFEENPINASGVDAKAILSARLSKSRRLENLIAQLPGEKKNGLFGNLIALSLGLTPNFKSNFDLAEDAKLQLSKDTYDDDLDNLLAQIGDQYADLFLAAKNLSDAILLSDILRVNTEITKAPLSASMIKRYDEHHQDLTLLKALVRQQLPEKYKEIFFDQSKNGYAGYIDGGASQEEFYKFIKPILEKMDGTEELLVKLNREDLLRKQRTFDNGSIPHQIHLGELHAILRRQEDFYPFLKDNREKIEKILTFRIPYYVGPLARGNSRFAWMTRKSEETITPWNFEEVVDKGASAQSFIERMTNFDKNLPNEKVLPKHSLLYEYFTVYNELTKVKYVTEGMRKPAFLSGEQKKAIVDLLFKTNRKVTVKQLKEDYFKKIECFDSVEISGVEDRFNASLGTYHDLLKIIKDKDFLDNEENEDILEDIVLTLTLFEDREMIEERLKTYAHLFDDKVMKQLKRRRYTGWGRLSRKLINGIRDKQSGKTILDFLKSDGFANRNFMQLIHDDSLTFKEDIQKAQVSGQGDSLHEHIANLAGSPAIKKGILQTVKVVDELVKVMGRHKPENIVIEMARENQTTQKGQKNSRERMKRIEEGIKELGSQILKEHPVENTQLQNEKLYLYYLQNGRDMYVDQELDINRLSDYDVDHIVPQSFLKDDSIDNKVLTRSDKARGKSDNVPSEEVVKKMKNYWRQLLNAKLITQRKFDNLTKAERGGLSELDKAGFIKRQLVETRQITKHVAQILDSRMNTKYDENDKLIREVKVITLKSKLVSDFRKDFQFYKVREINNYHHAHDAYLNAVVGTALIKKYPKLESEFVYGDYKVYDVRKMIAKSEQEIGKATAKYFFYSNIMNFFKTEITLANGEIRKRPLIETNGETGEIVWDKGRDFATVRKVLSMPQVNIVKKTEVQTGGFSKESILPKRNSDKLIARKKDWDPKKYGGFDSPTVAYSVLVVAKVEKGKSKKLKSVKELLGITIMERSSFEKNPIDFLEAKGYKEVKKDLIIKLPKYSLFELENGRKRMLASAGELQKGNELALPSKYVNFLYLASHYEKLKGSPEDNEQKQLFVEQHKHYLDEIIEQISEFSKRVILADANLDKVLSAYNKHRDKPIREQAENIIHLFTLTNLGAPAAFKYFDTTIDRKRYTSTKEVLDATLIHQSITGLYETRIDLSQLGGDGGGGSGGGGGTLQLDDEYRLYSPLVKPDQNIQFWLEQFPQAWAETAGMGLAKQVPPQVIQLKASATPVSVRQYPLSKEAQEGIRPHVQRLIQQGILVPVQSPWNTPLLPVRKPGTNDYRPVQDLREVNKRVQDIHPTVPNPYNLLCALPPQRSWYTVLDLKDAFFCLRLHPTSQPLFAFEWRDPGTGRTGQLTWTRLPQGFKNSPTIFNEALHRDLANFRIQHPQVTLLQYVDDLLLAGATKQDCLEGTKALLLELSDLGYRASAKKAQICRREVTYLGYSLRDGQRWLTEARKKTVVQIPAPTTAKQVREFLGTAGFCRLWIPGFATLAAPLYPLTKPKGEFSWAPEHQKAFDAIKKALLSAPALALPDVTKPFTLYVDERKGVARGVLTQTLGPWRRPVAYLSKKLDPVASGWPVCLKAIAAVAILVKDADKLTLGQNITVIAPHALENIVRQPPDRWMTNARMTHYQSLLLTERVTFAPPAALNPATLLPEETDEPVTHDCHQLLIEETGVRKDLTDIPLTGEVLTWFTDGSSYVVEGKRMAGAAVVDGTRTIWASSLPEGTSAQKAELMALTQALRLAEGKSINIYTDSRYAFATAHVHGAIYKQRGWLTSAGREIKNKEEILSLLEALHLPKRLAIIHCPGHQKAKDPISRGNQMADRVAKQAAQGVNLLAGKRTADGSEFEKRTADGSEFESPKKKAKVE

SEQ ID NO: 185 - protein, 2087 aa, synthetic construct
MPAAKRVKLDGGDKKYSIGLDIGTNSVGWAVITDEYKVPSKKFKVLGNTDRHSIKKNLIGALLFDSGETAEATRLKRTARRRYTRRKNRICYLQEIFSNEMAKVDDSFFHRLEESFLVEEDKKHERHPIFGNIVDEVAYHEKYPTIYHLRKKLVDSTDKADLRLIYLALAHMIKFRGHFLIEGDLNPDNSDVDKLFIQLVQTYNQLFEENPINASGVDAKAILSARLSKSRRLENLIAQLPGEKKNGLFGNLIALSLGLTPNFKSNFDLAEDAKLQLSKDTYDDDLDNLLAQIGDQYADLFLAAKNLSDAILLSDILRVNTEITKAPLSASMIKRYDEHHQDLTLLKALVRQQLPEKYKEIFFDQSKNGYAGYIDGGASQEEFYKFIKPILEKMDGTEELLVKLNREDLLRKQRTFDNGSIPHQIHLGELHAILRRQEDFYPFLKDNREKIEKILTFRIPYYVGPLARGNSRFAWMTRKSEETITPWNFEEVVDKGASAQSFIERMTNFDKNLPNEKVLPKHSLLYEYFTVYNELTKVKYVTEGMRKPAFLSGEQKKAIVDLLFKTNRKVTVKQLKEDYFKKIECFDSVEISGVEDRFNASLGTYHDLLKIIKDKDFLDNEENEDILEDIVLTLTLFEDREMIEERLKTYAHLFDDKVMKQLKRRRYTGWGRLSRKLINGIRDKQSGKTILDFLKSDGFANRNFMQLIHDDSLTFKEDIQKAQVSGQGDSLHEHIANLAGSPAIKKGILQTVKVVDELVKVMGRHKPENIVIEMARENQTTQKGQKNSRERMKRIEEGIKELGSQILKEHPVENTQLQNEKLYLYYLQNGRDMYVDQELDINRLSDYDVDHIVPQSFLKDDSIDNKVLTRSDKARGKSDNVPSEEVVKKMKNYWRQLLNAKLITQRKFDNLTKAERGGLSELDKAGFIKRQLVETRQITKHVAQILDSRMNTKYDENDKLIREVKVITLKSKLVSDFRKDFQFYKVREINNYHHAHDAYLNAVVGTALIKKYPKLESEFVYGDYKVYDVRKMIAKSEQEIGKATAKYFFYSNIMNFFKTEITLANGEIRKRPLIETNGETGEIVWDKGRDFATVRKVLSMPQVNIVKKTEVQTGGFSKESILPKRNSDKLIARKKDWDPKKYGGFDSPTVAYSVLVVAKVEKGKSKKLKSVKELLGITIMERSSFEKNPIDFLEAKGYKEVKKDLIIKLPKYSLFELENGRKRMLASAGELQKGNELALPSKYVNFLYLASHYEKLKGSPEDNEQKQLFVEQHKHYLDEIIEQISEFSKRVILADANLDKVLSAYNKHRDKPIREQAENIIHLFTLTNLGAPAAFKYFDTTIDRKRYTSTKEVLDATLIHQSITGLYETRIDLSQLGGDGGGGGEAAAKGGTLQLDDEYRLYSPLVKPDQNIQFWLEQFPQAWAETAGMGLAKQVPPQVIQLKASATPVSVRQYPLSKEAQEGIRPHVQRLIQQGILVPVQSPWNTPLLPVRKPGTNDYRPVQDLREVNKRVQDIHPTVPNPYNLLCALPPQRSWYTVLDLKDAFFCLRLHPTSQPLFAFEWRDPGTGRTGQLTWTRLPQGFKNSPTIFNEALHRDLANFRIQHPQVTLLQYVDDLLLAGATKQDCLEGTKALLLELSDLGYRASAKKAQICRREVTYLGYSLRDGQRWLTEARKKTVVQIPAPTTAKQVREFLGTAGFCRLWIPGFATLAAPLYPLTKPKGEFSWAPEHQKAFDAIKKALLSAPALALPDVTKPFTLYVDERKGVARGVLTQTLGPWRRPVAYLSKKLDPVASGWPVCLKAIAAVAILVKDADKLTLGQNITVIAPHALENIVRQPPDRWMTNARMTHYQSLLLTERVTFAPPAALNPATLLPEETDEPVTHDCHQLLIEETGVRKDLTDIPLTGEVLTWFTDGSSYVVEGKRMAGAAVVDGTRTIWASSLPEGTSAQKAELMALTQALRLAEGKSINIYTDSRYAFATAHVHGAIYKQRGWLTSAGREIKNKEEILSLLEALHLPKRLAIIHCPGHQKAKDPISRGNQMADRVAKQAAQGVNLLAGKRTADGSEFEKRTADGSEFESPKKKAKVE

SEQ ID NO: 186 - protein, 2085 aa, synthetic construct
MPAAKRVKLDGGDKKYSIGLDIGTNSVGWAVITDEYKVPSKKFKVLGNTDRHSIKKNLIGALLFDSGETAEATRLKRTARRRYTRRKNRICYLQEIFSNEMAKVDDSFFHRLEESFLVEEDKKHERHPIFGNIVDEVAYHEKYPTIYHLRKKLVDSTDKADLRLIYLALAHMIKFRGHFLIEGDLNPDNSDVDKLFIQLVQTYNQLFEENPINASGVDAKAILSARLSKSRRLENLIAQLPGEKKNGLFGNLIALSLGLTPNFKSNFDLAEDAKLQLSKDTYDDDLDNLLAQIGDQYADLFLAAKNLSDAILLSDILRVNTEITKAPLSASMIKRYDEHHQDLTLLKALVRQQLPEKYKEIFFDQSKNGYAGYIDGGASQEEFYKFIKPILEKMDGTEELLVKLNREDLLRKQRTFDNGSIPHQIHLGELHAILRRQEDFYPFLKDNREKIEKILTFRIPYYVGPLARGNSRFAWMTRKSEETITPWNFEEVVDKGASAQSFIERMTNFDKNLPNEKVLPKHSLLYEYFTVYNELTKVKYVTEGMRKPAFLSGEQKKAIVDLLFKTNRKVTVKQLKEDYFKKIECFDSVEISGVEDRFNASLGTYHDLLKIIKDKDFLDNEENEDILEDIVLTLTLFEDREMIEERLKTYAHLFDDKVMKQLKRRRYTGWGRLSRKLINGIRDKQSGKTILDFLKSDGFANRNFMQLIHDDSLTFKEDIQKAQVSGQGDSLHEHIANLAGSPAIKKGILQTVKVVDELVKVMGRHKPENIVIEMARENQTTQKGQKNSRERMKRIEEGIKELGSQILKEHPVENTQLQNEKLYLYYLQNGRDMYVDQELDINRLSDYDVDHIVPQSFLKDDSIDNKVLTRSDKARGKSDNVPSEEVVKKMKNYWRQLLNAKLITQRKFDNLTKAERGGLSELDKAGFIKRQLVETRQITKHVAQILDSRMNTKYDENDKLIREVKVITLKSKLVSDFRKDFQFYKVREINNYHHAHDAYLNAVVGTALIKKYPKLESEFVYGDYKVYDVRKMIAKSEQEIGKATAKYFFYSNIMNFFKTEITLANGEIRKRPLIETNGETGEIVWDKGRDFATVRKVLSMPQVNIVKKTEVQTGGFSKESILPKRNSDKLIARKKDWDPKKYGGFDSPTVAYSVLVVAKVEKGKSKKLKSVKELLGITIMERSSFEKNPIDFLEAKGYKEVKKDLIIKLPKYSLFELENGRKRMLASAGELQKGNELALPSKYVNFLYLASHYEKLKGSPEDNEQKQLFVEQHKHYLDEIIEQISEFSKRVILADANLDKVLSAYNKHRDKPIREQAENIIHLFTLTNLGAPAAFKYFDTTIDRKRYTSTKEVLDATLIHQSITGLYETRIDLSQLGGDGGGGSGGSGGTLQLDDEYRLYSPLVKPDQNIQFWLEQFPQAWAETAGMGLAKQVPPQVIQLKASATPVSVRQYPLSKEAQEGIRPHVQRLIQQGILVPVQSPWNTPLLPVRKPGTNDYRPVQDLREVNKRVQDIHPTVPNPYNLLCALPPQRSWYTVLDLKDAFFCLRLHPTSQPLFAFEWRDPGTGRTGQLTWTRLPQGFKNSPTIFNEALHRDLANFRIQHPQVTLLQYVDDLLLAGATKQDCLEGTKALLLELSDLGYRASAKKAQICRREVTYLGYSLRDGQRWLTEARKKTVVQIPAPTTAKQVREFLGTAGFCRLWIPGFATLAAPLYPLTKPKGEFSWAPEHQKAFDAIKKALLSAPALALPDVTKPFTLYVDERKGVARGVLTQTLGPWRRPVAYLSKKLDPVASGWPVCLKAIAAVAILVKDADKLTLGQNITVIAPHALENIVRQPPDRWMTNARMTHYQSLLLTERVTFAPPAALNPATLLPEETDEPVTHDCHQLLIEETGVRKDLTDIPLTGEVLTWFTDGSSYVVEGKRMAGAAVVDGTRTIWASSLPEGTSAQKAELMALTQALRLAEGKSINIYTDSRYAFATAHVHGAIYKQRGWLTSAGREIKNKEEILSLLEALHLPKRLAIIHCPGHQKAKDPISRGNQMADRVAKQAAQGVNLLAGKRTADGSEFEKRTADGSEFESPKKKAKVE

SEQ ID NO: 187 - protein, 1999 aa, synthetic construct
MPAAKRVKLDGGDKKYSIGLDIGTNSVGWAVITDEYKVPSKKFKVLGNTDRHSIKKNLIGALLFDSGETAEATRLKRTARRRYTRRKNRICYLQEIFSNEMAKVDDSFFHRLEESFLVEEDKKHERHPIFGNIVDEVAYHEKYPTIYHLRKKLVDSTDKADLRLIYLALAHMIKFRGHFLIEGDLNPDNSDVDKLFIQLVQTYNQLFEENPINASGVDAKAILSARLSKSRRLENLIAQLPGEKKNGLFGNLIALSLGLTPNFKSNFDLAEDAKLQLSKDTYDDDLDNLLAQIGDQYADLFLAAKNLSDAILLSDILRVNTEITKAPLSASMIKRYDEHHQDLTLLKALVRQQLPEKYKEIFFDQSKNGYAGYIDGGASQEEFYKFIKPILEKMDGTEELLVKLNREDLLRKQRTFDNGSIPHQIHLGELHAILRRQEDFYPFLKDNREKIEKILTFRIPYYVGPLARGNSRFAWMTRKSEETITPWNFEEVVDKGASAQSFIERMTNFDKNLPNEKVLPKHSLLYEYFTVYNELTKVKYVTEGMRKPAFLSGEQKKAIVDLLFKTNRKVTVKQLKEDYFKKIECFDSVEISGVEDRFNASLGTYHDLLKIIKDKDFLDNEENEDILEDIVLTLTLFEDREMIEERLKTYAHLFDDKVMKQLKRRRYTGWGRLSRKLINGIRDKQSGKTILDFLKSDGFANRNFMQLIHDDSLTFKEDIQKAQVSGQGDSLHEHIANLAGSPAIKKGILQTVKVVDELVKVMGRHKPENIVIEMARENQTTQKGQKNSRERMKRIEEGIKELGSQILKEHPVENTQLQNEKLYLYYLQNGRDMYVDQELDINRLSDYDVDHIVPQSFLKDDSIDNKVLTRSDKARGKSDNVPSEEVVKKMKNYWRQLLNAKLITQRKFDNLTKAERGGLSELDKAGFIKRQLVETRQITKHVAQILDSRMNTKYDENDKLIREVKVITLKSKLVSDFRKDFQFYKVREINNYHHAHDAYLNAVVGTALIKKYPKLESEFVYGDYKVYDVRKMIAKSEQEIGKATAKYFFYSNIMNFFKTEITLANGEIRKRPLIETNGETGEIVWDKGRDFATVRKVLSMPQVNIVKKTEVQTGGFSKESILPKRNSDKLIARKKDWDPKKYGGFDSPTVAYSVLVVAKVEKGKSKKLKSVKELLGITIMERSSFEKNPIDFLEAKGYKEVKKDLIIKLPKYSLFELENGRKRMLASAGELQKGNELALPSKYVNFLYLASHYEKLKGSPEDNEQKQLFVEQHKHYLDEIIEQISEFSKRVILADANLDKVLSAYNKHRDKPIREQAENIIHLFTLTNLGAPAAFKYFDTTIDRKRYTSTKEVLDATLIHQSITGLYETRIDLSQLGGDGGGGSGGGGSSGGGVLDTPPSHIGLEHLPPPPEVPQFPLNLERLQALQDLVHRSLEAGYISPWDGPGNNPVFPVRKPNGAWRFVHDLRATNALTKPIPALSPGPPDLTAIPTHPPHIICLDLKDAFFQIPVEDRFRFYLSFTLPSPGGLQPHRRFAWRVLPQGFINSPALFNRALQEPLRQVSAAFSQSLLVSYMDDILYASPTEEQRSQCYQALAARLRDLGFQVASEKTSQTPSPVPFLGQMVHEQIVTYQSLPTLQISSPISLHQLQAVLGDLQWVSRGTPTTRRPLQLLYSSLKRHHDPRAIIQLSPEQLQGIAELRQALSHNARSRYNEQEPLLAYVHLTRAGSTLVLFQKGAQFPLAYFQTPLTDNQASPWGLLLLLGCQYLQTQALSSYAKPILKYYHNLPKTSLDNWIQSSEDPRVQELLQLWPQISSQGIQPPGPWKTLITRAEVFLTPQFSPDPIPAALCLFSDGATGRGAYCLWKDHLLDFQAVPAPESAQKGELAGLLAGLAAAPPEPVNIWVDSKYLYSLLRTWVLGAWLQPDPVPSYALLYKSLLRHPAIVVGHVRSHSSASHPIASLNNYVDQLAGKRTADGSEFEKRTADGSEFESPKKKAKVE

SEQ ID NO: 188 - protein, 2015 aa, synthetic construct
MPAAKRVKLDGGDKKYSIGLDIGTNSVGWAVITDEYKVPSKKFKVLGNTDRHSIKKNLIGALLFDSGETAEATRLKRTARRRYTRRKNRICYLQEIFSNEMAKVDDSFFHRLEESFLVEEDKKHERHPIFGNIVDEVAYHEKYPTIYHLRKKLVDSTDKADLRLIYLALAHMIKFRGHFLIEGDLNPDNSDVDKLFIQLVQTYNQLFEENPINASGVDAKAILSARLSKSRRLENLIAQLPGEKKNGLFGNLIALSLGLTPNFKSNFDLAEDAKLQLSKDTYDDDLDNLLAQIGDQYADLFLAAKNLSDAILLSDILRVNTEITKAPLSASMIKRYDEHHQDLTLLKALVRQQLPEKYKEIFFDQSKNGYAGYIDGGASQEEFYKFIKPILEKMDGTEELLVKLNREDLLRKQRTFDNGSIPHQIHLGELHAILRRQEDFYPFLKDNREKIEKILTFRIPYYVGPLARGNSRFAWMTRKSEETITPWNFEEVVDKGASAQSFIERMTNFDKNLPNEKVLPKHSLLYEYFTVYNELTKVKYVTEGMRKPAFLSGEQKKAIVDLLFKTNRKVTVKQLKEDYFKKIECFDSVEISGVEDRFNASLGTYHDLLKIIKDKDFLDNEENEDILEDIVLTLTLFEDREMIEERLKTYAHLFDDKVMKQLKRRRYTGWGRLSRKLINGIRDKQSGKTILDFLKSDGFANRNFMQLIHDDSLTFKEDIQKAQVSGQGDSLHEHIANLAGSPAIKKGILQTVKVVDELVKVMGRHKPENIVIEMARENQTTQKGQKNSRERMKRIEEGIKELGSQILKEHPVENTQLQNEKLYLYYLQNGRDMYVDQELDINRLSDYDVDHIVPQSFLKDDSIDNKVLTRSDKARGKSDNVPSEEVVKKMKNYWRQLLNAKLITQRKFDNLTKAERGGLSELDKAGFIKRQLVETRQITKHVAQILDSRMNTKYDENDKLIREVKVITLKSKLVSDFRKDFQFYKVREINNYHHAHDAYLNAVVGTALIKKYPKLESEFVYGDYKVYDVRKMIAKSEQEIGKATAKYFFYSNIMNFFKTEITLANGEIRKRPLIETNGETGEIVWDKGRDFATVRKVLSMPQVNIVKKTEVQTGGFSKESILPKRNSDKLIARKKDWDPKKYGGFDSPTVAYSVLVVAKVEKGKSKKLKSVKELLGITIMERSSFEKNPIDFLEAKGYKEVKKDLIIKLPKYSLFELENGRKRMLASAGELQKGNELALPSKYVNFLYLASHYEKLKGSPEDNEQKQLFVEQHKHYLDEIIEQISEFSKRVILADANLDKVLSAYNKHRDKPIREQAENIIHLFTLTNLGAPAAFKYFDTTIDRKRYTSTKEVLDATLIHQSITGLYETRIDLSQLGGDGGGGGGSGGGGSGGGGSGGGGSGGGGSGGGVLDTPPSHIGLEHLPPPPEVPQFPLNLERLQALQDLVHRSLEAGYISPWDGPGNNPVFPVRKPNGAWRFVHDLRATNALTKPIPALSPGPPDLTAIPTHPPHIICLDLKDAFFQIPVEDRFRFYLSFTLPSPGGLQPHRRFAWRVLPQGFINSPALFNRALQEPLRQVSAAFSQSLLVSYMDDILYASPTEEQRSQCYQALAARLRDLGFQVASEKTSQTPSPVPFLGQMVHEQIVTYQSLPTLQISSPISLHQLQAVLGDLQWVSRGTPTTRRPLQLLYSSLKRHHDPRAIIQLSPEQLQGIAELRQALSHNARSRYNEQEPLLAYVHLTRAGSTLVLFQKGAQFPLAYFQTPLTDNQASPWGLLLLLGCQYLQTQALSSYAKPILKYYHNLPKTSLDNWIQSSEDPRVQELLQLWPQISSQGIQPPGPWKTLITRAEVFLTPQFSPDPIPAALCLFSDGATGRGAYCLWKDHLLDFQAVPAPESAQKGELAGLLAGLAAAPPEPVNIWVDSKYLYSLLRTWVLGAWLQPDPVPSYALLYKSLLRHPAIVVGHVRSHSSASHPIASLNNYVDQLAGKRTADGSEFEKRTADGSEFESPKKKAKVE

SEQ ID NO: 189 - protein, 1996 aa, synthetic construct
MPAAKRVKLDGGDKKYSIGLDIGTNSVGWAVITDEYKVPSKKFKVLGNTDRHSIKKNLIGALLFDSGETAEATRLKRTARRRYTRRKNRICYLQEIFSNEMAKVDDSFFHRLEESFLVEEDKKHERHPIFGNIVDEVAYHEKYPTIYHLRKKLVDSTDKADLRLIYLALAHMIKFRGHFLIEGDLNPDNSDVDKLFIQLVQTYNQLFEENPINASGVDAKAILSARLSKSRRLENLIAQLPGEKKNGLFGNLIALSLGLTPNFKSNFDLAEDAKLQLSKDTYDDDLDNLLAQIGDQYADLFLAAKNLSDAILLSDILRVNTEITKAPLSASMIKRYDEHHQDLTLLKALVRQQLPEKYKEIFFDQSKNGYAGYIDGGASQEEFYKFIKPILEKMDGTEELLVKLNREDLLRKQRTFDNGSIPHQIHLGELHAILRRQEDFYPFLKDNREKIEKILTFRIPYYVGPLARGNSRFAWMTRKSEETITPWNFEEVVDKGASAQSFIERMTNFDKNLPNEKVLPKHSLLYEYFTVYNELTKVKYVTEGMRKPAFLSGEQKKAIVDLLFKTNRKVTVKQLKEDYFKKIECFDSVEISGVEDRFNASLGTYHDLLKIIKDKDFLDNEENEDILEDIVLTLTLFEDREMIEERLKTYAHLFDDKVMKQLKRRRYTGWGRLSRKLINGIRDKQSGKTILDFLKSDGFANRNFMQLIHDDSLTFKEDIQKAQVSGQGDSLHEHIANLAGSPAIKKGILQTVKVVDELVKVMGRHKPENIVIEMARENQTTQKGQKNSRERMKRIEEGIKELGSQILKEHPVENTQLQNEKLYLYYLQNGRDMYVDQELDINRLSDYDVDHIVPQSFLKDDSIDNKVLTRSDKARGKSDNVPSEEVVKKMKNYWRQLLNAKLITQRKFDNLTKAERGGLSELDKAGFIKRQLVETRQITKHVAQILDSRMNTKYDENDKLIREVKVITLKSKLVSDFRKDFQFYKVREINNYHHAHDAYLNAVVGTALIKKYPKLESEFVYGDYKVYDVRKMIAKSEQEIGKATAKYFFYSNIMNFFKTEITLANGEIRKRPLIETNGETGEIVWDKGRDFATVRKVLSMPQVNIVKKTEVQTGGFSKESILPKRNSDKLIARKKDWDPKKYGGFDSPTVAYSVLVVAKVEKGKSKKLKSVKELLGITIMERSSFEKNPIDFLEAKGYKEVKKDLIIKLPKYSLFELENGRKRMLASAGELQKGNELALPSKYVNFLYLASHYEKLKGSPEDNEQKQLFVEQHKHYLDEIIEQISEFSKRVILADANLDKVLSAYNKHRDKPIREQAENIIHLFTLTNLGAPAAFKYFDTTIDRKRYTSTKEVLDATLIHQSITGLYETRIDLSQLGGDGGGGGGSSGGGVLDTPPSHIGLEHLPPPPEVPQFPLNLERLQALQDLVHRSLEAGYISPWDGPGNNPVFPVRKPNGAWRFVHDLRATNALTKPIPALSPGPPDLTAIPTHPPHIICLDLKDAFFQIPVEDRFRFYLSFTLPSPGGLQPHRRFAWRVLPQGFINSPALFNRALQEPLRQVSAAFSQSLLVSYMDDILYASPTEEQRSQCYQALAARLRDLGFQVASEKTSQTPSPVPFLGQMVHEQIVTYQSLPTLQISSPISLHQLQAVLGDLQWVSRGTPTTRRPLQLLYSSLKRHHDPRAIIQLSPEQLQGIAELRQALSHNARSRYNEQEPLLAYVHLTRAGSTLVLFQKGAQFPLAYFQTPLTDNQASPWGLLLLLGCQYLQTQALSSYAKPILKYYHNLPKTSLDNWIQSSEDPRVQELLQLWPQISSQGIQPPGPWKTLITRAEVFLTPQFSPDPIPAALCLFSDGATGRGAYCLWKDHLLDFQAVPAPESAQKGELAGLLAGLAAAPPEPVNIWVDSKYLYSLLRTWVLGAWLQPDPVPSYALLYKSLLRHPAIVVGHVRSHSSASHPIASLNNYVDQLAGKRTADGSEFEKRTADGSEFESPKKKAKVE

SEQ ID NO: 190 - protein, 2123 aa, synthetic construct; identical to SEQ ID NO: 36

SEQ ID NO: 191 - protein, 2095 aa, synthetic construct
MPAAKRVKLDGGDKKYSIGLDIGTNSVGWAVITDEYKVPSKKFKVLGNTDRHSIKKNLIGALLFDSGETAEATRLKRTARRRYTRRKNRICYLQEIFSNEMAKVDDSFFHRLEESFLVEEDKKHERHPIFGNIVDEVAYHEKYPTIYHLRKKLVDSTDKADLRLIYLALAHMIKFRGHFLIEGDLNPDNSDVDKLFIQLVQTYNQLFEENPINASGVDAKAILSARLSKSRRLENLIAQLPGEKKNGLFGNLIALSLGLTPNFKSNFDLAEDAKLQLSKDTYDDDLDNLLAQIGDQYADLFLAAKNLSDAILLSDILRVNTEITKAPLSASMIKRYDEHHQDLTLLKALVRQQLPEKYKEIFFDQSKNGYAGYIDGGASQEEFYKFIKPILEKMDGTEELLVKLNREDLLRKQRTFDNGSIPHQIHLGELHAILRRQEDFYPFLKDNREKIEKILTFRIPYYVGPLARGNSRFAWMTRKSEETITPWNFEEVVDKGASAQSFIERMTNFDKNLPNEKVLPKHSLLYEYFTVYNELTKVKYVTEGMRKPAFLSGEQKKAIVDLLFKTNRKVTVKQLKEDYFKKIECFDSVEISGVEDRFNASLGTYHDLLKIIKDKDFLDNEENEDILEDIVLTLTLFEDREMIEERLKTYAHLFDDKVMKQLKRRRYTGWGRLSRKLINGIRDKQSGKTILDFLKSDGFANRNFMQLIHDDSLTFKEDIQKAQVSGQGDSLHEHIANLAGSPAIKKGILQTVKVVDELVKVMGRHKPENIVIEMARENQTTQKGQKNSRERMKRIEEGIKELGSQILKEHPVENTQLQNEKLYLYYLQNGRDMYVDQELDINRLSDYDVDHIVPQSFLKDDSIDNKVLTRSDKARGKSDNVPSEEVVKKMKNYWRQLLNAKLITQRKFDNLTKAERGGLSELDKAGFIKRQLVETRQITKHVAQILDSRMNTKYDENDKLIREVKVITLKSKLVSDFRKDFQFYKVREINNYHHAHDAYLNAVVGTALIKKYPKLESEFVYGDYKVYDVRKMIAKSEQEIGKATAKYFFYSNIMNFFKTEITLANGEIRKRPLIETNGETGEIVWDKGRDFATVRKVLSMPQVNIVKKTEVQTGGFSKESILPKRNSDKLIARKKDWDPKKYGGFDSPTVAYSVLVVAKVEKGKSKKLKSVKELLGITIMERSSFEKNPIDFLEAKGYKEVKKDLIIKLPKYSLFELENGRKRMLASAGELQKGNELALPSKYVNFLYLASHYEKLKGSPEDNEQKQLFVEQHKHYLDEIIEQISEFSKRVILADANLDKVLSAYNKHRDKPIREQAENIIHLFTLTNLGAPAAFKYFDTTIDRKRYTSTKEVLDATLIHQSITGLYETRIDLSQLGGDGGGGSGGSGGSGGSGGSGGSGGLDDEYRLYSPLVKPDQNIQFWLEQFPQAWAETAGMGLAKQVPPQVIQLKASATPVSVRQYPLSKEAQEGIRPHVQRLIQQGILVPVQSPWNTPLLPVRKPGTNDYRPVQDLREVNKRVQDIHPTVPNPYNLLCALPPQRSWYTVLDLKDAFFCLRLHPTSQPLFAFEWRDPGTGRTGQLTWTRLPQGFKNSPTIFNEALHRDLANFRIQHPQVTLLQYVDDLLLAGATKQDCLEGTKALLLELSDLGYRASAKKAQICRREVTYLGYSLRDGQRWLTEARKKTVVQIPAPTTAKQVREFLGKAGFCRLFIPGFATLAAPLYPLTKPKGEFSWAPEHQKAFDAIKKALLSAPALALPDVTKPFTLYVDERKGVARGVLTQTLGPWRRPVAYLSKKLDPVASGWPVCLKAIAAVAILVKDADKLTLGQNITVIAPHALENIVRQPPDRWMTNARMTHYQSLLLTERVTFAPPAALNPATLLPEETDEPVTHDCHQLLIEETGVRKDLTDIPLTGEVLTWFTDGSSYVVEGKRMAGAAVVDGTRTIWASSLPEGTSAQKAELMALTQALRLAEGKSINIYTDSRYAFATAHVHGAIYKQRGWLTSAGREIKNKEEILSLLEALHLPKRLAIIHCPGHQKAKDPISRGNQMADRVAKQAAQGVNLLPAGKRTADGSEFEKRTADGSEFESPKKKAKVE

SEQ ID NO: 192 - protein, 2088 aa, synthetic construct
MPAAKRVKLDGGDKKYSIGLDIGTNSVGWAVITDEYKVPSKKFKVLGNTDRHSIKKNLIGALLFDSGETAEATRLKRTARRRYTRRKNRICYLQEIFSNEMAKVDDSFFHRLEESFLVEEDKKHERHPIFGNIVDEVAYHEKYPTIYHLRKKLVDSTDKADLRLIYLALAHMIKFRGHFLIEGDLNPDNSDVDKLFIQLVQTYNQLFEENPINASGVDAKAILSARLSKSRRLENLIAQLPGEKKNGLFGNLIALSLGLTPNFKSNFDLAEDAKLQLSKDTYDDDLDNLLAQIGDQYADLFLAAKNLSDAILLSDILRVNTEITKAPLSASMIKRYDEHHQDLTLLKALVRQQLPEKYKEIFFDQSKNGYAGYIDGGASQEEFYKFIKPILEKMDGTEELLVKLNREDLLRKQRTFDNGSIPHQIHLGELHAILRRQEDFYPFLKDNREKIEKILTFRIPYYVGPLARGNSRFAWMTRKSEETITPWNFEEVVDKGASAQSFIERMTNFDKNLPNEKVLPKHSLLYEYFTVYNELTKVKYVTEGMRKPAFLSGEQKKAIVDLLFKTNRKVTVKQLKEDYFKKIECFDSVEISGVEDRFNASLGTYHDLLKIIKDKDFLDNEENEDILEDIVLTLTLFEDREMIEERLKTYAHLFDDKVMKQLKRRRYTGWGRLSRKLINGIRDKQSGKTILDFLKSDGFANRNFMQLIHDDSLTFKEDIQKAQVSGQGDSLHEHIANLAGSPAIKKGILQTVKVVDELVKVMGRHKPENIVIEMARENQTTQKGQKNSRERMKRIEEGIKELGSQILKEHPVENTQLQNEKLYLYYLQNGRDMYVDQELDINRLSDYDVDHIVPQSFLKDDSIDNKVLTRSDKARGKSDNVPSEEVVKKMKNYWRQLLNAKLITQRKFDNLTKAERGGLSELDKAGFIKRQLVETRQITKHVAQILDSRMNTKYDENDKLIREVKVITLKSKLVSDFRKDFQFYKVREINNYHHAHDAYLNAVVGTALIKKYPKLESEFVYGDYKVYDVRKMIAKSEQEIGKATAKYFFYSNIMNFFKTEITLANGEIRKRPLIETNGETGEIVWDKGRDFATVRKVLSMPQVNIVKKTEVQTGGFSKESILPKRNSDKLIARKKDWDPKKYGGFDSPTVAYSVLVVAKVEKGKSKKLKSVKELLGITIMERSSFEKNPIDFLEAKGYKEVKKDLIIKLPKYSLFELENGRKRMLASAGELQKGNELALPSKYVNFLYLASHYEKLKGSPEDNEQKQLFVEQHKHYLDEIIEQISEFSKRVILADANLDKVLSAYNKHRDKPIREQAENIIHLFTLTNLGAPAAFKYFDTTIDRKRYTSTKEVLDATLIHQSITGLYETRIDLSQLGGDGGPAPEAAAKGGGGGLDDEYRLYSPLVKPDQNIQFWLEQFPQAWAETAGMGLAKQVPPQVIQLKASATPVSVRQYPLSKEAQEGIRPHVQRLIQQGILVPVQSPWNTPLLPVRKPGTNDYRPVQDLREVNKRVQDIHPTVPNPYNLLCALPPQRSWYTVLDLKDAFFCLRLHPTSQPLFAFEWRDPGTGRTGQLTWTRLPQGFKNSPTIFNEALHRDLANFRIQHPQVTLLQYVDDLLLAGATKQDCLEGTKALLLELSDLGYRASAKKAQICRREVTYLGYSLRDGQRWLTEARKKTVVQIPAPTTAKQVREFLGKAGFCRLFIPGFATLAAPLYPLTKPKGEFSWAPEHQKAFDAIKKALLSAPALALPDVTKPFTLYVDERKGVARGVLTQTLGPWRRPVAYLSKKLDPVASGWPVCLKAIAAVAILVKDADKLTLGQNITVIAPHALENIVRQPPDRWMTNARMTHYQSLLLTERVTFAPPAALNPATLLPEETDEPVTHDCHQLLIEETGVRKDLTDIPLTGEVLTWFTDGSSYVVEGKRMAGAAVVDGTRTIWASSLPEGTSAQKAELMALTQALRLAEGKSINIYTDSRYAFATAHVHGAIYKQRGWLTSAGREIKNKEEILSLLEALHLPKRLAIIHCPGHQKAKDPISRGNQMADRVAKQAAQGVNLLPAGKRTADGSEFEKRTADGSEFESPKKKAKVE

SEQ ID NO: 193 - protein, 2107 aa, synthetic construct
MPAAKRVKLDGGDKKYSIGLDIGTNSVGWAVITDEYKVPSKKFKVLGNTDRHSIKKNLIGALLFDSGETAEATRLKRTARRRYTRRKNRICYLQEIFSNEMAKVDDSFFHRLEESFLVEEDKKHERHPIFGNIVDEVAYHEKYPTIYHLRKKLVDSTDKADLRLIYLALAHMIKFRGHFLIEGDLNPDNSDVDKLFIQLVQTYNQLFEENPINASGVDAKAILSARLSKSRRLENLIAQLPGEKKNGLFGNLIALSLGLTPNFKSNFDLAEDAKLQLSKDTYDDDLDNLLAQIGDQYADLFLAAKNLSDAILLSDILRVNTEITKAPLSASMIKRYDEHHQDLTLLKALVRQQLPEKYKEIFFDQSKNGYAGYIDGGASQEEFYKFIKPILEKMDGTEELLVKLNREDLLRKQRTFDNGSIPHQIHLGELHAILRRQEDFYPFLKDNREKIEKILTFRIPYYVGPLARGNSRFAWMTRKSEETITPWNFEEVVDKGASAQSFIERMTNFDKNLPNEKVLPKHSLLYEYFTVYNELTKVKYVTEGMRKPAFLSGEQKKAIVDLLFKTNRKVTVKQLKEDYFKKIECFDSVEISGVEDRFNASLGTYHDLLKIIKDKDFLDNEENEDILEDIVLTLTLFEDREMIEERLKTYAHLFDDKVMKQLKRRRYTGWGRLSRKLINGIRDKQSGKTILDFLKSDGFANRNFMQLIHDDSLTFKEDIQKAQVSGQGDSLHEHIANLAGSPAIKKGILQTVKVVDELVKVMGRHKPENIVIEMARENQTTQKGQKNSRERMKRIEEGIKELGSQILKEHPVENTQLQNEKLYLYYLQNGRDMYVDQELDINRLSDYDVDHIVPQSFLKDDSIDNKVLTRSDKARGKSDNVPSEEVVKKMKNYWRQLLNAKLITQRKFDNLTKAERGGLSELDKAGFIKRQLVETRQITKHVAQILDSRMNTKYDENDKLIREVKVITLKSKLVSDFRKDFQFYKVREINNYHHAHDAYLNAVVGTALIKKYPKLESEFVYGDYKVYDVRKMIAKSEQEIGKATAKYFFYSNIMNFFKTEITLANGEIRKRPLIETNGETGEIVWDKGRDFATVRKVLSMPQVNIVKKTEVQTGGFSKESILPKRNSDKLIARKKDWDPKKYGGFDSPTVAYSVLVVAKVEKGKSKKLKSVKELLGITIMERSSFEKNPIDFLEAKGYKEVKKDLIIKLPKYSLFELENGRKRMLASAGELQKGNELALPSKYVNFLYLASHYEKLKGSPEDNEQKQLFVEQHKHYLDEIIEQISEFSKRVILADANLDKVLSAYNKHRDKPIREQAENIIHLFTLTNLGAPAAFKYFDTTIDRKRYTSTKEVLDATLIHQSITGLYETRIDLSQLGGDGGEAAAKEAAAKEAAAKEAAAKEAAAKEAAAKGGLDDEYRLYSPLVKPDQNIQFWLEQFPQAWAETAGMGLAKQVPPQVIQLKASATPVSVRQYPLSKEAQEGIRPHVQRLIQQGILVPVQSPWNTPLLPVRKPGTNDYRPVQDLREVNKRVQDIHPTVPNPYNLLCALPPQRSWYTVLDLKDAFFCLRLHPTSQPLFAFEWRDPGTGRTGQLTWTRLPQGFKNSPTIFNEALHRDLANFRIQHPQVTLLQYVDDLLLAGATKQDCLEGTKALLLELSDLGYRASAKKAQICRREVTYLGYSLRDGQRWLTEARKKTVVQIPAPTTAKQVREFLGKAGFCRLFIPGFATLAAPLYPLTKPKGEFSWAPEHQKAFDAIKKALLSAPALALPDVTKPFTLYVDERKGVARGVLTQTLGPWRRPVAYLSKKLDPVASGWPVCLKAIAAVAILVKDADKLTLGQNITVIAPHALENIVRQPPDRWMTNARMTHYQSLLLTERVTFAPPAALNPATLLPEETDEPVTHDCHQLLIEETGVRKDLTDIPLTGEVLTWFTDGSSYVVEGKRMAGAAVVDGTRTIWASSLPEGTSAQKAELMALTQALRLAEGKSINIYTDSRYAFATAHVHGAIYKQRGWLTSAGREIKNKEEILSLLEALHLPKRLAIIHCPGHQKAKDPISRGNQMADRVAKQAAQGVNLLPAGKRTADGSEFEKRTADGSEFESPKKKAKVE

SEQ ID NO: 194 - protein, 2090 aa, synthetic construct; identical to SEQ ID NO: 54

SEQ ID NO: 195 - protein, 2088 aa, synthetic construct; identical to SEQ ID NO: 35

SEQ ID NO: 196 - protein, 2093 aa, synthetic construct; identical to SEQ ID NO: 90

SEQ ID NO: 197 - protein, 2086 aa, synthetic construct
MPAAKRVKLDGGDKKYSIGLDIGTNSVGWAVITDEYKVPSKKFKVLGNTDRHSIKKNLIGALLFDSGETAEATRLKRTARRRYTRRKNRICYLQEIFSNEMAKVDDSFFHRLEESFLVEEDKKHERHPIFGNIVDEVAYHEKYPTIYHLRKKLVDSTDKADLRLIYLALAHMIKFRGHFLIEGDLNPDNSDVDKLFIQLVQTYNQLFEENPINASGVDAKAILSARLSKSRRLENLIAQLPGEKKNGLFGNLIALSLGLTPNFKSNFDLAEDAKLQLSKDTYDDDLDNLLAQIGDQYADLFLAAKNLSDAILLSDILRVNTEITKAPLSASMIKRYDEHHQDLTLLKALVRQQLPEKYKEIFFDQSKNGYAGYIDGGASQEEFYKFIKPILEKMDGTEELLVKLNREDLLRKQRTFDNGSIPHQIHLGELHAILRRQEDFYPFLKDNREKIEKILTFRIPYYVGPLARGNSRFAWMTRKSEETITPWNFEEVVDKGASAQSFIERMTNFDKNLPNEKVLPKHSLLYEYFTVYNELTKVKYVTEGMRKPAFLSGEQKKAIVDLLFKTNRKVTVKQLKEDYFKKIECFDSVEISGVEDRFNASLGTYHDLLKIIKDKDFLDNEENEDILEDIVLTLTLFEDREMIEERLKTYAHLFDDKVMKQLKRRRYTGWGRLSRKLINGIRDKQSGKTILDFLKSDGFANRNFMQLIHDDSLTFKEDIQKAQVSGQGDSLHEHIANLAGSPAIKKGILQTVKVVDELVKVMGRHKPENIVIEMARENQTTQKGQKNSRERMKRIEEGIKELGSQILKEHPVENTQLQNEKLYLYYLQNGRDMYVDQELDINRLSDYDVDHIVPQSFLKDDSIDNKVLTRSDKARGKSDNVPSEEVVKKMKNYWRQLLNAKLITQRKFDNLTKAERGGLSELDKAGFIKRQLVETRQITKHVAQILDSRMNTKYDENDKLIREVKVITLKSKLVSDFRKDFQFYKVREINNYHHAHDAYLNAVVGTALIKKYPKLESEFVYGDYKVYDVRKMIAKSEQEIGKATAKYFFYSNIMNFFKTEITLANGEIRKRPLIETNGETGEIVWDKGRDFATVRKVLSMPQVNIVKKTEVQTGGFSKESILPKRNSDKLIARKKDWDPKKYGGFDSPTVAYSVLVVAKVEKGKSKKLKSVKELLGITIMERSSFEKNPIDFLEAKGYKEVKKDLIIKLPKYSLFELENGRKRMLASAGELQKGNELALPSKYVNFLYLASHYEKLKGSPEDNEQKQLFVEQHKHYLDEIIEQISEFSKRVILADANLDKVLSAYNKHRDKPIREQAENIIHLFTLTNLGAPAAFKYFDTTIDRKRYTSTKEVLDATLIHQSITGLYETRIDLSQLGGDGGGGGGGSPAPGGLDDEYRLYSPLVKPDQNIQFWLEQFPQAWAETAGMGLAKQVPPQVIQLKASATPVSVRQYPLSKEAQEGIRPHVQRLIQQGILVPVQSPWNTPLLPVRKPGTNDYRPVQDLREVNKRVQDIHPTVPNPYNLLCALPPQRSWYTVLDLKDAFFCLRLHPTSQPLFAFEWRDPGTGRTGQLTWTRLPQGFKNSPTIFNEALHRDLANFRIQHPQVTLLQYVDDLLLAGATKQDCLEGTKALLLELSDLGYRASAKKAQICRREVTYLGYSLRDGQRWLTEARKKTVVQIPAPTTAKQVREFLGKAGFCRLFIPGFATLAAPLYPLTKPKGEFSWAPEHQKAFDAIKKALLSAPALALPDVTKPFTLYVDERKGVARGVLTQTLGPWRRPVAYLSKKLDPVASGWPVCLKAIAAVAILVKDADKLTLGQNITVIAPHALENIVRQPPDRWMTNARMTHYQSLLLTERVTFAPPAALNPATLLPEETDEPVTHDCHQLLIEETGVRKDLTDIPLTGEVLTWFTDGSSYVVEGKRMAGAAVVDGTRTIWASSLPEGTSAQKAELMALTQALRLAEGKSINIYTDSRYAFATAHVHGAIYKQRGWLTSAGREIKNKEEILSLLEALHLPKRLAIIHCPGHQKAKDPISRGNQMADRVAKQAAQGVNLLPAGKRTADGSEFEKRTADGSEFESPKKKAKVE

SEQ ID NO: 198 - protein, 2086 aa, synthetic construct; identical to SEQ ID NO: 58

SEQ ID NO: 199 - protein, 2088 aa, synthetic construct; identical to SEQ ID NO: 40

SEQ ID NO: 200 - protein, 2088 aa, synthetic construct; identical to SEQ ID NO: 63

SEQ ID NO: 201 - protein, 2089 aa, synthetic construct; identical to SEQ ID NO: 74

SEQ ID NO: 202 - protein, 2092 aa, synthetic construct
MPAAKRVKLDGGDKKYSIGLDIGTNSVGWAVITDEYKVPSKKFKVLGNTDRHSIKKNLIGALLFDSGETAEATRLKRTARRRYTRRKNRICYLQEIFSNEMAKVDDSFFHRLEESFLVEEDKKHERHPIFGNIVDEVAYHEKYPTIYHLRKKLVDSTDKADLRLIYLALAHMIKFRGHFLIEGDLNPDNSDVDKLFIQLVQTYNQLFEENPINASGVDAKAILSARLSKSRRLENLIAQLPGEKKNGLFGNLIALSLGLTPNFKSNFDLAEDAKLQLSKDTYDDDLDNLLAQIGDQYADLFLAAKNLSDAILLSDILRVNTEITKAPLSASMIKRYDEHHQDLTLLKALVRQQLPEKYKEIFFDQSKNGYAGYIDGGASQEEFYKFIKPILEKMDGTEELLVKLNREDLLRKQRTFDNGSIPHQIHLGELHAILRRQEDFYPFLKDNREKIEKILTFRIPYYVGPLARGNSRFAWMTRKSEETITPWNFEEVVDKGASAQSFIERMTNFDKNLPNEKVLPKHSLLYEYFTVYNELTKVKYVTEGMRKPAFLSGEQKKAIVDLLFKTNRKVTVKQLKEDYFKKIECFDSVEISGVEDRFNASLGTYHDLLKIIKDKDFLDNEENEDILEDIVLTLTLFEDREMIEERLKTYAHLFDDKVMKQLKRRRYTGWGRLSRKLINGIRDKQSGKTILDFLKSDGFANRNFMQLIHDDSLTFKEDIQKAQVSGQGDSLHEHIANLAGSPAIKKGILQTVKVVDELVKVMGRHKPENIVIEMARENQTTQKGQKNSRERMKRIEEGIKELGSQILKEHPVENTQLQNEKLYLYYLQNGRDMYVDQELDINRLSDYDVDHIVPQSFLKDDSIDNKVLTRSDKARGKSDNVPSEEVVKKMKNYWRQLLNAKLITQRKFDNLTKAERGGLSELDKAGFIKRQLVETRQITKHVAQILDSRMNTKYDENDKLIREVKVITLKSKLVSDFRKDFQFYKVREINNYHHAHDAYLNAVVGTALIKKYPKLESEFVYGDYKVYDVRKMIAKSEQEIGKATAKYFFYSNIMNFFKTEITLANGEIRKRPLIETNGETGEIVWDKGRDFATVRKVLSMPQVNIVKKTEVQTGGFSKESILPKRNSDKLIARKKDWDPKKYGGFDSPTVAYSVLVVAKVEKGKSKKLKSVKELLGITIMERSSFEKNPIDFLEAKGYKEVKKDLIIKLPKYSLFELENGRKRMLASAGELQKGNELALPSKYVNFLYLASHYEKLKGSPEDNEQKQLFVEQHKHYLDEIIEQISEFSKRVILADANLDKVLSAYNKHRDKPIREQAENIIHLFTLTNLGAPAAFKYFDTTIDRKRYTSTKEVLDATLIHQSITGLYETRIDLSQLGGDGGGSSGSSGSSGSSGSSGGLDDEYRLYSPLVKPDQNIQFWLEQFPQAWAETAGMGLAKQVPPQVIQLKASATPVSVRQYPLSKEAQEGIRPHVQRLIQQGILVPVQSPWNTPLLPVRKPGTNDYRPVQDLREVNKRVQDIHPTVPNPYNLLCALPPQRSWYTVLDLKDAFFCLRLHPTSQPLFAFEWRDPGTGRTGQLTWTRLPQGFKNSPTIFNEALHRDLANFRIQHPQVTLLQYVDDLLLAGATKQDCLEGTKALLLELSDLGYRASAKKAQICRREVTYLGYSLRDGQRWLTEARKKTVVQIPAPTTAKQVREFLGKAGFCRLFIPGFATLAAPLYPLTKPKGEFSWAPEHQKAFDAIKKALLSAPALALPDVTKPFTLYVDERKGVARGVLTQTLGPWRRPVAYLSKKLDPVASGWPVCLKAIAAVAILVKDADKLTLGQNITVIAPHALENIVRQPPDRWMTNARMTHYQSLLLTERVTFAPPAALNPATLLPEETDEPVTHDCHQLLIEETGVRKDLTDIPLTGEVLTWFTDGSSYVVEGKRMAGAAVVDGTRTIWASSLPEGTSAQKAELMALTQALRLAEGKSINIYTDSRYAFATAHVHGAIYKQRGWLTSAGREIKNKEEILSLLEALHLPKRLAIIHCPGHQKAKDPISRGNQMADRVAKQAAQGVNLLPAGKRTADGSEFEKRTADGSEFESPKKKAKVE

SEQ ID NO: 203 - protein, 2083 aa, synthetic construct; identical to SEQ ID NO: 76

SEQ ID NO: 204 - protein, 2088 aa, synthetic construct; identical to SEQ ID NO: 71

SEQ ID NO: 205 - protein, 2086 aa, synthetic construct; identical to SEQ ID NO: 73

SEQ ID NO: 206 - protein, 2085 aa, synthetic construct; identical to SEQ ID NO: 57

SEQ ID NO: 207 - protein, 2086 aa, synthetic construct; identical to SEQ ID NO: 43

SEQ ID NO: 208 - protein, 2086 aa, synthetic construct
MPAAKRVKLDGGDKKYSIGLDIGTNSVGWAVITDEYKVPSKKFKVLGNTDRHSIKKNLIGALLFDSGETAEATRLKRTARRRYTRRKNRICYLQEIFSNEMAKVDDSFFHRLEESFLVEEDKKHERHPIFGNIVDEVAYHEKYPTIYHLRKKLVDSTDKADLRLIYLALAHMIKFRGHFLIEGDLNPDNSDVDKLFIQLVQTYNQLFEENPINASGVDAKAILSARLSKSRRLENLIAQLPGEKKNGLFGNLIALSLGLTPNFKSNFDLAEDAKLQLSKDTYDDDLDNLLAQIGDQYADLFLAAKNLSDAILLSDILRVNTEITKAPLSASMIKRYDEHHQDLTLLKALVRQQLPEKYKEIFFDQSKNGYAGYIDGGASQEEFYKFIKPILEKMDGTEELLVKLNREDLLRKQRTFDNGSIPHQIHLGELHAILRRQEDFYPFLKDNREKIEKILTFRIPYYVGPLARGNSRFAWMTRKSEETITPWNFEEVVDKGASAQSFIERMTNFDKNLPNEKVLPKHSLLYEYFTVYNELTKVKYVTEGMRKPAFLSGEQKKAIVDLLFKTNRKVTVKQLKEDYFKKIECFDSVEISGVEDRFNASLGTYHDLLKIIKDKDFLDNEENEDILEDIVLTLTLFEDREMIEERLKTYAHLFDDKVMKQLKRRRYTGWGRLSRKLINGIRDKQSGKTILDFLKSDGFANRNFMQLIHDDSLTFKEDIQKAQVSGQGDSLHEHIANLAGSPAIKKGILQTVKVVDELVKVMGRHKPENIVIEMARENQTTQKGQKNSRERMKRIEEGIKELGSQILKEHPVENTQLQNEKLYLYYLQNGRDMYVDQELDINRLSDYDVDHIVPQSFLKDDSIDNKVLTRSDKARGKSDNVPSEEVVKKMKNYWRQLLNAKLITQRKFDNLTKAERGGLSELDKAGFIKRQLVETRQITKHVAQILDSRMNTKYDENDKLIREVKVITLKSKLVSDFRKDFQFYKVREINNYHHAHDAYLNAVVGTALIKKYPKLESEFVYGDYKVYDVRKMIAKSEQEIGKATAKYFFYSNIMNFFKTEITLANGEIRKRPLIETNGETGEIVWDKGRDFATVRKVLSMPQVNIVKKTEVQTGGFSKESILPKRNSDKLIARKKDWDPKKYGGFDSPTVAYSVLVVAKVEKGKSKKLKSVKELLGITIMERSSFEKNPIDFLEAKGYKEVKKDLIIKLPKYSLFELENGRKRMLASAGELQKGNELALPSKYVNFLYLASHYEKLKGSPEDNEQKQLFVEQHKHYLDEIIEQISEFSKRVILADANLDKVLSAYNKHRDKPIREQAENIIHLFTLTNLGAPAAFKYFDTTIDRKRYTSTKEVLDATLIHQSITGLYETRIDLSQLGGDGGGSSGSSGSSGGLDDEYRLYSPLVKPDQNIQFWLEQFPQAWAETAGMGLAKQVPPQVIQLKASATPVSVRQYPLSKEAQEGIRPHVQRLIQQGILVPVQSPWNTPLLPVRKPGTNDYRPVQDLREVNKRVQDIHPTVPNPYNLLCALPPQRSWYTVLDLKDAFFCLRLHPTSQPLFAFEWRDPGTGRTGQLTWTRLPQGFKNSPTIFNEALHRDLANFRIQHPQVTLLQYVDDLLLAGATKQDCLEGTKALLLELSDLGYRASAKKAQICRREVTYLGYSLRDGQRWLTEARKKTVVQIPAPTTAKQVREFLGKAGFCRLFIPGFATLAAPLYPLTKPKGEFSWAPEHQKAFDAIKKALLSAPALALPDVTKPFTLYVDERKGVARGVLTQTLGPWRRPVAYLSKKLDPVASGWPVCLKAIAAVAILVKDADKLTLGQNITVIAPHALENIVRQPPDRWMTNARMTHYQSLLLTERVTFAPPAALNPATLLPEETDEPVTHDCHQLLIEETGVRKDLTDIPLTGEVLTWFTDGSSYVVEGKRMAGAAVVDGTRTIWASSLPEGTSAQKAELMALTQALRLAEGKSINIYTDSRYAFATAHVHGAIYKQRGWLTSAGREIKNKEEILSLLEALHLPKRLAIIHCPGHQKAKDPISRGNQMADRVAKQAAQGVNLLPAGKRTADGSEFEKRTADGSEFESPKKKAKVE

SEQ ID NO: 209 - protein, 2088 aa, synthetic construct
MPAAKRVKLDGGDKKYSIGLDIGTNSVGWAVITDEYKVPSKKFKVLGNTDRHSIKKNLIGALLFDSGETAEATRLKRTARRRYTRRKNRICYLQEIFSNEMAKVDDSFFHRLEESFLVEEDKKHERHPIFGNIVDEVAYHEKYPTIYHLRKKLVDSTDKADLRLIYLALAHMIKFRGHFLIEGDLNPDNSDVDKLFIQLVQTYNQLFEENPINASGVDAKAILSARLSKSRRLENLIAQLPGEKKNGLFGNLIALSLGLTPNFKSNFDLAEDAKLQLSKDTYDDDLDNLLAQIGDQYADLFLAAKNLSDAILLSDILRVNTEITKAPLSASMIKRYDEHHQDLTLLKALVRQQLPEKYKEIFFDQSKNGYAGYIDGGASQEEFYKFIKPILEKMDGTEELLVKLNREDLLRKQRTFDNGSIPHQIHLGELHAILRRQEDFYPFLKDNREKIEKILTFRIPYYVGPLARGNSRFAWMTRKSEETITPWNFEEVVDKGASAQSFIERMTNFDKNLPNEKVLPKHSLLYEYFTVYNELTKVKYVTEGMRKPAFLSGEQKKAIVDLLFKTNRKVTVKQLKEDYFKKIECFDSVEISGVEDRFNASLGTYHDLLKIIKDKDFLDNEENEDILEDIVLTLTLFEDREMIEERLKTYAHLFDDKVMKQLKRRRYTGWGRLSRKLINGIRDKQSGKTILDFLKSDGFANRNFMQLIHDDSLTFKEDIQKAQVSGQGDSLHEHIANLAGSPAIKKGILQTVKVVDELVKVMGRHKPENIVIEMARENQTTQKGQKNSRERMKRIEEGIKELGSQILKEHPVENTQLQNEKLYLYYLQNGRDMYVDQELDINRLSDYDVDHIVPQSFLKDDSIDNKVLTRSDKARGKSDNVPSEEVVKKMKNYWRQLLNAKLITQRKFDNLTKAERGGLSELDKAGFIKRQLVETRQITKHVAQILDSRMNTKYDENDKLIREVKVITLKSKLVSDFRKDFQFYKVREINNYHHAHDAYLNAVVGTALIKKYPKLESEFVYGDYKVYDVRKMIAKSEQEIGKATAKYFFYSNIMNFFKTEITLANGEIRKRPLIETNGETGEIVWDKGRDFATVRKVLSMPQVNIVKKTEVQTGGFSKESILPKRNSDKLIARKKDWDPKKYGGFDSPTVAYSVLVVAKVEKGKSKKLKSVKELLGITIMERSSFEKNPIDFLEAKGYKEVKKDLIIKLPKYSLFELENGRKRMLASAGELQKGNELALPSKYVNFLYLASHYEKLKGSPEDNEQKQLFVEQHKHYLDEIIEQISEFSKRVILADANLDKVLSAYNKHRDKPIREQAENIIHLFTLTNLGAPAAFKYFDTTIDRKRYTSTKEVLDATLIHQSITGLYETRIDLSQLGGDGGGSSEAAAKPAPGGLDDEYRLYSPLVKPDQNIQFWLEQFPQAWAETAGMGLAKQVPPQVIQLKASATPVSVRQYPLSKEAQEGIRPHVQRLIQQGILVPVQSPWNTPLLPVRKPGTNDYRPVQDLREVNKRVQDIHPTVPNPYNLLCALPPQRSWYTVLDLKDAFFCLRLHPTSQPLFAFEWRDPGTGRTGQLTWTRLPQGFKNSPTIFNEALHRDLANFRIQHPQVTLLQYVDDLLLAGATKQDCLEGTKALLLELSDLGYRASAKKAQICRREVTYLGYSLRDGQRWLTEARKKTVVQIPAPTTAKQVREFLGKAGFCRLFIPGFATLAAPLYPLTKPKGEFSWAPEHQKAFDAIKKALLSAPALALPDVTKPFTLYVDERKGVARGVLTQTLGPWRRPVAYLSKKLDPVASGWPVCLKAIAAVAILVKDADKLTLGQNITVIAPHALENIVRQPPDRWMTNARMTHYQSLLLTERVTFAPPAALNPATLLPEETDEPVTHDCHQLLIEETGVRKDLTDIPLTGEVLTWFTDGSSYVVEGKRMAGAAVVDGTRTIWASSLPEGTSAQKAELMALTQALRLAEGKSINIYTDSRYAFATAHVHGAIYKQRGWLTSAGREIKNKEEILSLLEALHLPKRLAIIHCPGHQKAKDPISRGNQMADRVAKQAAQGVNLLPAGKRTADGSEFEKRTADGSEFESPKKKAKVE

SEQ ID NO: 210 - protein, 2086 aa, synthetic construct; identical to SEQ ID NO: 89

SEQ ID NO: 211 - protein, 2088 aa, synthetic construct; identical to SEQ ID NO: 42

SEQ ID NO: 212 - protein, 2083 aa, synthetic construct
MPAAKRVKLDGGDKKYSIGLDIGTNSVGWAVITDEYKVPSKKFKVLGNTDRHSIKKNLIGALLFDSGETAEATRLKRTARRRYTRRKNRICYLQEIFSNEMAKVDDSFFHRLEESFLVEEDKKHERHPIFGNIVDEVAYHEKYPTIYHLRKKLVDSTDKADLRLIYLALAHMIKFRGHFLIEGDLNPDNSDVDKLFIQLVQTYNQLFEENPINASGVDAKAILSARLSKSRRLENLIAQLPGEKKNGLFGNLIALSLGLTPNFKSNFDLAEDAKLQLSKDTYDDDLDNLLAQIGDQYADLFLAAKNLSDAILLSDILRVNTEITKAPLSASMIKRYDEHHQDLTLLKALVRQQLPEKYKEIFFDQSKNGYAGYIDGGASQEEFYKFIKPILEKMDGTEELLVKLNREDLLRKQRTFDNGSIPHQIHLGELHAILRRQEDFYPFLKDNREKIEKILTFRIPYYVGPLARGNSRFAWMTRKSEETITPWNFEEVVDKGASAQSFIERMTNFDKNLPNEKVLPKHSLLYEYFTVYNELTKVKYVTEGMRKPAFLSGEQKKAIVDLLFKTNRKVTVKQLKEDYFKKIECFDSVEISGVEDRFNASLGTYHDLLKIIKDKDFLDNEENEDILEDIVLTLTLFEDREMIEERLKTYAHLFDDKVMKQLKRRRYTGWGRLSRKLINGIRDKQSGKTILDFLKSDGFANRNFMQLIHDDSLTFKEDIQKAQVSGQGDSLHEHIANLAGSPAIKKGILQTVKVVDELVKVMGRHKPENIVIEMARENQTTQKGQKNSRERMKRIEEGIKELGSQILKEHPVENTQLQNEKLYLYYLQNGRDMYVDQELDINRLSDYDVDHIVPQSFLKDDSIDNKVLTRSDKARGKSDNVPSEEVVKKMKNYWRQLLNAKLITQRKFDNLTKAERGGLSELDKAGFIKRQLVETRQITKHVAQILDSRMNTKYDENDKLIREVKVITLKSKLVSDFRKDFQFYKVREINNYHHAHDAYLNAVVGTALIKKYPKLESEFVYGDYKVYDVRKMIAKSEQEIGKATAKYFFYSNIMNFFKTEITLANGEIRKRPLIETNGETGEIVWDKGRDFATVRKVLSMPQVNIVKKTEVQTGGFSKESILPKRNSDKLIARKKDWDPKKYGGFDSPTVAYSVLVVAKVEKGKSKKLKSVKELLGITIMERSSFEKNPIDFLEAKGYKEVKKDLIIKLPKYSLFELENGRKRMLASAGELQKGNELALPSKYVNFLYLASHYEKLKGSPEDNEQKQLFVEQHKHYLDEIIEQISEFSKRVILADANLDKVLSAYNKHRDKPIREQAENIIHLFTLTNLGAPAAFKYFDTTIDRKRYTSTKEVLDATLIHQSITGLYETRIDLSQLGGDGGGGSGSSGGLDDEYRLYSPLVKPDQNIQFWLEQFPQAWAETAGMGLAKQVPPQVIQLKASATPVSVRQYPLSKEAQEGIRPHVQRLIQQGILVPVQSPWNTPLLPVRKPGTNDYRPVQDLREVNKRVQDIHPTVPNPYNLLCALPPQRSWYTVLDLKDAFFCLRLHPTSQPLFAFEWRDPGTGRTGQLTWTRLPQGFKNSPTIFNEALHRDLANFRIQHPQVTLLQYVDDLLLAGATKQDCLEGTKALLLELSDLGYRASAKKAQICRREVTYLGYSLRDGQRWLTEARKKTVVQIPAPTTAKQVREFLGKAGFCRLFIPGFATLAAPLYPLTKPKGEFSWAPEHQKAFDAIKKALLSAPALALPDVTKPFTLYVDERKGVARGVLTQTLGPWRRPVAYLSKKLDPVASGWPVCLKAIAAVAILVKDADKLTLGQNITVIAPHALENIVRQPPDRWMTNARMTHYQSLLLTERVTFAPPAALNPATLLPEETDEPVTHDCHQLLIEETGVRKDLTDIPLTGEVLTWFTDGSSYVVEGKRMAGAAVVDGTRTIWASSLPEGTSAQKAELMALTQALRLAEGKSINIYTDSRYAFATAHVHGAIYKQRGWLTSAGREIKNKEEILSLLEALHLPKRLAIIHCPGHQKAKDPISRGNQMADRVAKQAAQGVNLLPAGKRTADGSEFEKRTADGSEFESPKKKAKVE

SEQ ID NO: 213 - protein, 2086 aa, synthetic construct
MPAAKRVKLDGGDKKYSIGLDIGTNSVGWAVITDEYKVPSKKFKVLGNTDRHSIKKNLIGALLFDSGETAEATRLKRTARRRYTRRKNRICYLQEIFSNEMAKVDDSFFHRLEESFLVEEDKKHERHPIFGNIVDEVAYHEKYPTIYHLRKKLVDSTDKADLRLIYLALAHMIKFRGHFLIEGDLNPDNSDVDKLFIQLVQTYNQLFEENPINASGVDAKAILSARLSKSRRLENLIAQLPGEKKNGLFGNLIALSLGLTPNFKSNFDLAEDAKLQLSKDTYDDDLDNLLAQIGDQYADLFLAAKNLSDAILLSDILRVNTEITKAPLSASMIKRYDEHHQDLTLLKALVRQQLPEKYKEIFFDQSKNGYAGYIDGGASQEEFYKFIKPILEKMDGTEELLVKLNREDLLRKQRTFDNGSIPHQIHLGELHAILRRQEDFYPFLKDNREKIEKILTFRIPYYVGPLARGNSRFAWMTRKSEETITPWNFEEVVDKGASAQSFIERMTNFDKNLPNEKVLPKHSLLYEYFTVYNELTKVKYVTEGMRKPAFLSGEQKKAIVDLLFKTNRKVTVKQLKEDYFKKIECFDSVEISGVEDRFNASLGTYHDLLKIIKDKDFLDNEENEDILEDIVLTLTLFEDREMIEERLKTYAHLFDDKVMKQLKRRRYTGWGRLSRKLINGIRDKQSGKTILDFLKSDGFANRNFMQLIHDDSLTFKEDIQKAQVSGQGDSLHEHIANLAGSPAIKKGILQTVKVVDELVKVMGRHKPENIVIEMARENQTTQKGQKNSRERMKRIEEGIKELGSQILKEHPVENTQLQNEKLYLYYLQNGRDMYVDQELDINRLSDYDVDHIVPQSFLKDDSIDNKVLTRSDKARGKSDNVPSEEVVKKMKNYWRQLLNAKLITQRKFDNLTKAERGGLSELDKAGFIKRQLVETRQITKHVAQILDSRMNTKYDENDKLIREVKVITLKSKLVSDFRKDFQFYKVREINNYHHAHDAYLNAVVGTALIKKYPKLESEFVYGDYKVYDVRKMIAKSEQEIGKATAKYFFYSNIMNFFKTEITLANGEIRKRPLIETNGETGEIVWDKGRDFATVRKVLSMPQVNIVKKTEVQTGGFSKESILPKRNSDKLIARKKDWDPKKYGGFDSPTVAYSVLVVAKVEKGKSKKLKSVKELLGITIMERSSFEKNPIDFLEAKGYKEVKKDLIIKLPKYSLFELENGRKRMLASAGELQKGNELALPSKYVNFLYLASHYEKLKGSPEDNEQKQLFVEQHKHYLDEIIEQISEFSKRVILADANLDKVLSAYNKHRDKPIREQAENIIHLFTLTNLGAPAAFKYFDTTIDRKRYTSTKEVLDATLIHQSITGLYETRIDLSQLGGDGGGGSGGGPAPGGLDDEYRLYSPLVKPDQNIQFWLEQFPQAWAETAGMGLAKQVPPQVIQLKASATPVSVRQYPLSKEAQEGIRPHVQRLIQQGILVPVQSPWNTPLLPVRKPGTNDYRPVQDLREVNKRVQDIHPTVPNPYNLLCALPPQRSWYTVLDLKDAFFCLRLHPTSQPLFAFEWRDPGTGRTGQLTWTRLPQGFKNSPTIFNEALHRDLANFRIQHPQVTLLQYVDDLLLAGATKQDCLEGTKALLLELSDLGYRASAKKAQICRREVTYLGYSLRDGQRWLTEARKKTVVQIPAPTTAKQVREFLGKAGFCRLFIPGFATLAAPLYPLTKPKGEFSWAPEHQKAFDAIKKALLSAPALALPDVTKPFTLYVDERKGVARGVLTQTLGPWRRPVAYLSKKLDPVASGWPVCLKAIAAVAILVKDADKLTLGQNITVIAPHALENIVRQPPDRWMTNARMTHYQSLLLTERVTFAPPAALNPATLLPEETDEPVTHDCHQLLIEETGVRKDLTDIPLTGEVLTWFTDGSSYVVEGKRMAGAAVVDGTRTIWASSLPEGTSAQKAELMALTQALRLAEGKSINIYTDSRYAFATAHVHGAIYKQRGWLTSAGREIKNKEEILSLLEALHLPKRLAIIHCPGHQKAKDPISRGNQMADRVAKQAAQGVNLLPAGKRTADGSEFEKRTADGSEFESPKKKAKVE

SEQ ID NO: 214 - protein, 2095 aa, synthetic construct
MPAAKRVKLDGGDKKYSIGLDIGTNSVGWAVITDEYKVPSKKFKVLGNTDRHSIKKNLIGALLFDSGETAEATRLKRTARRRYTRRKNRICYLQEIFSNEMAKVDDSFFHRLEESFLVEEDKKHERHPIFGNIVDEVAYHEKYPTIYHLRKKLVDSTDKADLRLIYLALAHMIKFRGHFLIEGDLNPDNSDVDKLFIQLVQTYNQLFEENPINASGVDAKAILSARLSKSRRLENLIAQLPGEKKNGLFGNLIALSLGLTPNFKSNFDLAEDAKLQLSKDTYDDDLDNLLAQIGDQYADLFLAAKNLSDAILLSDILRVNTEITKAPLSASMIKRYDEHHQDLTLLKALVRQQLPEKYKEIFFDQSKNGYAGYIDGGASQEEFYKFIKPILEKMDGTEELLVKLNREDLLRKQRTFDNGSIPHQIHLGELHAILRRQEDFYPFLKDNREKIEKILTFRIPYYVGPLARGNSRFAWMTRKSEETITPWNFEEVVDKGASAQSFIERMTNFDKNLPNEKVLPKHSLLYEYFTVYNELTKVKYVTEGMRKPAFLSGEQKKAIVDLLFKTNRKVTVKQLKEDYFKKIECFDSVEISGVEDRFNASLGTYHDLLKIIKDKDFLDNEENEDILEDIVLTLTLFEDREMIEERLKTYAHLFDDKVMKQLKRRRYTGWGRLSRKLINGIRDKQSGKTILDFLKSDGFANRNFMQLIHDDSLTFKEDIQKAQVSGQGDSLHEHIANLAGSPAIKKGILQTVKVVDELVKVMGRHKPENIVIEMARENQTTQKGQKNSRERMKRIEEGIKELGSQILKEHPVENTQLQNEKLYLYYLQNGRDMYVDQELDINRLSDYDVDHIVPQSFLKDDSIDNKVLTRSDKARGKSDNVPSEEVVKKMKNYWRQLLNAKLITQRKFDNLTKAERGGLSELDKAGFIKRQLVETRQITKHVAQILDSRMNTKYDENDKLIREVKVITLKSKLVSDFRKDFQFYKVREINNYHHAHDAYLNAVVGTALIKKYPKLESEFVYGDYKVYDVRKMIAKSEQEIGKATAKYFFYSNIMNFFKTEITLANGEIRKRPLIETNGETGEIVWDKGRDFATVRKVLSMPQVNIVKKTEVQTGGFSKESILPKRNSDKLIARKKDWDPKKYGGFDSPTVAYSVLVVAKVEKGKSKKLKSVKELLGITIMERSSFEKNPIDFLEAKGYKEVKKDLIIKLPKYSLFELENGRKRMLASAGELQKGNELALPSKYVNFLYLASHYEKLKGSPEDNEQKQLFVEQHKHYLDEIIEQISEFSKRVILADANLDKVLSAYNKHRDKPIREQAENIIHLFTLTNLGAPAAFKYFDTTIDRKRYTSTKEVLDATLIHQSITGLYETRIDLSQLGGDGGGSSGSSGSSGSSGSSGSSGGLDDEYRLYSPLVKPDQNIQFWLEQFPQAWAETAGMGLAKQVPPQVIQLKASATPVSVRQYPLSKEAQEGIRPHVQRLIQQGILVPVQSPWNTPLLPVRKPGTNDYRPVQDLREVNKRVQDIHPTVPNPYNLLCALPPQRSWYTVLDLKDAFFCLRLHPTSQPLFAFEWRDPGTGRTGQLTWTRLPQGFKNSPTIFNEALHRDLANFRIQHPQVTLLQYVDDLLLAGATKQDCLEGTKALLLELSDLGYRASAKKAQICRREVTYLGYSLRDGQRWLTEARKKTVVQIPAPTTAKQVREFLGKAGFCRLFIPGFATLAAPLYPLTKPKGEFSWAPEHQKAFDAIKKALLSAPALALPDVTKPFTLYVDERKGVARGVLTQTLGPWRRPVAYLSKKLDPVASGWPVCLKAIAAVAILVKDADKLTLGQNITVIAPHALENIVRQPPDRWMTNARMTHYQSLLLTERVTFAPPAALNPATLLPEETDEPVTHDCHQLLIEETGVRKDLTDIPLTGEVLTWFTDGSSYVVEGKRMAGAAVVDGTRTIWASSLPEGTSAQKAELMALTQALRLAEGKSINIYTDSRYAFATAHVHGAIYKQRGWLTSAGREIKNKEEILSLLEALHLPKRLAIIHCPGHQKAKDPISRGNQMADRVAKQAAQGVNLLPAGKRTADGSEFEKRTADGSEFESPKKKAKVE

SEQ ID NO: 215 - protein, 2097 aa, synthetic construct; identical to SEQ ID NO: 46

SEQ ID NO: 216 - protein, 2092 aa, synthetic construct; identical to SEQ ID NO: 51

SEQ ID NO: 217 - protein, 2088 aa, synthetic construct
MPAAKRVKLDGGDKKYSIGLDIGTNSVGWAVITDEYKVPSKKFKVLGNTDRHSIKKNLIGALLFDSGETAEATRLKRTARRRYTRRKNRICYLQEIFSNEMAKVDDSFFHRLEESFLVEEDKKHERHPIFGNIVDEVAYHEKYPTIYHLRKKLVDSTDKADLRLIYLALAHMIKFRGHFLIEGDLNPDNSDVDKLFIQLVQTYNQLFEENPINASGVDAKAILSARLSKSRRLENLIAQLPGEKKNGLFGNLIALSLGLTPNFKSNFDLAEDAKLQLSKDTYDDDLDNLLAQIGDQYADLFLAAKNLSDAILLSDILRVNTEITKAPLSASMIKRYDEHHQDLTLLKALVRQQLPEKYKEIFFDQSKNGYAGYIDGGASQEEFYKFIKPILEKMDGTEELLVKLNREDLLRKQRTFDNGSIPHQIHLGELHAILRRQEDFYPFLKDNREKIEKILTFRIPYYVGPLARGNSRFAWMTRKSEETITPWNFEEVVDKGASAQSFIERMTNFDKNLPNEKVLPKHSLLYEYFTVYNELTKVKYVTEGMRKPAFLSGEQKKAIVDLLFKTNRKVTVKQLKEDYFKKIECFDSVEISGVEDRFNASLGTYHDLLKIIKDKDFLDNEENEDILEDIVLTLTLFEDREMIEERLKTYAHLFDDKVMKQLKRRRYTGWGRLSRKLINGIRDKQSGKTILDFLKSDGFANRNFMQLIHDDSLTFKEDIQKAQVSGQGDSLHEHIANLAGSPAIKKGILQTVKVVDELVKVMGRHKPENIVIEMARENQTTQKGQKNSRERMKRIEEGIKELGSQILKEHPVENTQLQNEKLYLYYLQNGRDMYVDQELDINRLSDYDVDHIVPQSFLKDDSIDNKVLTRSDKARGKSDNVPSEEVVKKMKNYWRQLLNAKLITQRKFDNLTKAERGGLSELDKAGFIKRQLVETRQITKHVAQILDSRMNTKYDENDKLIREVKVITLKSKLVSDFRKDFQFYKVREINNYHHAHDAYLNAVVGTALIKKYPKLESEFVYGDYKVYDVRKMIAKSEQEIGKATAKYFFYSNIMNFFKTEITLANGEIRKRPLIETNGETGEIVWDKGRDFATVRKVLSMPQVNIVKKTEVQTGGFSKESILPKRNSDKLIARKKDWDPKKYGGFDSPTVAYSVLVVAKVEKGKSKKLKSVKELLGITIMERSSFEKNPIDFLEAKGYKEVKKDLIIKLPKYSLFELENGRKRMLASAGELQKGNELALPSKYVNFLYLASHYEKLKGSPEDNEQKQLFVEQHKHYLDEIIEQISEFSKRVILADANLDKVLSAYNKHRDKPIREQAENIIHLFTLTNLGAPAAFKYFDTTIDRKRYTSTKEVLDATLIHQSITGLYETRIDLSQLGGDGGPAPGGSEAAAKGGLDDEYRLYSPLVKPDQNIQFWLEQFPQAWAETAGMGLAKQVPPQVIQLKASATPVSVRQYPLSKEAQEGIRPHVQRLIQQGILVPVQSPWNTPLLPVRKPGTNDYRPVQDLREVNKRVQDIHPTVPNPYNLLCALPPQRSWYTVLDLKDAFFCLRLHPTSQPLFAFEWRDPGTGRTGQLTWTRLPQGFKNSPTIFNEALHRDLANFRIQHPQVTLLQYVDDLLLAGATKQDCLEGTKALLLELSDLGYRASAKKAQICRREVTYLGYSLRDGQRWLTEARKKTVVQIPAPTTAKQVREFLGKAGFCRLFIPGFATLAAPLYPLTKPKGEFSWAPEHQKAFDAIKKALLSAPALALPDVTKPFTLYVDERKGVARGVLTQTLGPWRRPVAYLSKKLDPVASGWPVCLKAIAAVAILVKDADKLTLGQNITVIAPHALENIVRQPPDRWMTNARMTHYQSLLLTERVTFAPPAALNPATLLPEETDEPVTHDCHQLLIEETGVRKDLTDIPLTGEVLTWFTDGSSYVVEGKRMAGAAVVDGTRTIWASSLPEGTSAQKAELMALTQALRLAEGKSINIYTDSRYAFATAHVHGAIYKQRGWLTSAGREIKNKEEILSLLEALHLPKRLAIIHCPGHQKAKDPISRGNQMADRVAKQAAQGVNLLPAGKRTADGSEFEKRTADGSEFESPKKKAKVE

SEQ ID NO: 218 - protein, 2082 aa, synthetic construct; identical to SEQ ID NO: 70

SEQ ID NO: 219 - protein, 2085 aa, synthetic construct; identical to SEQ ID NO: 48

SEQ ID NO: 220 - protein, 2086 aa, synthetic construct
MPAAKRVKLDGGDKKYSIGLDIGTNSVGWAVITDEYKVPSKKFKVLGNTDRHSIKKNLIGALLFDSGETAEATRLKRTARRRYTRRKNRICYLQEIFSNEMAKVDDSFFHRLEESFLVEEDKKHERHPIFGNIVDEVAYHEKYPTIYHLRKKLVDSTDKADLRLIYLALAHMIKFRGHFLIEGDLNPDNSDVDKLFIQLVQTYNQLFEENPINASGVDAKAILSARLSKSRRLENLIAQLPGEKKNGLFGNLIALSLGLTPNFKSNFDLAEDAKLQLSKDTYDDDLDNLLAQIGDQYADLFLAAKNLSDAILLSDILRVNTEITKAPLSASMIKRYDEHHQDLTLLKALVRQQLPEKYKEIFFDQSKNGYAGYIDGGASQEEFYKFIKPILEKMDGTEELLVKLNREDLLRKQRTFDNGSIPHQIHLGELHAILRRQEDFYPFLKDNREKIEKILTFRIPYYVGPLARGNSRFAWMTRKSEETITPWNFEEVVDKGASAQSFIERMTNFDKNLPNEKVLPKHSLLYEYFTVYNELTKVKYVTEGMRKPAFLSGEQKKAIVDLLFKTNRKVTVKQLKEDYFKKIECFDSVEISGVEDRFNASLGTYHDLLKIIKDKDFLDNEENEDILEDIVLTLTLFEDREMIEERLKTYAHLFDDKVMKQLKRRRYTGWGRLSRKLINGIRDKQSGKTILDFLKSDGFANRNFMQLIHDDSLTFKEDIQKAQVSGQGDSLHEHIANLAGSPAIKKGILQTVKVVDELVKVMGRHKPENIVIEMARENQTTQKGQKNSRERMKRIEEGIKELGSQILKEHPVENTQLQNEKLYLYYLQNGRDMYVDQELDINRLSDYDVDHIVPQSFLKDDSIDNKVLTRSDKARGKSDNVPSEEVVKKMKNYWRQLLNAKLITQRKFDNLTKAERGGLSELDKAGFIKRQLVETRQITKHVAQILDSRMNTKYDENDKLIREVKVITLKSKLVSDFRKDFQFYKVREINNYHHAHDAYLNAVVGTALIKKYPKLESEFVYGDYKVYDVRKMIAKSEQEIGKATAKYFFYSNIMNFFKTEITLANGEIRKRPLIETNGETGEIVWDKGRDFATVRKVLSMPQVNIVKKTEVQTGGFSKESILPKRNSDKLIARKKDWDPKKYGGFDSPTVAYSVLVVAKVEKGKSKKLKSVKELLGITIMERSSFEKNPIDFLEAKGYKEVKKDLIIKLPKYSLFELENGRKRMLASAGELQKGNELALPSKYVNFLYLASHYEKLKGSPEDNEQKQLFVEQHKHYLDEIIEQISEFSKRVILADANLDKVLSAYNKHRDKPIREQAENIIHLFTLTNLGAPAAFKYFDTTIDRKRYTSTKEVLDATLIHQSITGLYETRIDLSQLGGDGGGGGPAPGSSGGLDDEYRLYSPLVKPDQNIQFWLEQFPQAWAETAGMGLAKQVPPQVIQLKASATPVSVRQYPLSKEAQEGIRPHVQRLIQQGILVPVQSPWNTPLLPVRKPGTNDYRPVQDLREVNKRVQDIHPTVPNPYNLLCALPPQRSWYTVLDLKDAFFCLRLHPTSQPLFAFEWRDPGTGRTGQLTWTRLPQGFKNSPTIFNEALHRDLANFRIQHPQVTLLQYVDDLLLAGATKQDCLEGTKALLLELSDLGYRASAKKAQICRREVTYLGYSLRDGQRWLTEARKKTVVQIPAPTTAKQVREFLGKAGFCRLFIPGFATLAAPLYPLTKPKGEFSWAPEHQKAFDAIKKALLSAPALALPDVTKPFTLYVDERKGVARGVLTQTLGPWRRPVAYLSKKLDPVASGWPVCLKAIAAVAILVKDADKLTLGQNITVIAPHALENIVRQPPDRWMTNARMTHYQSLLLTERVTFAPPAALNPATLLPEETDEPVTHDCHQLLIEETGVRKDLTDIPLTGEVLTWFTDGSSYVVEGKRMAGAAVVDGTRTIWASSLPEGTSAQKAELMALTQALRLAEGKSINIYTDSRYAFATAHVHGAIYKQRGWLTSAGREIKNKEEILSLLEALHLPKRLAIIHCPGHQKAKDPISRGNQMADRVAKQAAQGVNLLPAGKRTADGSEFEKRTADGSEFESPKKKAKVE

SEQ ID NO: 221 - protein, 2085 aa, synthetic construct
MPAAKRVKLDGGDKKYSIGLDIGTNSVGWAVITDEYKVPSKKFKVLGNTDRHSIKKNLIGALLFDSGETAEATRLKRTARRRYTRRKNRICYLQEIFSNEMAKVDDSFFHRLEESFLVEEDKKHERHPIFGNIVDEVAYHEKYPTIYHLRKKLVDSTDKADLRLIYLALAHMIKFRGHFLIEGDLNPDNSDVDKLFIQLVQTYNQLFEENPINASGVDAKAILSARLSKSRRLENLIAQLPGEKKNGLFGNLIALSLGLTPNFKSNFDLAEDAKLQLSKDTYDDDLDNLLAQIGDQYADLFLAAKNLSDAILLSDILRVNTEITKAPLSASMIKRYDEHHQDLTLLKALVRQQLPEKYKEIFFDQSKNGYAGYIDGGASQEEFYKFIKPILEKMDGTEELLVKLNREDLLRKQRTFDNGSIPHQIHLGELHAILRRQEDFYPFLKDNREKIEKILTFRIPYYVGPLARGNSRFAWMTRKSEETITPWNFEEVVDKGASAQSFIERMTNFDKNLPNEKVLPKHSLLYEYFTVYNELTKVKYVTEGMRKPAFLSGEQKKAIVDLLFKTNRKVTVKQLKEDYFKKIECFDSVEISGVEDRFNASLGTYHDLLKIIKDKDFLDNEENEDILEDIVLTLTLFEDREMIEERLKTYAHLFDDKVMKQLKRRRYTGWGRLSRKLINGIRDKQSGKTILDFLKSDGFANRNFMQLIHDDSLTFKEDIQKAQVSGQGDSLHEHIANLAGSPAIKKGILQTVKVVDELVKVMGRHKPENIVIEMARENQTTQKGQKNSRERMKRIEEGIKELGSQILKEHPVENTQLQNEKLYLYYLQNGRDMYVDQELDINRLSDYDVDHIVPQSFLKDDSIDNKVLTRSDKARGKSDNVPSEEVVKKMKNYWRQLLNAKLITQRKFDNLTKAERGGLSELDKAGFIKRQLVETRQITKHVAQILDSRMNTKYDENDKLIREVKVITLKSKLVSDFRKDFQFYKVREINNYHHAHDAYLNAVVGTALIKKYPKLESEFVYGDYKVYDVRKMIAKSEQEIGKATAKYFFYSNIMNFFKTEITLANGEIRKRPLIETNGETGEIVWDKGRDFATVRKVLSMPQVNIVKKTEVQTGGFSKESILPKRNSDKLIARKKDWDPKKYGGFDSPTVAYSVLVVAKVEKGKSKKLKSVKELLGITIMERSSFEKNPIDFLEAKGYKEVKKDLIIKLPKYSLFELENGRKRMLASAGELQKGNELALPSKYVNFLYLASHYEKLKGSPEDNEQKQLFVEQHKHYLDEIIEQISEFSKRVILADANLDKVLSAYNKHRDKPIREQAENIIHLFTLTNLGAPAAFKYFDTTIDRKRYTSTKEVLDATLIHQSITGLYETRIDLSQLGGDGGEAAAKGGSGGLDDEYRLYSPLVKPDQNIQFWLEQFPQAWAETAGMGLAKQVPPQVIQLKASATPVSVRQYPLSKEAQEGIRPHVQRLIQQGILVPVQSPWNTPLLPVRKPGTNDYRPVQDLREVNKRVQDIHPTVPNPYNLLCALPPQRSWYTVLDLKDAFFCLRLHPTSQPLFAFEWRDPGTGRTGQLTWTRLPQGFKNSPTIFNEALHRDLANFRIQHPQVTLLQYVDDLLLAGATKQDCLEGTKALLLELSDLGYRASAKKAQICRREVTYLGYSLRDGQRWLTEARKKTVVQIPAPTTAKQVREFLGKAGFCRLFIPGFATLAAPLYPLTKPKGEFSWAPEHQKAFDAIKKALLSAPALALPDVTKPFTLYVDERKGVARGVLTQTLGPWRRPVAYLSKKLDPVASGWPVCLKAIAAVAILVKDADKLTLGQNITVIAPHALENIVRQPPDRWMTNARMTHYQSLLLTERVTFAPPAALNPATLLPEETDEPVTHDCHQLLIEETGVRKDLTDIPLTGEVLTWFTDGSSYVVEGKRMAGAAVVDGTRTIWASSLPEGTSAQKAELMALTQALRLAEGKSINIYTDSRYAFATAHVHGAIYKQRGWLTSAGREIKNKEEILSLLEALHLPKRLAIIHCPGHQKAKDPISRGNQMADRVAKQAAQGVNLLPAGKRTADGSEFEKRTADGSEFESPKKKAKVE

SEQ ID NO: 222 - protein, 2083 aa, synthetic construct
MPAAKRVKLDGGDKKYSIGLDIGTNSVGWAVITDEYKVPSKKFKVLGNTDRHSIKKNLIGALLFDSGETAEATRLKRTARRRYTRRKNRICYLQEIFSNEMAKVDDSFFHRLEESFLVEEDKKHERHPIFGNIVDEVAYHEKYPTIYHLRKKLVDSTDKADLRLIYLALAHMIKFRGHFLIEGDLNPDNSDVDKLFIQLVQTYNQLFEENPINASGVDAKAILSARLSKSRRLENLIAQLPGEKKNGLFGNLIALSLGLTPNFKSNFDLAEDAKLQLSKDTYDDDLDNLLAQIGDQYADLFLAAKNLSDAILLSDILRVNTEITKAPLSASMIKRYDEHHQDLTLLKALVRQQLPEKYKEIFFDQSKNGYAGYIDGGASQEEFYKFIKPILEKMDGTEELLVKLNREDLLRKQRTFDNGSIPHQIHLGELHAILRRQEDFYPFLKDNREKIEKILTFRIPYYVGPLARGNSRFAWMTRKSEETITPWNFEEVVDKGASAQSFIERMTNFDKNLPNEKVLPKHSLLYEYFTVYNELTKVKYVTEGMRKPAFLSGEQKKAIVDLLFKTNRKVTVKQLKEDYFKKIECFDSVEISGVEDRFNASLGTYHDLLKIIKDKDFLDNEENEDILEDIVLTLTLFEDREMIEERLKTYAHLFDDKVMKQLKRRRYTGWGRLSRKLINGIRDKQSGKTILDFLKSDGFANRNFMQLIHDDSLTFKEDIQKAQVSGQGDSLHEHIANLAGSPAIKKGILQTVKVVDELVKVMGRHKPENIVIEMARENQTTQKGQKNSRERMKRIEEGIKELGSQILKEHPVENTQLQNEKLYLYYLQNGRDMYVDQELDINRLSDYDVDHIVPQSFLKDDSIDNKVLTRSDKARGKSDNVPSEEVVKKMKNYWRQLLNAKLITQRKFDNLTKAERGGLSELDKAGFIKRQLVETRQITKHVAQILDSRMNTKYDENDKLIREVKVITLKSKLVSDFRKDFQFYKVREINNYHHAHDAYLNAVVGTALIKKYPKLESEFVYGDYKVYDVRKMIAKSEQEIGKATAKYFFYSNIMNFFKTEITLANGEIRKRPLIETNGETGEIVWDKGRDFATVRKVLSMPQVNIVKKTEVQTGGFSKESILPKRNSDKLIARKKDWDPKKYGGFDSPTVAYSVLVVAKVEKGKSKKLKSVKELLGITIMERSSFEKNPIDFLEAKGYKEVKKDLIIKLPKYSLFELENGRKRMLASAGELQKGNELALPSKYVNFLYLASHYEKLKGSPEDNEQKQLFVEQHKHYLDEIIEQISEFSKRVILADANLDKVLSAYNKHRDKPIREQAENIIHLFTLTNLGAPAAFKYFDTTIDRKRYTSTKEVLDATLIHQSITGLYETRIDLSQLGGDGGGGSGGGGGLDDEYRLYSPLVKPDQNIQFWLEQFPQAWAETAGMGLAKQVPPQVIQLKASATPVSVRQYPLSKEAQEGIRPHVQRLIQQGILVPVQSPWNTPLLPVRKPGTNDYRPVQDLREVNKRVQDIHPTVPNPYNLLCALPPQRSWYTVLDLKDAFFCLRLHPTSQPLFAFEWRDPGTGRTGQLTWTRLPQGFKNSPTIFNEALHRDLANFRIQHPQVTLLQYVDDLLLAGATKQDCLEGTKALLLELSDLGYRASAKKAQICRREVTYLGYSLRDGQRWLTEARKKTVVQIPAPTTAKQVREFLGKAGFCRLFIPGFATLAAPLYPLTKPKGEFSWAPEHQKAFDAIKKALLSAPALALPDVTKPFTLYVDERKGVARGVLTQTLGPWRRPVAYLSKKLDPVASGWPVCLKAIAAVAILVKDADKLTLGQNITVIAPHALENIVRQPPDRWMTNARMTHYQSLLLTERVTFAPPAALNPATLLPEETDEPVTHDCHQLLIEETGVRKDLTDIPLTGEVLTWFTDGSSYVVEGKRMAGAAVVDGTRTIWASSLPEGTSAQKAELMALTQALRLAEGKSINIYTDSRYAFATAHVHGAIYKQRGWLTSAGREIKNKEEILSLLEALHLPKRLAIIHCPGHQKAKDPISRGNQMADRVAKQAAQGVNLLPAGKRTADGSEFEKRTADGSEFESPKKKAKVE

SEQ ID NO: 223 - protein, 2083 aa, synthetic construct; identical to SEQ ID NO: 47

SEQ ID NO: 224 - protein, 2088 aa, synthetic construct
MPAAKRVKLDGGDKKYSIGLDIGTNSVGWAVITDEYKVPSKKFKVLGNTDRHSIKKNLIGALLFDSGETAEATRLKRTARRRYTRRKNRICYLQEIFSNEMAKVDDSFFHRLEESFLVEEDKKHERHPIFGNIVDEVAYHEKYPTIYHLRKKLVDSTDKADLRLIYLALAHMIKFRGHFLIEGDLNPDNSDVDKLFIQLVQTYNQLFEENPINASGVDAKAILSARLSKSRRLENLIAQLPGEKKNGLFGNLIALSLGLTPNFKSNFDLAEDAKLQLSKDTYDDDLDNLLAQIGDQYADLFLAAKNLSDAILLSDILRVNTEITKAPLSASMIKRYDEHHQDLTLLKALVRQQLPEKYKEIFFDQSKNGYAGYIDGGASQEEFYKFIKPILEKMDGTEELLVKLNREDLLRKQRTFDNGSIPHQIHLGELHAILRRQEDFYPFLKDNREKIEKILTFRIPYYVGPLARGNSRFAWMTRKSEETITPWNFEEVVDKGASAQSFIERMTNFDKNLPNEKVLPKHSLLYEYFTVYNELTKVKYVTEGMRKPAFLSGEQKKAIVDLLFKTNRKVTVKQLKEDYFKKIECFDSVEISGVEDRFNASLGTYHDLLKIIKDKDFLDNEENEDILEDIVLTLTLFEDREMIEERLKTYAHLFDDKVMKQLKRRRYTGWGRLSRKLINGIRDKQSGKTILDFLKSDGFANRNFMQLIHDDSLTFKEDIQKAQVSGQGDSLHEHIANLAGSPAIKKGILQTVKVVDELVKVMGRHKPENIVIEMARENQTTQKGQKNSRERMKRIEEGIKELGSQILKEHPVENTQLQNEKLYLYYLQNGRDMYVDQELDINRLSDYDVDHIVPQSFLKDDSIDNKVLTRSDKARGKSDNVPSEEVVKKMKNYWRQLLNAKLITQRKFDNLTKAERGGLSELDKAGFIKRQLVETRQITKHVAQILDSRMNTKYDENDKLIREVKVITLKSKLVSDFRKDFQFYKVREINNYHHAHDAYLNAVVGTALIKKYPKLESEFVYGDYKVYDVRKMIAKSEQEIGKATAKYFFYSNIMNFFKTEITLANGEIRKRPLIETNGETGEIVWDKGRDFATVRKVLSMPQVNIVKKTEVQTGGFSKESILPKRNSDKLIARKKDWDPKKYGGFDSPTVAYSVLVVAKVEKGKSKKLKSVKELLGITIMERSSFEKNPIDFLEAKGYKEVKKDLIIKLPKYSLFELENGRKRMLASAGELQKGNELALPSKYVNFLYLASHYEKLKGSPEDNEQKQLFVEQHKHYLDEIIEQISEFSKRVILADANLDKVLSAYNKHRDKPIREQAENIIHLFTLTNLGAPAAFKYFDTTIDRKRYTSTKEVLDATLIHQSITGLYETRIDLSQLGGDGGEAAAKPAPGSSGGLDDEYRLYSPLVKPDQNIQFWLEQFPQAWAETAGMGLAKQVPPQVIQLKASATPVSVRQYPLSKEAQEGIRPHVQRLIQQGILVPVQSPWNTPLLPVRKPGTNDYRPVQDLREVNKRVQDIHPTVPNPYNLLCALPPQRSWYTVLDLKDAFFCLRLHPTSQPLFAFEWRDPGTGRTGQLTWTRLPQGFKNSPTIFNEALHRDLANFRIQHPQVTLLQYVDDLLLAGATKQDCLEGTKALLLELSDLGYRASAKKAQICRREVTYLGYSLRDGQRWLTEARKKTVVQIPAPTTAKQVREFLGKAGFCRLFIPGFATLAAPLYPLTKPKGEFSWAPEHQKAFDAIKKALLSAPALALPDVTKPFTLYVDERKGVARGVLTQTLGPWRRPVAYLSKKLDPVASGWPVCLKAIAAVAILVKDADKLTLGQNITVIAPHALENIVRQPPDRWMTNARMTHYQSLLLTERVTFAPPAALNPATLLPEETDEPVTHDCHQLLIEETGVRKDLTDIPLTGEVLTWFTDGSSYVVEGKRMAGAAVVDGTRTIWASSLPEGTSAQKAELMALTQALRLAEGKSINIYTDSRYAFATAHVHGAIYKQRGWLTSAGREIKNKEEILSLLEALHLPKRLAIIHCPGHQKAKDPISRGNQMADRVAKQAAQGVNLLPAGKRTADGSEFEKRTADGSEFESPKKKAKVE

SEQ ID NO: 225 - protein, 2088 aa, synthetic construct
MPAAKRVKLDGGDKKYSIGLDIGTNSVGWAVITDEYKVPSKKFKVLGNTDRHSIKKNLIGALLFDSGETAEATRLKRTARRRYTRRKNRICYLQEIFSNEMAKVDDSFFHRLEESFLVEEDKKHERHPIFGNIVDEVAYHEKYPTIYHLRKKLVDSTDKADLRLIYLALAHMIKFRGHFLIEGDLNPDNSDVDKLFIQLVQTYNQLFEENPINASGVDAKAILSARLSKSRRLENLIAQLPGEKKNGLFGNLIALSLGLTPNFKSNFDLAEDAKLQLSKDTYDDDLDNLLAQIGDQYADLFLAAKNLSDAILLSDILRVNTEITKAPLSASMIKRYDEHHQDLTLLKALVRQQLPEKYKEIFFDQSKNGYAGYIDGGASQEEFYKFIKPILEKMDGTEELLVKLNREDLLRKQRTFDNGSIPHQIHLGELHAILRRQEDFYPFLKDNREKIEKILTFRIPYYVGPLARGNSRFAWMTRKSEETITPWNFEEVVDKGASAQSFIERMTNFDKNLPNEKVLPKHSLLYEYFTVYNELTKVKYVTEGMRKPAFLSGEQKKAIVDLLFKTNRKVTVKQLKEDYFKKIECFDSVEISGVEDRFNASLGTYHDLLKIIKDKDFLDNEENEDILEDIVLTLTLFEDREMIEERLKTYAHLFDDKVMKQLKRRRYTGWGRLSRKLINGIRDKQSGKTILDFLKSDGFANRNFMQLIHDDSLTFKEDIQKAQVSGQGDSLHEHIANLAGSPAIKKGILQTVKVVDELVKVMGRHKPENIVIEMARENQTTQKGQKNSRERMKRIEEGIKELGSQILKEHPVENTQLQNEKLYLYYLQNGRDMYVDQELDINRLSDYDVDHIVPQSFLKDDSIDNKVLTRSDKARGKSDNVPSEEVVKKMKNYWRQLLNAKLITQRKFDNLTKAERGGLSELDKAGFIKRQLVETRQITKHVAQILDSRMNTKYDENDKLIREVKVITLKSKLVSDFRKDFQFYKVREINNYHHAHDAYLNAVVGTALIKKYPKLESEFVYGDYKVYDVRKMIAKSEQEIGKATAKYFFYSNIMNFFKTEITLANGEIRKRPLIETNGETGEIVWDKGRDFATVRKVLSMPQVNIVKKTEVQTGGFSKESILPKRNSDKLIARKKDWDPKKYGGFDSPTVAYSVLVVAKVEKGKSKKLKSVKELLGITIMERSSFEKNPIDFLEAKGYKEVKKDLIIKLPKYSLFELENGRKRMLASAGELQKGNELALPSKYVNFLYLASHYEKLKGSPEDNEQKQLFVEQHKHYLDEIIEQISEFSKRVILADANLDKVLSAYNKHRDKPIREQAENIIHLFTLTNLGAPAAFKYFDTTIDRKRYTSTKEVLDATLIHQSITGLYETRIDLSQLGGDGGPAPGSSEAAAKGGLDDEYRLYSPLVKPDQNIQFWLEQFPQAWAETAGMGLAKQVPPQVIQLKASATPVSVRQYPLSKEAQEGIRPHVQRLIQQGILVPVQSPWNTPLLPVRKPGTNDYRPVQDLREVNKRVQDIHPTVPNPYNLLCALPPQRSWYTVLDLKDAFFCLRLHPTSQPLFAFEWRDPGTGRTGQLTWTRLPQGFKNSPTIFNEALHRDLANFRIQHPQVTLLQYVDDLLLAGATKQDCLEGTKALLLELSDLGYRASAKKAQICRREVTYLGYSLRDGQRWLTEARKKTVVQIPAPTTAKQVREFLGKAGFCRLFIPGFATLAAPLYPLTKPKGEFSWAPEHQKAFDAIKKALLSAPALALPDVTKPFTLYVDERKGVARGVLTQTLGPWRRPVAYLSKKLDPVASGWPVCLKAIAAVAILVKDADKLTLGQNITVIAPHALENIVRQPPDRWMTNARMTHYQSLLLTERVTFAPPAALNPATLLPEETDEPVTHDCHQLLIEETGVRKDLTDIPLTGEVLTWFTDGSSYVVEGKRMAGAAVVDGTRTIWASSLPEGTSAQKAELMALTQALRLAEGKSINIYTDSRYAFATAHVHGAIYKQRGWLTSAGREIKNKEEILSLLEALHLPKRLAIIHCPGHQKAKDPISRGNQMADRVAKQAAQGVNLLPAGKRTADGSEFEKRTADGSEFESPKKKAKVE

SEQ ID NO: 226 - protein, 2086 aa, synthetic construct
MPAAKRVKLDGGDKKYSIGLDIGTNSVGWAVITDEYKVPSKKFKVLGNTDRHSIKKNLIGALLFDSGETAEATRLKRTARRRYTRRKNRICYLQEIFSNEMAKVDDSFFHRLEESFLVEEDKKHERHPIFGNIVDEVAYHEKYPTIYHLRKKLVDSTDKADLRLIYLALAHMIKFRGHFLIEGDLNPDNSDVDKLFIQLVQTYNQLFEENPINASGVDAKAILSARLSKSRRLENLIAQLPGEKKNGLFGNLIALSLGLTPNFKSNFDLAEDAKLQLSKDTYDDDLDNLLAQIGDQYADLFLAAKNLSDAILLSDILRVNTEITKAPLSASMIKRYDEHHQDLTLLKALVRQQLPEKYKEIFFDQSKNGYAGYIDGGASQEEFYKFIKPILEKMDGTEELLVKLNREDLLRKQRTFDNGSIPHQIHLGELHAILRRQEDFYPFLKDNREKIEKILTFRIPYYVGPLARGNSRFAWMTRKSEETITPWNFEEVVDKGASAQSFIERMTNFDKNLPNEKVLPKHSLLYEYFTVYNELTKVKYVTEGMRKPAFLSGEQKKAIVDLLFKTNRKVTVKQLKEDYFKKIECFDSVEISGVEDRFNASLGTYHDLLKIIKDKDFLDNEENEDILEDIVLTLTLFEDREMIEERLKTYAHLFDDKVMKQLKRRRYTGWGRLSRKLINGIRDKQSGKTILDFLKSDGFANRNFMQLIHDDSLTFKEDIQKAQVSGQGDSLHEHIANLAGSPAIKKGILQTVKVVDELVKVMGRHKPENIVIEMARENQTTQKGQKNSRERMKRIEEGIKELGSQILKEHPVENTQLQNEKLYLYYLQNGRDMYVDQELDINRLSDYDVDHIVPQSFLKDDSIDNKVLTRSDKARGKSDNVPSEEVVKKMKNYWRQLLNAKLITQRKFDNLTKAERGGLSELDKAGFIKRQLVETRQITKHVAQILDSRMNTKYDENDKLIREVKVITLKSKLVSDFRKDFQFYKVREINNYHHAHDAYLNAVVGTALIKKYPKLESEFVYGDYKVYDVRKMIAKSEQEIGKATAKYFFYSNIMNFFKTEITLANGEIRKRPLIETNGETGEIVWDKGRDFATVRKVLSMPQVNIVKKTEVQTGGFSKESILPKRNSDKLIARKKDWDPKKYGGFDSPTVAYSVLVVAKVEKGKSKKLKSVKELLGITIMERSSFEKNPIDFLEAKGYKEVKKDLIIKLPKYSLFELENGRKRMLASAGELQKGNELALPSKYVNFLYLASHYEKLKGSPEDNEQKQLFVEQHKHYLDEIIEQISEFSKRVILADANLDKVLSAYNKHRDKPIREQAENIIHLFTLTNLGAPAAFKYFDTTIDRKRYTSTKEVLDATLIHQSITGLYETRIDLSQLGGDGGGGSGGSGGSGGLDDEYRLYSPLVKPDQNIQFWLEQFPQAWAETAGMGLAKQVPPQVIQLKASATPVSVRQYPLSKEAQEGIRPHVQRLIQQGILVPVQSPWNTPLLPVRKPGTNDYRPVQDLREVNKRVQDIHPTVPNPYNLLCALPPQRSWYTVLDLKDAFFCLRLHPTSQPLFAFEWRDPGTGRTGQLTWTRLPQGFKNSPTIFNEALHRDLANFRIQHPQVTLLQYVDDLLLAGATKQDCLEGTKALLLELSDLGYRASAKKAQICRREVTYLGYSLRDGQRWLTEARKKTVVQIPAPTTAKQVREFLGKAGFCRLFIPGFATLAAPLYPLTKPKGEFSWAPEHQKAFDAIKKALLSAPALALPDVTKPFTLYVDERKGVARGVLTQTLGPWRRPVAYLSKKLDPVASGWPVCLKAIAAVAILVKDADKLTLGQNITVIAPHALENIVRQPPDRWMTNARMTHYQSLLLTERVTFAPPAALNPATLLPEETDEPVTHDCHQLLIEETGVRKDLTDIPLTGEVLTWFTDGSSYVVEGKRMAGAAVVDGTRTIWASSLPEGTSAQKAELMALTQALRLAEGKSINIYTDSRYAFATAHVHGAIYKQRGWLTSAGREIKNKEEILSLLEALHLPKRLAIIHCPGHQKAKDPISRGNQMADRVAKQAAQGVNLLPAGKRTADGSEFEKRTADGSEFESPKKKAKVE

SEQ ID NO: 227 - protein, 2083 aa, synthetic construct; identical to SEQ ID NO: 78

SEQ ID NO: 228 - protein, 2089 aa, synthetic construct; identical to SEQ ID NO: 41

SEQ ID NO: 229 - protein, 2088 aa, synthetic construct; identical to SEQ ID NO: 65

SEQ ID NO: 230 - protein, 2088 aa, synthetic construct; identical to SEQ ID NO: 80

SEQ ID NO: 231 - protein, 2088 aa, synthetic construct
MPAAKRVKLDGGDKKYSIGLDIGTNSVGWAVITDEYKVPSKKFKVLGNTDRHSIKKNLIGALLFDSGETAEATRLKRTARRRYTRRKNRICYLQEIFSNEMAKVDDSFFHRLEESFLVEEDKKHERHPIFGNIVDEVAYHEKYPTIYHLRKKLVDSTDKADLRLIYLALAHMIKFRGHFLIEGDLNPDNSDVDKLFIQLVQTYNQLFEENPINASGVDAKAILSARLSKSRRLENLIAQLPGEKKNGLFGNLIALSLGLTPNFKSNFDLAEDAKLQLSKDTYDDDLDNLLAQIGDQYADLFLAAKNLSDAILLSDILRVNTEITKAPLSASMIKRYDEHHQDLTLLKALVRQQLPEKYKEIFFDQSKNGYAGYIDGGASQEEFYKFIKPILEKMDGTEELLVKLNREDLLRKQRTFDNGSIPHQIHLGELHAILRRQEDFYPFLKDNREKIEKILTFRIPYYVGPLARGNSRFAWMTRKSEETITPWNFEEVVDKGASAQSFIERMTNFDKNLPNEKVLPKHSLLYEYFTVYNELTKVKYVTEGMRKPAFLSGEQKKAIVDLLFKTNRKVTVKQLKEDYFKKIECFDSVEISGVEDRFNASLGTYHDLLKIIKDKDFLDNEENEDILEDIVLTLTLFEDREMIEERLKTYAHLFDDKVMKQLKRRRYTGWGRLSRKLINGIRDKQSGKTILDFLKSDGFANRNFMQLIHDDSLTFKEDIQKAQVSGQGDSLHEHIANLAGSPAIKKGILQTVKVVDELVKVMGRHKPENIVIEMARENQTTQKGQKNSRERMKRIEEGIKELGSQILKEHPVENTQLQNEKLYLYYLQNGRDMYVDQELDINRLSDYDVDHIVPQSFLKDDSIDNKVLTRSDKARGKSDNVPSEEVVKKMKNYWRQLLNAKLITQRKFDNLTKAERGGLSELDKAGFIKRQLVETRQITKHVAQILDSRMNTKYDENDKLIREVKVITLKSKLVSDFRKDFQFYKVREINNYHHAHDAYLNAVVGTALIKKYPKLESEFVYGDYKVYDVRKMIAKSEQEIGKATAKYFFYSNIMNFFKTEITLANGEIRKRPLIETNGETGEIVWDKGRDFATVRKVLSMPQVNIVKKTEVQTGGFSKESILPKRNSDKLIARKKDWDPKKYGGFDSPTVAYSVLVVAKVEKGKSKKLKSVKELLGITIMERSSFEKNPIDFLEAKGYKEVKKDLIIKLPKYSLFELENGRKRMLASAGELQKGNELALPSKYVNFLYLASHYEKLKGSPEDNEQKQLFVEQHKHYLDEIIEQISEFSKRVILADANLDKVLSAYNKHRDKPIREQAENIIHLFTLTNLGAPAAFKYFDTTIDRKRYTSTKEVLDATLIHQSITGLYETRIDLSQLGGDGGEAAAKGGGGGSGGLDDEYRLYSPLVKPDQNIQFWLEQFPQAWAETAGMGLAKQVPPQVIQLKASATPVSVRQYPLSKEAQEGIRPHVQRLIQQGILVPVQSPWNTPLLPVRKPGTNDYRPVQDLREVNKRVQDIHPTVPNPYNLLCALPPQRSWYTVLDLKDAFFCLRLHPTSQPLFAFEWRDPGTGRTGQLTWTRLPQGFKNSPTIFNEALHRDLANFRIQHPQVTLLQYVDDLLLAGATKQDCLEGTKALLLELSDLGYRASAKKAQICRREVTYLGYSLRDGQRWLTEARKKTVVQIPAPTTAKQVREFLGKAGFCRLFIPGFATLAAPLYPLTKPKGEFSWAPEHQKAFDAIKKALLSAPALALPDVTKPFTLYVDERKGVARGVLTQTLGPWRRPVAYLSKKLDPVASGWPVCLKAIAAVAILVKDADKLTLGQNITVIAPHALENIVRQPPDRWMTNARMTHYQSLLLTERVTFAPPAALNPATLLPEETDEPVTHDCHQLLIEETGVRKDLTDIPLTGEVLTWFTDGSSYVVEGKRMAGAAVVDGTRTIWASSLPEGTSAQKAELMALTQALRLAEGKSINIYTDSRYAFATAHVHGAIYKQRGWLTSAGREIKNKEEILSLLEALHLPKRLAIIHCPGHQKAKDPISRGNQMADRVAKQAAQGVNLLPAGKRTADGSEFEKRTADGSEFESPKKKAKVE

SEQ ID NO: 232 - protein, 2102 aa, synthetic construct; identical to SEQ ID NO: 39

SEQ ID NO: 233 - protein, 2085 aa, synthetic construct
MPAAKRVKLDGGDKKYSIGLDIGTNSVGWAVITDEYKVPSKKFKVLGNTDRHSIKKNLIGALLFDSGETAEATRLKRTARRRYTRRKNRICYLQEIFSNEMAKVDDSFFHRLEESFLVEEDKKHERHPIFGNIVDEVAYHEKYPTIYHLRKKLVDSTDKADLRLIYLALAHMIKFRGHFLIEGDLNPDNSDVDKLFIQLVQTYNQLFEENPINASGVDAKAILSARLSKSRRLENLIAQLPGEKKNGLFGNLIALSLGLTPNFKSNFDLAEDAKLQLSKDTYDDDLDNLLAQIGDQYADLFLAAKNLSDAILLSDILRVNTEITKAPLSASMIKRYDEHHQDLTLLKALVRQQLPEKYKEIFFDQSKNGYAGYIDGGASQEEFYKFIKPILEKMDGTEELLVKLNREDLLRKQRTFDNGSIPHQIHLGELHAILRRQEDFYPFLKDNREKIEKILTFRIPYYVGPLARGNSRFAWMTRKSEETITPWNFEEVVDKGASAQSFIERMTNFDKNLPNEKVLPKHSLLYEYFTVYNELTKVKYVTEGMRKPAFLSGEQKKAIVDLLFKTNRKVTVKQLKEDYFKKIECFDSVEISGVEDRFNASLGTYHDLLKIIKDKDFLDNEENEDILEDIVLTLTLFEDREMIEERLKTYAHLFDDKVMKQLKRRRYTGWGRLSRKLINGIRDKQSGKTILDFLKSDGFANRNFMQLIHDDSLTFKEDIQKAQVSGQGDSLHEHIANLAGSPAIKKGILQTVKVVDELVKVMGRHKPENIVIEMARENQTTQKGQKNSRERMKRIEEGIKELGSQILKEHPVENTQLQNEKLYLYYLQNGRDMYVDQELDINRLSDYDVDHIVPQSFLKDDSIDNKVLTRSDKARGKSDNVPSEEVVKKMKNYWRQLLNAKLITQRKFDNLTKAERGGLSELDKAGFIKRQLVETRQITKHVAQILDSRMNTKYDENDKLIREVKVITLKSKLVSDFRKDFQFYKVREINNYHHAHDAYLNAVVGTALIKKYPKLESEFVYGDYKVYDVRKMIAKSEQEIGKATAKYFFYSNIMNFFKTEITLANGEIRKRPLIETNGETGEIVWDKGRDFATVRKVLSMPQVNIVKKTEVQTGGFSKESILPKRNSDKLIARKKDWDPKKYGGFDSPTVAYSVLVVAKVEKGKSKKLKSVKELLGITIMERSSFEKNPIDFLEAKGYKEVKKDLIIKLPKYSLFELENGRKRMLASAGELQKGNELALPSKYVNFLYLASHYEKLKGSPEDNEQKQLFVEQHKHYLDEIIEQISEFSKRVILADANLDKVLSAYNKHRDKPIREQAENIIHLFTLTNLGAPAAFKYFDTTIDRKRYTSTKEVLDATLIHQSITGLYETRIDLSQLGGDGGEAAAKPAPGGLDDEYRLYSPLVKPDQNIQFWLEQFPQAWAETAGMGLAKQVPPQVIQLKASATPVSVRQYPLSKEAQEGIRPHVQRLIQQGILVPVQSPWNTPLLPVRKPGTNDYRPVQDLREVNKRVQDIHPTVPNPYNLLCALPPQRSWYTVLDLKDAFFCLRLHPTSQPLFAFEWRDPGTGRTGQLTWTRLPQGFKNSPTIFNEALHRDLANFRIQHPQVTLLQYVDDLLLAGATKQDCLEGTKALLLELSDLGYRASAKKAQICRREVTYLGYSLRDGQRWLTEARKKTVVQIPAPTTAKQVREFLGKAGFCRLFIPGFATLAAPLYPLTKPKGEFSWAPEHQKAFDAIKKALLSAPALALPDVTKPFTLYVDERKGVARGVLTQTLGPWRRPVAYLSKKLDPVASGWPVCLKAIAAVAILVKDADKLTLGQNITVIAPHALENIVRQPPDRWMTNARMTHYQSLLLTERVTFAPPAALNPATLLPEETDEPVTHDCHQLLIEETGVRKDLTDIPLTGEVLTWFTDGSSYVVEGKRMAGAAVVDGTRTIWASSLPEGTSAQKAELMALTQALRLAEGKSINIYTDSRYAFATAHVHGAIYKQRGWLTSAGREIKNKEEILSLLEALHLPKRLAIIHCPGHQKAKDPISRGNQMADRVAKQAAQGVNLLPAGKRTADGSEFEKRTADGSEFESPKKKAKVE

SEQ ID NO: 234 - protein, 2092 aa, synthetic construct; identical to SEQ ID NO: 56

SEQ ID NO: 235 - protein, 2083 aa, synthetic construct
MPAAKRVKLDGGDKKYSIGLDIGTNSVGWAVITDEYKVPSKKFKVLGNTDRHSIKKNLIGALLFDSGETAEATRLKRTARRRYTRRKNRICYLQEIFSNEMAKVDDSFFHRLEESFLVEEDKKHERHPIFGNIVDEVAYHEKYPTIYHLRKKLVDSTDKADLRLIYLALAHMIKFRGHFLIEGDLNPDNSDVDKLFIQLVQTYNQLFEENPINASGVDAKAILSARLSKSRRLENLIAQLPGEKKNGLFGNLIALSLGLTPNFKSNFDLAEDAKLQLSKDTYDDDLDNLLAQIGDQYADLFLAAKNLSDAILLSDILRVNTEITKAPLSASMIKRYDEHHQDLTLLKALVRQQLPEKYKEIFFDQSKNGYAGYIDGGASQEEFYKFIKPILEKMDGTEELLVKLNREDLLRKQRTFDNGSIPHQIHLGELHAILRRQEDFYPFLKDNREKIEKILTFRIPYYVGPLARGNSRFAWMTRKSEETITPWNFEEVVDKGASAQSFIERMTNFDKNLPNEKVLPKHSLLYEYFTVYNELTKVKYVTEGMRKPAFLSGEQKKAIVDLLFKTNRKVTVKQLKEDYFKKIECFDSVEISGVEDRFNASLGTYHDLLKIIKDKDFLDNEENEDILEDIVLTLTLFEDREMIEERLKTYAHLFDDKVMKQLKRRRYTGWGRLSRKLINGIRDKQSGKTILDFLKSDGFANRNFMQLIHDDSLTFKEDIQKAQVSGQGDSLHEHIANLAGSPAIKKGILQTVKVVDELVKVMGRHKPENIVIEMARENQTTQKGQKNSRERMKRIEEGIKELGSQILKEHPVENTQLQNEKLYLYYLQNGRDMYVDQELDINRLSDYDVDHIVPQSFLKDDSIDNKVLTRSDKARGKSDNVPSEEVVKKMKNYWRQLLNAKLITQRKFDNLTKAERGGLSELDKAGFIKRQLVETRQITKHVAQILDSRMNTKYDENDKLIREVKVITLKSKLVSDFRKDFQFYKVREINNYHHAHDAYLNAVVGTALIKKYPKLESEFVYGDYKVYDVRKMIAKSEQEIGKATAKYFFYSNIMNFFKTEITLANGEIRKRPLIETNGETGEIVWDKGRDFATVRKVLSMPQVNIVKKTEVQTGGFSKESILPKRNSDKLIARKKDWDPKKYGGFDSPTVAYSVLVVAKVEKGKSKKLKSVKELLGITIMERSSFEKNPIDFLEAKGYKEVKKDLIIKLPKYSLFELENGRKRMLASAGELQKGNELALPSKYVNFLYLASHYEKLKGSPEDNEQKQLFVEQHKHYLDEIIEQISEFSKRVILADANLDKVLSAYNKHRDKPIREQAENIIHLFTLTNLGAPAAFKYFDTTIDRKRYTSTKEVLDATLIHQSITGLYETRIDLSQLGGDGGGSSGSSGGLDDEYRLYSPLVKPDQNIQFWLEQFPQAWAETAGMGLAKQVPPQVIQLKASATPVSVRQYPLSKEAQEGIRPHVQRLIQQGILVPVQSPWNTPLLPVRKPGTNDYRPVQDLREVNKRVQDIHPTVPNPYNLLCALPPQRSWYTVLDLKDAFFCLRLHPTSQPLFAFEWRDPGTGRTGQLTWTRLPQGFKNSPTIFNEALHRDLANFRIQHPQVTLLQYVDDLLLAGATKQDCLEGTKALLLELSDLGYRASAKKAQICRREVTYLGYSLRDGQRWLTEARKKTVVQIPAPTTAKQVREFLGKAGFCRLFIPGFATLAAPLYPLTKPKGEFSWAPEHQKAFDAIKKALLSAPALALPDVTKPFTLYVDERKGVARGVLTQTLGPWRRPVAYLSKKLDPVASGWPVCLKAIAAVAILVKDADKLTLGQNITVIAPHALENIVRQPPDRWMTNARMTHYQSLLLTERVTFAPPAALNPATLLPEETDEPVTHDCHQLLIEETGVRKDLTDIPLTGEVLTWFTDGSSYVVEGKRMAGAAVVDGTRTIWASSLPEGTSAQKAELMALTQALRLAEGKSINIYTDSRYAFATAHVHGAIYKQRGWLTSAGREIKNKEEILSLLEALHLPKRLAIIHCPGHQKAKDPISRGNQMADRVAKQAAQGVNLLPAGKRTADGSEFEKRTADGSEFESPKKKAKVE

SEQ ID NO: 236 - protein, 2089 aa, synthetic construct; identical to SEQ ID NO: 67

SEQ ID NO: 237 - protein, 2085 aa, synthetic construct
MPAAKRVKLDGGDKKYSIGLDIGTNSVGWAVITDEYKVPSKKFKVLGNTDRHSIKKNLIGALLFDSGETAEATRLKRTARRRYTRRKNRICYLQEIFSNEMAKVDDSFFHRLEESFLVEEDKKHERHPIFGNIVDEVAYHEKYPTIYHLRKKLVDSTDKADLRLIYLALAHMIKFRGHFLIEGDLNPDNSDVDKLFIQLVQTYNQLFEENPINASGVDAKAILSARLSKSRRLENLIAQLPGEKKNGLFGNLIALSLGLTPNFKSNFDLAEDAKLQLSKDTYDDDLDNLLAQIGDQYADLFLAAKNLSDAILLSDILRVNTEITKAPLSASMIKRYDEHHQDLTLLKALVRQQLPEKYKEIFFDQSKNGYAGYIDGGASQEEFYKFIKPILEKMDGTEELLVKLNREDLLRKQRTFDNGSIPHQIHLGELHAILRRQEDFYPFLKDNREKIEKILTFRIPYYVGPLARGNSRFAWMTRKSEETITPWNFEEVVDKGASAQSFIERMTNFDKNLPNEKVLPKHSLLYEYFTVYNELTKVKYVTEGMRKPAFLSGEQKKAIVDLLFKTNRKVTVKQLKEDYFKKIECFDSVEISGVEDRFNASLGTYHDLLKIIKDKDFLDNEENEDILEDIVLTLTLFEDREMIEERLKTYAHLFDDKVMKQLKRRRYTGWGRLSRKLINGIRDKQSGKTILDFLKSDGFANRNFMQLIHDDSLTFKEDIQKAQVSGQGDSLHEHIANLAGSPAIKKGILQTVKVVDELVKVMGRHKPENIVIEMARENQTTQKGQKNSRERMKRIEEGIKELGSQILKEHPVENTQLQNEKLYLYYLQNGRDMYVDQELDINRLSDYDVDHIVPQSFLKDDSIDNKVLTRSDKARGKSDNVPSEEVVKKMKNYWRQLLNAKLITQRKFDNLTKAERGGLSELDKAGFIKRQLVETRQITKHVAQILDSRMNTKYDENDKLIREVKVITLKSKLVSDFRKDFQFYKVREINNYHHAHDAYLNAVVGTALIKKYPKLESEFVYGDYKVYDVRKMIAKSEQEIGKATAKYFFYSNIMNFFKTEITLANGEIRKRPLIETNGETGEIVWDKGRDFATVRKVLSMPQVNIVKKTEVQTGGFSKESILPKRNSDKLIARKKDWDPKKYGGFDSPTVAYSVLVVAKVEKGKSKKLKSVKELLGITIMERSSFEKNPIDFLEAKGYKEVKKDLIIKLPKYSLFELENGRKRMLASAGELQKGNELALPSKYVNFLYLASHYEKLKGSPEDNEQKQLFVEQHKHYLDEIIEQISEFSKRVILADANLDKVLSAYNKHRDKPIREQAENIIHLFTLTNLGAPAAFKYFDTTIDRKRYTSTKEVLDATLIHQSITGLYETRIDLSQLGGDGGGSSEAAAKGGLDDEYRLYSPLVKPDQNIQFWLEQFPQAWAETAGMGLAKQVPPQVIQLKASATPVSVRQYPLSKEAQEGIRPHVQRLIQQGILVPVQSPWNTPLLPVRKPGTNDYRPVQDLREVNKRVQDIHPTVPNPYNLLCALPPQRSWYTVLDLKDAFFCLRLHPTSQPLFAFEWRDPGTGRTGQLTWTRLPQGFKNSPTIFNEALHRDLANFRIQHPQVTLLQYVDDLLLAGATKQDCLEGTKALLLELSDLGYRASAKKAQICRREVTYLGYSLRDGQRWLTEARKKTVVQIPAPTTAKQVREFLGKAGFCRLFIPGFATLAAPLYPLTKPKGEFSWAPEHQKAFDAIKKALLSAPALALPDVTKPFTLYVDERKGVARGVLTQTLGPWRRPVAYLSKKLDPVASGWPVCLKAIAAVAILVKDADKLTLGQNITVIAPHALENIVRQPPDRWMTNARMTHYQSLLLTERVTFAPPAALNPATLLPEETDEPVTHDCHQLLIEETGVRKDLTDIPLTGEVLTWFTDGSSYVVEGKRMAGAAVVDGTRTIWASSLPEGTSAQKAELMALTQALRLAEGKSINIYTDSRYAFATAHVHGAIYKQRGWLTSAGREIKNKEEILSLLEALHLPKRLAIIHCPGHQKAKDPISRGNQMADRVAKQAAQGVNLLPAGKRTADGSEFEKRTADGSEFESPKKKAKVE

SEQ ID NO: 238 - protein, 2092 aa, synthetic construct; identical to SEQ ID NO: 52

SEQ ID NO: 239 - protein, 2088 aa, synthetic construct; identical to SEQ ID NO: 49

SEQ ID NO: 240 - protein, 2088 aa, synthetic construct
MPAAKRVKLDGGDKKYSIGLDIGTNSVGWAVITDEYKVPSKKFKVLGNTDRHSIKKNLIGALLFDSGETAEATRLKRTARRRYTRRKNRICYLQEIFSNEMAKVDDSFFHRLEESFLVEEDKKHERHPIFGNIVDEVAYHEKYPTIYHLRKKLVDSTDKADLRLIYLALAHMIKFRGHFLIEGDLNPDNSDVDKLFIQLVQTYNQLFEENPINASGVDAKAILSARLSKSRRLENLIAQLPGEKKNGLFGNLIALSLGLTPNFKSNFDLAEDAKLQLSKDTYDDDLDNLLAQIGDQYADLFLAAKNLSDAILLSDILRVNTEITKAPLSASMIKRYDEHHQDLTLLKALVRQQLPEKYKEIFFDQSKNGYAGYIDGGASQEEFYKFIKPILEKMDGTEELLVKLNREDLLRKQRTFDNGSIPHQIHLGELHAILRRQEDFYPFLKDNREKIEKILTFRIPYYVGPLARGNSRFAWMTRKSEETITPWNFEEVVDKGASAQSFIERMTNFDKNLPNEKVLPKHSLLYEYFTVYNELTKVKYVTEGMRKPAFLSGEQKKAIVDLLFKTNRKVTVKQLKEDYFKKIECFDSVEISGVEDRFNASLGTYHDLLKIIKDKDFLDNEENEDILEDIVLTLTLFEDREMIEERLKTYAHLFDDKVMKQLKRRRYTGWGRLSRKLINGIRDKQSGKTILDFLKSDGFANRNFMQLIHDDSLTFKEDIQKAQVSGQGDSLHEHIANLAGSPAIKKGILQTVKVVDELVKVMGRHKPENIVIEMARENQTTQKGQKNSRERMKRIEEGIKELGSQILKEHPVENTQLQNEKLYLYYLQNGRDMYVDQELDINRLSDYDVDHIVPQSFLKDDSIDNKVLTRSDKARGKSDNVPSEEVVKKMKNYWRQLLNAKLITQRKFDNLTKAERGGLSELDKAGFIKRQLVETRQITKHVAQILDSRMNTKYDENDKLIREVKVITLKSKLVSDFRKDFQFYKVREINNYHHAHDAYLNAVVGTALIKKYPKLESEFVYGDYKVYDVRKMIAKSEQEIGKATAKYFFYSNIMNFFKTEITLANGEIRKRPLIETNGETGEIVWDKGRDFATVRKVLSMPQVNIVKKTEVQTGGFSKESILPKRNSDKLIARKKDWDPKKYGGFDSPTVAYSVLVVAKVEKGKSKKLKSVKELLGITIMERSSFEKNPIDFLEAKGYKEVKKDLIIKLPKYSLFELENGRKRMLASAGELQKGNELALPSKYVNFLYLASHYEKLKGSPEDNEQKQLFVEQHKHYLDEIIEQISEFSKRVILADANLDKVLSAYNKHRDKPIREQAENIIHLFTLTNLGAPAAFKYFDTTIDRKRYTSTKEVLDATLIHQSITGLYETRIDLSQLGGDGGGGGEAAAKGSSGGLDDEYRLYSPLVKPDQNIQFWLEQFPQAWAETAGMGLAKQVPPQVIQLKASATPVSVRQYPLSKEAQEGIRPHVQRLIQQGILVPVQSPWNTPLLPVRKPGTNDYRPVQDLREVNKRVQDIHPTVPNPYNLLCALPPQRSWYTVLDLKDAFFCLRLHPTSQPLFAFEWRDPGTGRTGQLTWTRLPQGFKNSPTIFNEALHRDLANFRIQHPQVTLLQYVDDLLLAGATKQDCLEGTKALLLELSDLGYRASAKKAQICRREVTYLGYSLRDGQRWLTEARKKTVVQIPAPTTAKQVREFLGKAGFCRLFIPGFATLAAPLYPLTKPKGEFSWAPEHQKAFDAIKKALLSAPALALPDVTKPFTLYVDERKGVARGVLTQTLGPWRRPVAYLSKKLDPVASGWPVCLKAIAAVAILVKDADKLTLGQNITVIAPHALENIVRQPPDRWMTNARMTHYQSLLLTERVTFAPPAALNPATLLPEETDEPVTHDCHQLLIEETGVRKDLTDIPLTGEVLTWFTDGSSYVVEGKRMAGAAVVDGTRTIWASSLPEGTSAQKAELMALTQALRLAEGKSINIYTDSRYAFATAHVHGAIYKQRGWLTSAGREIKNKEEILSLLEALHLPKRLAIIHCPGHQKAKDPISRGNQMADRVAKQAAQGVNLLPAGKRTADGSEFEKRTADGSEFESPKKKAKVE

SEQ ID NO: 241 - protein, 2086 aa, synthetic construct
MPAAKRVKLDGGDKKYSIGLDIGTNSVGWAVITDEYKVPSKKFKVLGNTDRHSIKKNLIGALLFDSGETAEATRLKRTARRRYTRRKNRICYLQEIFSNEMAKVDDSFFHRLEESFLVEEDKKHERHPIFGNIVDEVAYHEKYPTIYHLRKKLVDSTDKADLRLIYLALAHMIKFRGHFLIEGDLNPDNSDVDKLFIQLVQTYNQLFEENPINASGVDAKAILSARLSKSRRLENLIAQLPGEKKNGLFGNLIALSLGLTPNFKSNFDLAEDAKLQLSKDTYDDDLDNLLAQIGDQYADLFLAAKNLSDAILLSDILRVNTEITKAPLSASMIKRYDEHHQDLTLLKALVRQQLPEKYKEIFFDQSKNGYAGYIDGGASQEEFYKFIKPILEKMDGTEELLVKLNREDLLRKQRTFDNGSIPHQIHLGELHAILRRQEDFYPFLKDNREKIEKILTFRIPYYVGPLARGNSRFAWMTRKSEETITPWNFEEVVDKGASAQSFIERMTNFDKNLPNEKVLPKHSLLYEYFTVYNELTKVKYVTEGMRKPAFLSGEQKKAIVDLLFKTNRKVTVKQLKEDYFKKIECFDSVEISGVEDRFNASLGTYHDLLKIIKDKDFLDNEENEDILEDIVLTLTLFEDREMIEERLKTYAHLFDDKVMKQLKRRRYTGWGRLSRKLINGIRDKQSGKTILDFLKSDGFANRNFMQLIHDDSLTFKEDIQKAQVSGQGDSLHEHIANLAGSPAIKKGILQTVKVVDELVKVMGRHKPENIVIEMARENQTTQKGQKNSRERMKRIEEGIKELGSQILKEHPVENTQLQNEKLYLYYLQNGRDMYVDQELDINRLSDYDVDHIVPQSFLKDDSIDNKVLTRSDKARGKSDNVPSEEVVKKMKNYWRQLLNAKLITQRKFDNLTKAERGGLSELDKAGFIKRQLVETRQITKHVAQILDSRMNTKYDENDKLIREVKVITLKSKLVSDFRKDFQFYKVREINNYHHAHDAYLNAVVGTALIKKYPKLESEFVYGDYKVYDVRKMIAKSEQEIGKATAKYFFYSNIMNFFKTEITLANGEIRKRPLIETNGETGEIVWDKGRDFATVRKVLSMPQVNIVKKTEVQTGGFSKESILPKRNSDKLIARKKDWDPKKYGGFDSPTVAYSVLVVAKVEKGKSKKLKSVKELLGITIMERSSFEKNPIDFLEAKGYKEVKKDLIIKLPKYSLFELENGRKRMLASAGELQKGNELALPSKYVNFLYLASHYEKLKGSPEDNEQKQLFVEQHKHYLDEIIEQISEFSKRVILADANLDKVLSAYNKHRDKPIREQAENIIHLFTLTNLGAPAAFKYFDTTIDRKRYTSTKEVLDATLIHQSITGLYETRIDLSQLGGDGGGGSGSSGGGGGLDDEYRLYSPLVKPDQNIQFWLEQFPQAWAETAGMGLAKQVPPQVIQLKASATPVSVRQYPLSKEAQEGIRPHVQRLIQQGILVPVQSPWNTPLLPVRKPGTNDYRPVQDLREVNKRVQDIHPTVPNPYNLLCALPPQRSWYTVLDLKDAFFCLRLHPTSQPLFAFEWRDPGTGRTGQLTWTRLPQGFKNSPTIFNEALHRDLANFRIQHPQVTLLQYVDDLLLAGATKQDCLEGTKALLLELSDLGYRASAKKAQICRREVTYLGYSLRDGQRWLTEARKKTVVQIPAPTTAKQVREFLGKAGFCRLFIPGFATLAAPLYPLTKPKGEFSWAPEHQKAFDAIKKALLSAPALALPDVTKPFTLYVDERKGVARGVLTQTLGPWRRPVAYLSKKLDPVASGWPVCLKAIAAVAILVKDADKLTLGQNITVIAPHALENIVRQPPDRWMTNARMTHYQSLLLTERVTFAPPAALNPATLLPEETDEPVTHDCHQLLIEETGVRKDLTDIPLTGEVLTWFTDGSSYVVEGKRMAGAAVVDGTRTIWASSLPEGTSAQKAELMALTQALRLAEGKSINIYTDSRYAFATAHVHGAIYKQRGWLTSAGREIKNKEEILSLLEALHLPKRLAIIHCPGHQKAKDPISRGNQMADRVAKQAAQGVNLLPAGKRTADGSEFEKRTADGSEFESPKKKAKVE

SEQ ID NO: 242 - protein, 2088 aa, synthetic construct
MPAAKRVKLDGGDKKYSIGLDIGTNSVGWAVITDEYKVPSKKFKVLGNTDRHSIKKNLIGALLFDSGETAEATRLKRTARRRYTRRKNRICYLQEIFSNEMAKVDDSFFHRLEESFLVEEDKKHERHPIFGNIVDEVAYHEKYPTIYHLRKKLVDSTDKADLRLIYLALAHMIKFRGHFLIEGDLNPDNSDVDKLFIQLVQTYNQLFEENPINASGVDAKAILSARLSKSRRLENLIAQLPGEKKNGLFGNLIALSLGLTPNFKSNFDLAEDAKLQLSKDTYDDDLDNLLAQIGDQYADLFLAAKNLSDAILLSDILRVNTEITKAPLSASMIKRYDEHHQDLTLLKALVRQQLPEKYKEIFFDQSKNGYAGYIDGGASQEEFYKFIKPILEKMDGTEELLVKLNREDLLRKQRTFDNGSIPHQIHLGELHAILRRQEDFYPFLKDNREKIEKILTFRIPYYVGPLARGNSRFAWMTRKSEETITPWNFEEVVDKGASAQSFIERMTNFDKNLPNEKVLPKHSLLYEYFTVYNELTKVKYVTEGMRKPAFLSGEQKKAIVDLLFKTNRKVTVKQLKEDYFKKIECFDSVEISGVEDRFNASLGTYHDLLKIIKDKDFLDNEENEDILEDIVLTLTLFEDREMIEERLKTYAHLFDDKVMKQLKRRRYTGWGRLSRKLINGIRDKQSGKTILDFLKSDGFANRNFMQLIHDDSLTFKEDIQKAQVSGQGDSLHEHIANLAGSPAIKKGILQTVKVVDELVKVMGRHKPENIVIEMARENQTTQKGQKNSRERMKRIEEGIKELGSQILKEHPVENTQLQNEKLYLYYLQNGRDMYVDQELDINRLSDYDVDHIVPQSFLKDDSIDNKVLTRSDKARGKSDNVPSEEVVKKMKNYWRQLLNAKLITQRKFDNLTKAERGGLSELDKAGFIKRQLVETRQITKHVAQILDSRMNTKYDENDKLIREVKVITLKSKLVSDFRKDFQFYKVREINNYHHAHDAYLNAVVGTALIKKYPKLESEFVYGDYKVYDVRKMIAKSEQEIGKATAKYFFYSNIMNFFKTEITLANGEIRKRPLIETNGETGEIVWDKGRDFATVRKVLSMPQVNIVKKTEVQTGGFSKESILPKRNSDKLIARKKDWDPKKYGGFDSPTVAYSVLVVAKVEKGKSKKLKSVKELLGITIMERSSFEKNPIDFLEAKGYKEVKKDLIIKLPKYSLFELENGRKRMLASAGELQKGNELALPSKYVNFLYLASHYEKLKGSPEDNEQKQLFVEQHKHYLDEIIEQISEFSKRVILADANLDKVLSAYNKHRDKPIREQAENIIHLFTLTNLGAPAAFKYFDTTIDRKRYTSTKEVLDATLIHQSITGLYETRIDLSQLGGDGGEAAAKGSSPAPGGLDDEYRLYSPLVKPDQNIQFWLEQFPQAWAETAGMGLAKQVPPQVIQLKASATPVSVRQYPLSKEAQEGIRPHVQRLIQQGILVPVQSPWNTPLLPVRKPGTNDYRPVQDLREVNKRVQDIHPTVPNPYNLLCALPPQRSWYTVLDLKDAFFCLRLHPTSQPLFAFEWRDPGTGRTGQLTWTRLPQGFKNSPTIFNEALHRDLANFRIQHPQVTLLQYVDDLLLAGATKQDCLEGTKALLLELSDLGYRASAKKAQICRREVTYLGYSLRDGQRWLTEARKKTVVQIPAPTTAKQVREFLGKAGFCRLFIPGFATLAAPLYPLTKPKGEFSWAPEHQKAFDAIKKALLSAPALALPDVTKPFTLYVDERKGVARGVLTQTLGPWRRPVAYLSKKLDPVASGWPVCLKAIAAVAILVKDADKLTLGQNITVIAPHALENIVRQPPDRWMTNARMTHYQSLLLTERVTFAPPAALNPATLLPEETDEPVTHDCHQLLIEETGVRKDLTDIPLTGEVLTWFTDGSSYVVEGKRMAGAAVVDGTRTIWASSLPEGTSAQKAELMALTQALRLAEGKSINIYTDSRYAFATAHVHGAIYKQRGWLTSAGREIKNKEEILSLLEALHLPKRLAIIHCPGHQKAKDPISRGNQMADRVAKQAAQGVNLLPAGKRTADGSEFEKRTADGSEFESPKKKAKVE

SEQ ID NO: 243 - protein, 2088 aa, synthetic construct
MPAAKRVKLDGGDKKYSIGLDIGTNSVGWAVITDEYKVPSKKFKVLGNTDRHSIKKNLIGALLFDSGETAEATRLKRTARRRYTRRKNRICYLQEIFSNEMAKVDDSFFHRLEESFLVEEDKKHERHPIFGNIVDEVAYHEKYPTIYHLRKKLVDSTDKADLRLIYLALAHMIKFRGHFLIEGDLNPDNSDVDKLFIQLVQTYNQLFEENPINASGVDAKAILSARLSKSRRLENLIAQLPGEKKNGLFGNLIALSLGLTPNFKSNFDLAEDAKLQLSKDTYDDDLDNLLAQIGDQYADLFLAAKNLSDAILLSDILRVNTEITKAPLSASMIKRYDEHHQDLTLLKALVRQQLPEKYKEIFFDQSKNGYAGYIDGGASQEEFYKFIKPILEKMDGTEELLVKLNREDLLRKQRTFDNGSIPHQIHLGELHAILRRQEDFYPFLKDNREKIEKILTFRIPYYVGPLARGNSRFAWMTRKSEETITPWNFEEVVDKGASAQSFIERMTNFDKNLPNEKVLPKHSLLYEYFTVYNELTKVKYVTEGMRKPAFLSGEQKKAIVDLLFKTNRKVTVKQLKEDYFKKIECFDSVEISGVEDRFNASLGTYHDLLKIIKDKDFLDNEENEDILEDIVLTLTLFEDREMIEERLKTYAHLFDDKVMKQLKRRRYTGWGRLSRKLINGIRDKQSGKTILDFLKSDGFANRNFMQLIHDDSLTFKEDIQKAQVSGQGDSLHEHIANLAGSPAIKKGILQTVKVVDELVKVMGRHKPENIVIEMARENQTTQKGQKNSRERMKRIEEGIKELGSQILKEHPVENTQLQNEKLYLYYLQNGRDMYVDQELDINRLSDYDVDHIVPQSFLKDDSIDNKVLTRSDKARGKSDNVPSEEVVKKMKNYWRQLLNAKLITQRKFDNLTKAERGGLSELDKAGFIKRQLVETRQITKHVAQILDSRMNTKYDENDKLIREVKVITLKSKLVSDFRKDFQFYKVREINNYHHAHDAYLNAVVGTALIKKYPKLESEFVYGDYKVYDVRKMIAKSEQEIGKATAKYFFYSNIMNFFKTEITLANGEIRKRPLIETNGETGEIVWDKGRDFATVRKVLSMPQVNIVKKTEVQTGGFSKESILPKRNSDKLIARKKDWDPKKYGGFDSPTVAYSVLVVAKVEKGKSKKLKSVKELLGITIMERSSFEKNPIDFLEAKGYKEVKKDLIIKLPKYSLFELENGRKRMLASAGELQKGNELALPSKYVNFLYLASHYEKLKGSPEDNEQKQLFVEQHKHYLDEIIEQISEFSKRVILADANLDKVLSAYNKHRDKPIREQAENIIHLFTLTNLGAPAAFKYFDTTIDRKRYTSTKEVLDATLIHQSITGLYETRIDLSQLGGDGGGGSPAPEAAAKGGLDDEYRLYSPLVKPDQNIQFWLEQFPQAWAETAGMGLAKQVPPQVIQLKASATPVSVRQYPLSKEAQEGIRPHVQRLIQQGILVPVQSPWNTPLLPVRKPGTNDYRPVQDLREVNKRVQDIHPTVPNPYNLLCALPPQRSWYTVLDLKDAFFCLRLHPTSQPLFAFEWRDPGTGRTGQLTWTRLPQGFKNSPTIFNEALHRDLANFRIQHPQVTLLQYVDDLLLAGATKQDCLEGTKALLLELSDLGYRASAKKAQICRREVTYLGYSLRDGQRWLTEARKKTVVQIPAPTTAKQVREFLGKAGFCRLFIPGFATLAAPLYPLTKPKGEFSWAPEHQKAFDAIKKALLSAPALALPDVTKPFTLYVDERKGVARGVLTQTLGPWRRPVAYLSKKLDPVASGWPVCLKAIAAVAILVKDADKLTLGQNITVIAPHALENIVRQPPDRWMTNARMTHYQSLLLTERVTFAPPAALNPATLLPEETDEPVTHDCHQLLIEETGVRKDLTDIPLTGEVLTWFTDGSSYVVEGKRMAGAAVVDGTRTIWASSLPEGTSAQKAELMALTQALRLAEGKSINIYTDSRYAFATAHVHGAIYKQRGWLTSAGREIKNKEEILSLLEALHLPKRLAIIHCPGHQKAKDPISRGNQMADRVAKQAAQGVNLLPAGKRTADGSEFEKRTADGSEFESPKKKAKVE

SEQ ID NO: 244 - protein, 2084 aa, synthetic construct; identical to SEQ ID NO: 77

SEQ ID NO: 245 - protein, 2081 aa, synthetic construct; identical to SEQ ID NO: 66

SEQ ID NO: 246 - protein, 2080 aa, synthetic construct
MPAAKRVKLDGGDKKYSIGLDIGTNSVGWAVITDEYKVPSKKFKVLGNTDRHSIKKNLIGALLFDSGETAEATRLKRTARRRYTRRKNRICYLQEIFSNEMAKVDDSFFHRLEESFLVEEDKKHERHPIFGNIVDEVAYHEKYPTIYHLRKKLVDSTDKADLRLIYLALAHMIKFRGHFLIEGDLNPDNSDVDKLFIQLVQTYNQLFEENPINASGVDAKAILSARLSKSRRLENLIAQLPGEKKNGLFGNLIALSLGLTPNFKSNFDLAEDAKLQLSKDTYDDDLDNLLAQIGDQYADLFLAAKNLSDAILLSDILRVNTEITKAPLSASMIKRYDEHHQDLTLLKALVRQQLPEKYKEIFFDQSKNGYAGYIDGGASQEEFYKFIKPILEKMDGTEELLVKLNREDLLRKQRTFDNGSIPHQIHLGELHAILRRQEDFYPFLKDNREKIEKILTFRIPYYVGPLARGNSRFAWMTRKSEETITPWNFEEVVDKGASAQSFIERMTNFDKNLPNEKVLPKHSLLYEYFTVYNELTKVKYVTEGMRKPAFLSGEQKKAIVDLLFKTNRKVTVKQLKEDYFKKIECFDSVEISGVEDRFNASLGTYHDLLKIIKDKDFLDNEENEDILEDIVLTLTLFEDREMIEERLKTYAHLFDDKVMKQLKRRRYTGWGRLSRKLINGIRDKQSGKTILDFLKSDGFANRNFMQLIHDDSLTFKEDIQKAQVSGQGDSLHEHIANLAGSPAIKKGILQTVKVVDELVKVMGRHKPENIVIEMARENQTTQKGQKNSRERMKRIEEGIKELGSQILKEHPVENTQLQNEKLYLYYLQNGRDMYVDQELDINRLSDYDVDHIVPQSFLKDDSIDNKVLTRSDKARGKSDNVPSEEVVKKMKNYWRQLLNAKLITQRKFDNLTKAERGGLSELDKAGFIKRQLVETRQITKHVAQILDSRMNTKYDENDKLIREVKVITLKSKLVSDFRKDFQFYKVREINNYHHAHDAYLNAVVGTALIKKYPKLESEFVYGDYKVYDVRKMIAKSEQEIGKATAKYFFYSNIMNFFKTEITLANGEIRKRPLIETNGETGEIVWDKGRDFATVRKVLSMPQVNIVKKTEVQTGGFSKESILPKRNSDKLIARKKDWDPKKYGGFDSPTVAYSVLVVAKVEKGKSKKLKSVKELLGITIMERSSFEKNPIDFLEAKGYKEVKKDLIIKLPKYSLFELENGRKRMLASAGELQKGNELALPSKYVNFLYLASHYEKLKGSPEDNEQKQLFVEQHKHYLDEIIEQISEFSKRVILADANLDKVLSAYNKHRDKPIREQAENIIHLFTLTNLGAPAAFKYFDTTIDRKRYTSTKEVLDATLIHQSITGLYETRIDLSQLGGDGGGGGGGLDDEYRLYSPLVKPDQNIQFWLEQFPQAWAETAGMGLAKQVPPQVIQLKASATPVSVRQYPLSKEAQEGIRPHVQRLIQQGILVPVQSPWNTPLLPVRKPGTNDYRPVQDLREVNKRVQDIHPTVPNPYNLLCALPPQRSWYTVLDLKDAFFCLRLHPTSQPLFAFEWRDPGTGRTGQLTWTRLPQGFKNSPTIFNEALHRDLANFRIQHPQVTLLQYVDDLLLAGATKQDCLEGTKALLLELSDLGYRASAKKAQICRREVTYLGYSLRDGQRWLTEARKKTVVQIPAPTTAKQVREFLGKAGFCRLFIPGFATLAAPLYPLTKPKGEFSWAPEHQKAFDAIKKALLSAPALALPDVTKPFTLYVDERKGVARGVLTQTLGPWRRPVAYLSKKLDPVASGWPVCLKAIAAVAILVKDADKLTLGQNITVIAPHALENIVRQPPDRWMTNARMTHYQSLLLTERVTFAPPAALNPATLLPEETDEPVTHDCHQLLIEETGVRKDLTDIPLTGEVLTWFTDGSSYVVEGKRMAGAAVVDGTRTIWASSLPEGTSAQKAELMALTQALRLAEGKSINIYTDSRYAFATAHVHGAIYKQRGWLTSAGREIKNKEEILSLLEALHLPKRLAIIHCPGHQKAKDPISRGNQMADRVAKQAAQGVNLLPAGKRTADGSEFEKRTADGSEFESPKKKAKVE

SEQ ID NO: 247 - protein, 2088 aa, synthetic construct
MPAAKRVKLDGGDKKYSIGLDIGTNSVGWAVITDEYKVPSKKFKVLGNTDRHSIKKNLIGALLFDSGETAEATRLKRTARRRYTRRKNRICYLQEIFSNEMAKVDDSFFHRLEESFLVEEDKKHERHPIFGNIVDEVAYHEKYPTIYHLRKKLVDSTDKADLRLIYLALAHMIKFRGHFLIEGDLNPDNSDVDKLFIQLVQTYNQLFEENPINASGVDAKAILSARLSKSRRLENLIAQLPGEKKNGLFGNLIALSLGLTPNFKSNFDLAEDAKLQLSKDTYDDDLDNLLAQIGDQYADLFLAAKNLSDAILLSDILRVNTEITKAPLSASMIKRYDEHHQDLTLLKALVRQQLPEKYKEIFFDQSKNGYAGYIDGGASQEEFYKFIKPILEKMDGTEELLVKLNREDLLRKQRTFDNGSIPHQIHLGELHAILRRQEDFYPFLKDNREKIEKILTFRIPYYVGPLARGNSRFAWMTRKSEETITPWNFEEVVDKGASAQSFIERMTNFDKNLPNEKVLPKHSLLYEYFTVYNELTKVKYVTEGMRKPAFLSGEQKKAIVDLLFKTNRKVTVKQLKEDYFKKIECFDSVEISGVEDRFNASLGTYHDLLKIIKDKDFLDNEENEDILEDIVLTLTLFEDREMIEERLKTYAHLFDDKVMKQLKRRRYTGWGRLSRKLINGIRDKQSGKTILDFLKSDGFANRNFMQLIHDDSLTFKEDIQKAQVSGQGDSLHEHIANLAGSPAIKKGILQTVKVVDELVKVMGRHKPENIVIEMARENQTTQKGQKNSRERMKRIEEGIKELGSQILKEHPVENTQLQNEKLYLYYLQNGRDMYVDQELDINRLSDYDVDHIVPQSFLKDDSIDNKVLTRSDKARGKSDNVPSEEVVKKMKNYWRQLLNAKLITQRKFDNLTKAERGGLSELDKAGFIKRQLVETRQITKHVAQILDSRMNTKYDENDKLIREVKVITLKSKLVSDFRKDFQFYKVREINNYHHAHDAYLNAVVGTALIKKYPKLESEFVYGDYKVYDVRKMIAKSEQEIGKATAKYFFYSNIMNFFKTEITLANGEIRKRPLIETNGETGEIVWDKGRDFATVRKVLSMPQVNIVKKTEVQTGGFSKESILPKRNSDKLIARKKDWDPKKYGGFDSPTVAYSVLVVAKVEKGKSKKLKSVKELLGITIMERSSFEKNPIDFLEAKGYKEVKKDLIIKLPKYSLFELENGRKRMLASAGELQKGNELALPSKYVNFLYLASHYEKLKGSPEDNEQKQLFVEQHKHYLDEIIEQISEFSKRVILADANLDKVLSAYNKHRDKPIREQAENIIHLFTLTNLGAPAAFKYFDTTIDRKRYTSTKEVLDATLIHQSITGLYETRIDLSQLGGDGGEAAAKPAPGGSGGLDDEYRLYSPLVKPDQNIQFWLEQFPQAWAETAGMGLAKQVPPQVIQLKASATPVSVRQYPLSKEAQEGIRPHVQRLIQQGILVPVQSPWNTPLLPVRKPGTNDYRPVQDLREVNKRVQDIHPTVPNPYNLLCALPPQRSWYTVLDLKDAFFCLRLHPTSQPLFAFEWRDPGTGRTGQLTWTRLPQGFKNSPTIFNEALHRDLANFRIQHPQVTLLQYVDDLLLAGATKQDCLEGTKALLLELSDLGYRASAKKAQICRREVTYLGYSLRDGQRWLTEARKKTVVQIPAPTTAKQVREFLGKAGFCRLFIPGFATLAAPLYPLTKPKGEFSWAPEHQKAFDAIKKALLSAPALALPDVTKPFTLYVDERKGVARGVLTQTLGPWRRPVAYLSKKLDPVASGWPVCLKAIAAVAILVKDADKLTLGQNITVIAPHALENIVRQPPDRWMTNARMTHYQSLLLTERVTFAPPAALNPATLLPEETDEPVTHDCHQLLIEETGVRKDLTDIPLTGEVLTWFTDGSSYVVEGKRMAGAAVVDGTRTIWASSLPEGTSAQKAELMALTQALRLAEGKSINIYTDSRYAFATAHVHGAIYKQRGWLTSAGREIKNKEEILSLLEALHLPKRLAIIHCPGHQKAKDPISRGNQMADRVAKQAAQGVNLLPAGKRTADGSEFEKRTADGSEFESPKKKAKVE

SEQ ID NO: 248 - protein, 2088 aa, synthetic construct; identical to SEQ ID NO: 94

SEQ ID NO: 249 - protein, 2086 aa, synthetic construct; identical to SEQ ID NO: 60

SEQ ID NO: 250 - protein, 2088 aa, synthetic construct
MPAAKRVKLDGGDKKYSIGLDIGTNSVGWAVITDEYKVPSKKFKVLGNTDRHSIKKNLIGALLFDSGETAEATRLKRTARRRYTRRKNRICYLQEIFSNEMAKVDDSFFHRLEESFLVEEDKKHERHPIFGNIVDEVAYHEKYPTIYHLRKKLVDSTDKADLRLIYLALAHMIKFRGHFLIEGDLNPDNSDVDKLFIQLVQTYNQLFEENPINASGVDAKAILSARLSKSRRLENLIAQLPGEKKNGLFGNLIALSLGLTPNFKSNFDLAEDAKLQLSKDTYDDDLDNLLAQIGDQYADLFLAAKNLSDAILLSDILRVNTEITKAPLSASMIKRYDEHHQDLTLLKALVRQQLPEKYKEIFFDQSKNGYAGYIDGGASQEEFYKFIKPILEKMDGTEELLVKLNREDLLRKQRTFDNGSIPHQIHLGELHAILRRQEDFYPFLKDNREKIEKILTFRIPYYVGPLARGNSRFAWMTRKSEETITPWNFEEVVDKGASAQSFIERMTNFDKNLPNEKVLPKHSLLYEYFTVYNELTKVKYVTEGMRKPAFLSGEQKKAIVDLLFKTNRKVTVKQLKEDYFKKIECFDSVEISGVEDRFNASLGTYHDLLKIIKDKDFLDNEENEDILEDIVLTLTLFEDREMIEERLKTYAHLFDDKVMKQLKRRRYTGWGRLSRKLINGIRDKQSGKTILDFLKSDGFANRNFMQLIHDDSLTFKEDIQKAQVSGQGDSLHEHIANLAGSPAIKKGILQTVKVVDELVKVMGRHKPENIVIEMARENQTTQKGQKNSRERMKRIEEGIKELGSQILKEHPVENTQLQNEKLYLYYLQNGRDMYVDQELDINRLSDYDVDHIVPQSFLKDDSIDNKVLTRSDKARGKSDNVPSEEVVKKMKNYWRQLLNAKLITQRKFDNLTKAERGGLSELDKAGFIKRQLVETRQITKHVAQILDSRMNTKYDENDKLIREVKVITLKSKLVSDFRKDFQFYKVREINNYHHAHDAYLNAVVGTALIKKYPKLESEFVYGDYKVYDVRKMIAKSEQEIGKATAKYFFYSNIMNFFKTEITLANGEIRKRPLIETNGETGEIVWDKGRDFATVRKVLSMPQVNIVKKTEVQTGGFSKESILPKRNSDKLIARKKDWDPKKYGGFDSPTVAYSVLVVAKVEKGKSKKLKSVKELLGITIMERSSFEKNPIDFLEAKGYKEVKKDLIIKLPKYSLFELENGRKRMLASAGELQKGNELALPSKYVNFLYLASHYEKLKGSPEDNEQKQLFVEQHKHYLDEIIEQISEFSKRVILADANLDKVLSAYNKHRDKPIREQAENIIHLFTLTNLGAPAAFKYFDTTIDRKRYTSTKEVLDATLIHQSITGLYETRIDLSQLGGDGGGGSEAAAKGGGGGLDDEYRLYSPLVKPDQNIQFWLEQFPQAWAETAGMGLAKQVPPQVIQLKASATPVSVRQYPLSKEAQEGIRPHVQRLIQQGILVPVQSPWNTPLLPVRKPGTNDYRPVQDLREVNKRVQDIHPTVPNPYNLLCALPPQRSWYTVLDLKDAFFCLRLHPTSQPLFAFEWRDPGTGRTGQLTWTRLPQGFKNSPTIFNEALHRDLANFRIQHPQVTLLQYVDDLLLAGATKQDCLEGTKALLLELSDLGYRASAKKAQICRREVTYLGYSLRDGQRWLTEARKKTVVQIPAPTTAKQVREFLGKAGFCRLFIPGFATLAAPLYPLTKPKGEFSWAPEHQKAFDAIKKALLSAPALALPDVTKPFTLYVDERKGVARGVLTQTLGPWRRPVAYLSKKLDPVASGWPVCLKAIAAVAILVKDADKLTLGQNITVIAPHALENIVRQPPDRWMTNARMTHYQSLLLTERVTFAPPAALNPATLLPEETDEPVTHDCHQLLIEETGVRKDLTDIPLTGEVLTWFTDGSSYVVEGKRMAGAAVVDGTRTIWASSLPEGTSAQKAELMALTQALRLAEGKSINIYTDSRYAFATAHVHGAIYKQRGWLTSAGREIKNKEEILSLLEALHLPKRLAIIHCPGHQKAKDPISRGNQMADRVAKQAAQGVNLLPAGKRTADGSEFEKRTADGSEFESPKKKAKVE

SEQ ID NO: 251 - protein, 2086 aa, synthetic construct; identical to SEQ ID NO: 82

SEQ ID NO: 252 - protein, 2083 aa, synthetic construct
MPAAKRVKLDGGDKKYSIGLDIGTNSVGWAVITDEYKVPSKKFKVLGNTDRHSIKKNLIGALLFDSGETAEATRLKRTARRRYTRRKNRICYLQEIFSNEMAKVDDSFFHRLEESFLVEEDKKHERHPIFGNIVDEVAYHEKYPTIYHLRKKLVDSTDKADLRLIYLALAHMIKFRGHFLIEGDLNPDNSDVDKLFIQLVQTYNQLFEENPINASGVDAKAILSARLSKSRRLENLIAQLPGEKKNGLFGNLIALSLGLTPNFKSNFDLAEDAKLQLSKDTYDDDLDNLLAQIGDQYADLFLAAKNLSDAILLSDILRVNTEITKAPLSASMIKRYDEHHQDLTLLKALVRQQLPEKYKEIFFDQSKNGYAGYIDGGASQEEFYKFIKPILEKMDGTEELLVKLNREDLLRKQRTFDNGSIPHQIHLGELHAILRRQEDFYPFLKDNREKIEKILTFRIPYYVGPLARGNSRFAWMTRKSEETITPWNFEEVVDKGASAQSFIERMTNFDKNLPNEKVLPKHSLLYEYFTVYNELTKVKYVTEGMRKPAFLSGEQKKAIVDLLFKTNRKVTVKQLKEDYFKKIECFDSVEISGVEDRFNASLGTYHDLLKIIKDKDFLDNEENEDILEDIVLTLTLFEDREMIEERLKTYAHLFDDKVMKQLKRRRYTGWGRLSRKLINGIRDKQSGKTILDFLKSDGFANRNFMQLIHDDSLTFKEDIQKAQVSGQGDSLHEHIANLAGSPAIKKGILQTVKVVDELVKVMGRHKPENIVIEMARENQTTQKGQKNSRERMKRIEEGIKELGSQILKEHPVENTQLQNEKLYLYYLQNGRDMYVDQELDINRLSDYDVDHIVPQSFLKDDSIDNKVLTRSDKARGKSDNVPSEEVVKKMKNYWRQLLNAKLITQRKFDNLTKAERGGLSELDKAGFIKRQLVETRQITKHVAQILDSRMNTKYDENDKLIREVKVITLKSKLVSDFRKDFQFYKVREINNYHHAHDAYLNAVVGTALIKKYPKLESEFVYGDYKVYDVRKMIAKSEQEIGKATAKYFFYSNIMNFFKTEITLANGEIRKRPLIETNGETGEIVWDKGRDFATVRKVLSMPQVNIVKKTEVQTGGFSKESILPKRNSDKLIARKKDWDPKKYGGFDSPTVAYSVLVVAKVEKGKSKKLKSVKELLGITIMERSSFEKNPIDFLEAKGYKEVKKDLIIKLPKYSLFELENGRKRMLASAGELQKGNELALPSKYVNFLYLASHYEKLKGSPEDNEQKQLFVEQHKHYLDEIIEQISEFSKRVILADANLDKVLSAYNKHRDKPIREQAENIIHLFTLTNLGAPAAFKYFDTTIDRKRYTSTKEVLDATLIHQSITGLYETRIDLSQLGGDGGPAPGGSGGLDDEYRLYSPLVKPDQNIQFWLEQFPQAWAETAGMGLAKQVPPQVIQLKASATPVSVRQYPLSKEAQEGIRPHVQRLIQQGILVPVQSPWNTPLLPVRKPGTNDYRPVQDLREVNKRVQDIHPTVPNPYNLLCALPPQRSWYTVLDLKDAFFCLRLHPTSQPLFAFEWRDPGTGRTGQLTWTRLPQGFKNSPTIFNEALHRDLANFRIQHPQVTLLQYVDDLLLAGATKQDCLEGTKALLLELSDLGYRASAKKAQICRREVTYLGYSLRDGQRWLTEARKKTVVQIPAPTTAKQVREFLGKAGFCRLFIPGFATLAAPLYPLTKPKGEFSWAPEHQKAFDAIKKALLSAPALALPDVTKPFTLYVDERKGVARGVLTQTLGPWRRPVAYLSKKLDPVASGWPVCLKAIAAVAILVKDADKLTLGQNITVIAPHALENIVRQPPDRWMTNARMTHYQSLLLTERVTFAPPAALNPATLLPEETDEPVTHDCHQLLIEETGVRKDLTDIPLTGEVLTWFTDGSSYVVEGKRMAGAAVVDGTRTIWASSLPEGTSAQKAELMALTQALRLAEGKSINIYTDSRYAFATAHVHGAIYKQRGWLTSAGREIKNKEEILSLLEALHLPKRLAIIHCPGHQKAKDPISRGNQMADRVAKQAAQGVNLLPAGKRTADGSEFEKRTADGSEFESPKKKAKVE

SEQ ID NO: 253 - protein, 2083 aa, synthetic construct; identical to SEQ ID NO: 59

SEQ ID NO: 254 - protein, 2088 aa, synthetic construct
MPAAKRVKLDGGDKKYSIGLDIGTNSVGWAVITDEYKVPSKKFKVLGNTDRHSIKKNLIGALLFDSGETAEATRLKRTARRRYTRRKNRICYLQEIFSNEMAKVDDSFFHRLEESFLVEEDKKHERHPIFGNIVDEVAYHEKYPTIYHLRKKLVDSTDKADLRLIYLALAHMIKFRGHFLIEGDLNPDNSDVDKLFIQLVQTYNQLFEENPINASGVDAKAILSARLSKSRRLENLIAQLPGEKKNGLFGNLIALSLGLTPNFKSNFDLAEDAKLQLSKDTYDDDLDNLLAQIGDQYADLFLAAKNLSDAILLSDILRVNTEITKAPLSASMIKRYDEHHQDLTLLKALVRQQLPEKYKEIFFDQSKNGYAGYIDGGASQEEFYKFIKPILEKMDGTEELLVKLNREDLLRKQRTFDNGSIPHQIHLGELHAILRRQEDFYPFLKDNREKIEKILTFRIPYYVGPLARGNSRFAWMTRKSEETITPWNFEEVVDKGASAQSFIERMTNFDKNLPNEKVLPKHSLLYEYFTVYNELTKVKYVTEGMRKPAFLSGEQKKAIVDLLFKTNRKVTVKQLKEDYFKKIECFDSVEISGVEDRFNASLGTYHDLLKIIKDKDFLDNEENEDILEDIVLTLTLFEDREMIEERLKTYAHLFDDKVMKQLKRRRYTGWGRLSRKLINGIRDKQSGKTILDFLKSDGFANRNFMQLIHDDSLTFKEDIQKAQVSGQGDSLHEHIANLAGSPAIKKGILQTVKVVDELVKVMGRHKPENIVIEMARENQTTQKGQKNSRERMKRIEEGIKELGSQILKEHPVENTQLQNEKLYLYYLQNGRDMYVDQELDINRLSDYDVDHIVPQSFLKDDSIDNKVLTRSDKARGKSDNVPSEEVVKKMKNYWRQLLNAKLITQRKFDNLTKAERGGLSELDKAGFIKRQLVETRQITKHVAQILDSRMNTKYDENDKLIREVKVITLKSKLVSDFRKDFQFYKVREINNYHHAHDAYLNAVVGTALIKKYPKLESEFVYGDYKVYDVRKMIAKSEQEIGKATAKYFFYSNIMNFFKTEITLANGEIRKRPLIETNGETGEIVWDKGRDFATVRKVLSMPQVNIVKKTEVQTGGFSKESILPKRNSDKLIARKKDWDPKKYGGFDSPTVAYSVLVVAKVEKGKSKKLKSVKELLGITIMERSSFEKNPIDFLEAKGYKEVKKDLIIKLPKYSLFELENGRKRMLASAGELQKGNELALPSKYVNFLYLASHYEKLKGSPEDNEQKQLFVEQHKHYLDEIIEQISEFSKRVILADANLDKVLSAYNKHRDKPIREQAENIIHLFTLTNLGAPAAFKYFDTTIDRKRYTSTKEVLDATLIHQSITGLYETRIDLSQLGGDGGGSSGGSEAAAKGGLDDEYRLYSPLVKPDQNIQFWLEQFPQAWAETAGMGLAKQVPPQVIQLKASATPVSVRQYPLSKEAQEGIRPHVQRLIQQGILVPVQSPWNTPLLPVRKPGTNDYRPVQDLREVNKRVQDIHPTVPNPYNLLCALPPQRSWYTVLDLKDAFFCLRLHPTSQPLFAFEWRDPGTGRTGQLTWTRLPQGFKNSPTIFNEALHRDLANFRIQHPQVTLLQYVDDLLLAGATKQDCLEGTKALLLELSDLGYRASAKKAQICRREVTYLGYSLRDGQRWLTEARKKTVVQIPAPTTAKQVREFLGKAGFCRLFIPGFATLAAPLYPLTKPKGEFSWAPEHQKAFDAIKKALLSAPALALPDVTKPFTLYVDERKGVARGVLTQTLGPWRRPVAYLSKKLDPVASGWPVCLKAIAAVAILVKDADKLTLGQNITVIAPHALENIVRQPPDRWMTNARMTHYQSLLLTERVTFAPPAALNPATLLPEETDEPVTHDCHQLLIEETGVRKDLTDIPLTGEVLTWFTDGSSYVVEGKRMAGAAVVDGTRTIWASSLPEGTSAQKAELMALTQALRLAEGKSINIYTDSRYAFATAHVHGAIYKQRGWLTSAGREIKNKEEILSLLEALHLPKRLAIIHCPGHQKAKDPISRGNQMADRVAKQAAQGVNLLPAGKRTADGSEFEKRTADGSEFESPKKKAKVE

SEQ ID NO: 255 - protein, 2088 aa, synthetic construct; identical to SEQ ID NO: 86

SEQ ID NO: 256 - protein, 2107 aa, synthetic construct
MPAAKRVKLDGGDKKYSIGLDIGTNSVGWAVITDEYKVPSKKFKVLGNTDRHSIKKNLIGALLFDSGETAEATRLKRTARRRYTRRKNRICYLQEIFSNEMAKVDDSFFHRLEESFLVEEDKKHERHPIFGNIVDEVAYHEKYPTIYHLRKKLVDSTDKADLRLIYLALAHMIKFRGHFLIEGDLNPDNSDVDKLFIQLVQTYNQLFEENPINASGVDAKAILSARLSKSRRLENLIAQLPGEKKNGLFGNLIALSLGLTPNFKSNFDLAEDAKLQLSKDTYDDDLDNLLAQIGDQYADLFLAAKNLSDAILLSDILRVNTEITKAPLSASMIKRYDEHHQDLTLLKALVRQQLPEKYKEIFFDQSKNGYAGYIDGGASQEEFYKFIKPILEKMDGTEELLVKLNREDLLRKQRTFDNGSIPHQIHLGELHAILRRQEDFYPFLKDNREKIEKILTFRIPYYVGPLARGNSRFAWMTRKSEETITPWNFEEVVDKGASAQSFIERMTNFDKNLPNEKVLPKHSLLYEYFTVYNELTKVKYVTEGMRKPAFLSGEQKKAIVDLLFKTNRKVTVKQLKEDYFKKIECFDSVEISGVEDRFNASLGTYHDLLKIIKDKDFLDNEENEDILEDIVLTLTLFEDREMIEERLKTYAHLFDDKVMKQLKRRRYTGWGRLSRKLINGIRDKQSGKTILDFLKSDGFANRNFMQLIHDDSLTFKEDIQKAQVSGQGDSLHEHIANLAGSPAIKKGILQTVKVVDELVKVMGRHKPENIVIEMARENQTTQKGQKNSRERMKRIEEGIKELGSQILKEHPVENTQLQNEKLYLYYLQNGRDMYVDQELDINRLSDYDVDHIVPQSFLKDDSIDNKVLTRSDKARGKSDNVPSEEVVKKMKNYWRQLLNAKLITQRKFDNLTKAERGGLSELDKAGFIKRQLVETRQITKHVAQILDSRMNTKYDENDKLIREVKVITLKSKLVSDFRKDFQFYKVREINNYHHAHDAYLNAVVGTALIKKYPKLESEFVYGDYKVYDVRKMIAKSEQEIGKATAKYFFYSNIMNFFKTEITLANGEIRKRPLIETNGETGEIVWDKGRDFATVRKVLSMPQVNIVKKTEVQTGGFSKESILPKRNSDKLIARKKDWDPKKYGGFDSPTVAYSVLVVAKVEKGKSKKLKSVKELLGITIMERSSFEKNPIDFLEAKGYKEVKKDLIIKLPKYSLFELENGRKRMLASAGELQKGNELALPSKYVNFLYLASHYEKLKGSPEDNEQKQLFVEQHKHYLDEIIEQISEFSKRVILADANLDKVLSAYNKHRDKPIREQAENIIHLFTLTNLGAPAAFKYFDTTIDRKRYTSTKEVLDATLIHQSITGLYETRIDLSQLGGDGGGGGGSGGGGSGGGGSGGGGSGGGGSGGGGSGGLDDEYRLYSPLVKPDQNIQFWLEQFPQAWAETAGMGLAKQVPPQVIQLKASATPVSVRQYPLSKEAQEGIRPHVQRLIQQGILVPVQSPWNTPLLPVRKPGTNDYRPVQDLREVNKRVQDIHPTVPNPYNLLCALPPQRSWYTVLDLKDAFFCLRLHPTSQPLFAFEWRDPGTGRTGQLTWTRLPQGFKNSPTIFNEALHRDLANFRIQHPQVTLLQYVDDLLLAGATKQDCLEGTKALLLELSDLGYRASAKKAQICRREVTYLGYSLRDGQRWLTEARKKTVVQIPAPTTAKQVREFLGKAGFCRLFIPGFATLAAPLYPLTKPKGEFSWAPEHQKAFDAIKKALLSAPALALPDVTKPFTLYVDERKGVARGVLTQTLGPWRRPVAYLSKKLDPVASGWPVCLKAIAAVAILVKDADKLTLGQNITVIAPHALENIVRQPPDRWMTNARMTHYQSLLLTERVTFAPPAALNPATLLPEETDEPVTHDCHQLLIEETGVRKDLTDIPLTGEVLTWFTDGSSYVVEGKRMAGAAVVDGTRTIWASSLPEGTSAQKAELMALTQALRLAEGKSINIYTDSRYAFATAHVHGAIYKQRGWLTSAGREIKNKEEILSLLEALHLPKRLAIIHCPGHQKAKDPISRGNQMADRVAKQAAQGVNLLPAGKRTADGSEFEKRTADGSEFESPKKKAKVE

SEQ ID NO: 257 - protein, 2086 aa, synthetic construct; identical to SEQ ID NO: 64

SEQ ID NO: 258 - protein, 2088 aa, synthetic construct
MPAAKRVKLDGGDKKYSIGLDIGTNSVGWAVITDEYKVPSKKFKVLGNTDRHSIKKNLIGALLFDSGETAEATRLKRTARRRYTRRKNRICYLQEIFSNEMAKVDDSFFHRLEESFLVEEDKKHERHPIFGNIVDEVAYHEKYPTIYHLRKKLVDSTDKADLRLIYLALAHMIKFRGHFLIEGDLNPDNSDVDKLFIQLVQTYNQLFEENPINASGVDAKAILSARLSKSRRLENLIAQLPGEKKNGLFGNLIALSLGLTPNFKSNFDLAEDAKLQLSKDTYDDDLDNLLAQIGDQYADLFLAAKNLSDAILLSDILRVNTEITKAPLSASMIKRYDEHHQDLTLLKALVRQQLPEKYKEIFFDQSKNGYAGYIDGGASQEEFYKFIKPILEKMDGTEELLVKLNREDLLRKQRTFDNGSIPHQIHLGELHAILRRQEDFYPFLKDNREKIEKILTFRIPYYVGPLARGNSRFAWMTRKSEETITPWNFEEVVDKGASAQSFIERMTNFDKNLPNEKVLPKHSLLYEYFTVYNELTKVKYVTEGMRKPAFLSGEQKKAIVDLLFKTNRKVTVKQLKEDYFKKIECFDSVEISGVEDRFNASLGTYHDLLKIIKDKDFLDNEENEDILEDIVLTLTLFEDREMIEERLKTYAHLFDDKVMKQLKRRRYTGWGRLSRKLINGIRDKQSGKTILDFLKSDGFANRNFMQLIHDDSLTFKEDIQKAQVSGQGDSLHEHIANLAGSPAIKKGILQTVKVVDELVKVMGRHKPENIVIEMARENQTTQKGQKNSRERMKRIEEGIKELGSQILKEHPVENTQLQNEKLYLYYLQNGRDMYVDQELDINRLSDYDVDHIVPQSFLKDDSIDNKVLTRSDKARGKSDNVPSEEVVKKMKNYWRQLLNAKLITQRKFDNLTKAERGGLSELDKAGFIKRQLVETRQITKHVAQILDSRMNTKYDENDKLIREVKVITLKSKLVSDFRKDFQFYKVREINNYHHAHDAYLNAVVGTALIKKYPKLESEFVYGDYKVYDVRKMIAKSEQEIGKATAKYFFYSNIMNFFKTEITLANGEIRKRPLIETNGETGEIVWDKGRDFATVRKVLSMPQVNIVKKTEVQTGGFSKESILPKRNSDKLIARKKDWDPKKYGGFDSPTVAYSVLVVAKVEKGKSKKLKSVKELLGITIMERSSFEKNPIDFLEAKGYKEVKKDLIIKLPKYSLFELENGRKRMLASAGELQKGNELALPSKYVNFLYLASHYEKLKGSPEDNEQKQLFVEQHKHYLDEIIEQISEFSKRVILADANLDKVLSAYNKHRDKPIREQAENIIHLFTLTNLGAPAAFKYFDTTIDRKRYTSTKEVLDATLIHQSITGLYETRIDLSQLGGDGGGSSEAAAKGGSGGLDDEYRLYSPLVKPDQNIQFWLEQFPQAWAETAGMGLAKQVPPQVIQLKASATPVSVRQYPLSKEAQEGIRPHVQRLIQQGILVPVQSPWNTPLLPVRKPGTNDYRPVQDLREVNKRVQDIHPTVPNPYNLLCALPPQRSWYTVLDLKDAFFCLRLHPTSQPLFAFEWRDPGTGRTGQLTWTRLPQGFKNSPTIFNEALHRDLANFRIQHPQVTLLQYVDDLLLAGATKQDCLEGTKALLLELSDLGYRASAKKAQICRREVTYLGYSLRDGQRWLTEARKKTVVQIPAPTTAKQVREFLGKAGFCRLFIPGFATLAAPLYPLTKPKGEFSWAPEHQKAFDAIKKALLSAPALALPDVTKPFTLYVDERKGVARGVLTQTLGPWRRPVAYLSKKLDPVASGWPVCLKAIAAVAILVKDADKLTLGQNITVIAPHALENIVRQPPDRWMTNARMTHYQSLLLTERVTFAPPAALNPATLLPEETDEPVTHDCHQLLIEETGVRKDLTDIPLTGEVLTWFTDGSSYVVEGKRMAGAAVVDGTRTIWASSLPEGTSAQKAELMALTQALRLAEGKSINIYTDSRYAFATAHVHGAIYKQRGWLTSAGREIKNKEEILSLLEALHLPKRLAIIHCPGHQKAKDPISRGNQMADRVAKQAAQGVNLLPAGKRTADGSEFEKRTADGSEFESPKKKAKVE

SEQ ID NO: 259 - protein, 2083 aa, synthetic construct
MPAAKRVKLDGGDKKYSIGLDIGTNSVGWAVITDEYKVPSKKFKVLGNTDRHSIKKNLIGALLFDSGETAEATRLKRTARRRYTRRKNRICYLQEIFSNEMAKVDDSFFHRLEESFLVEEDKKHERHPIFGNIVDEVAYHEKYPTIYHLRKKLVDSTDKADLRLIYLALAHMIKFRGHFLIEGDLNPDNSDVDKLFIQLVQTYNQLFEENPINASGVDAKAILSARLSKSRRLENLIAQLPGEKKNGLFGNLIALSLGLTPNFKSNFDLAEDAKLQLSKDTYDDDLDNLLAQIGDQYADLFLAAKNLSDAILLSDILRVNTEITKAPLSASMIKRYDEHHQDLTLLKALVRQQLPEKYKEIFFDQSKNGYAGYIDGGASQEEFYKFIKPILEKMDGTEELLVKLNREDLLRKQRTFDNGSIPHQIHLGELHAILRRQEDFYPFLKDNREKIEKILTFRIPYYVGPLARGNSRFAWMTRKSEETITPWNFEEVVDKGASAQSFIERMTNFDKNLPNEKVLPKHSLLYEYFTVYNELTKVKYVTEGMRKPAFLSGEQKKAIVDLLFKTNRKVTVKQLKEDYFKKIECFDSVEISGVEDRFNASLGTYHDLLKIIKDKDFLDNEENEDILEDIVLTLTLFEDREMIEERLKTYAHLFDDKVMKQLKRRRYTGWGRLSRKLINGIRDKQSGKTILDFLKSDGFANRNFMQLIHDDSLTFKEDIQKAQVSGQGDSLHEHIANLAGSPAIKKGILQTVKVVDELVKVMGRHKPENIVIEMARENQTTQKGQKNSRERMKRIEEGIKELGSQILKEHPVENTQLQNEKLYLYYLQNGRDMYVDQELDINRLSDYDVDHIVPQSFLKDDSIDNKVLTRSDKARGKSDNVPSEEVVKKMKNYWRQLLNAKLITQRKFDNLTKAERGGLSELDKAGFIKRQLVETRQITKHVAQILDSRMNTKYDENDKLIREVKVITLKSKLVSDFRKDFQFYKVREINNYHHAHDAYLNAVVGTALIKKYPKLESEFVYGDYKVYDVRKMIAKSEQEIGKATAKYFFYSNIMNFFKTEITLANGEIRKRPLIETNGETGEIVWDKGRDFATVRKVLSMPQVNIVKKTEVQTGGFSKESILPKRNSDKLIARKKDWDPKKYGGFDSPTVAYSVLVVAKVEKGKSKKLKSVKELLGITIMERSSFEKNPIDFLEAKGYKEVKKDLIIKLPKYSLFELENGRKRMLASAGELQKGNELALPSKYVNFLYLASHYEKLKGSPEDNEQKQLFVEQHKHYLDEIIEQISEFSKRVILADANLDKVLSAYNKHRDKPIREQAENIIHLFTLTNLGAPAAFKYFDTTIDRKRYTSTKEVLDATLIHQSITGLYETRIDLSQLGGDGGGGSGGSGGLDDEYRLYSPLVKPDQNIQFWLEQFPQAWAETAGMGLAKQVPPQVIQLKASATPVSVRQYPLSKEAQEGIRPHVQRLIQQGILVPVQSPWNTPLLPVRKPGTNDYRPVQDLREVNKRVQDIHPTVPNPYNLLCALPPQRSWYTVLDLKDAFFCLRLHPTSQPLFAFEWRDPGTGRTGQLTWTRLPQGFKNSPTIFNEALHRDLANFRIQHPQVTLLQYVDDLLLAGATKQDCLEGTKALLLELSDLGYRASAKKAQICRREVTYLGYSLRDGQRWLTEARKKTVVQIPAPTTAKQVREFLGKAGFCRLFIPGFATLAAPLYPLTKPKGEFSWAPEHQKAFDAIKKALLSAPALALPDVTKPFTLYVDERKGVARGVLTQTLGPWRRPVAYLSKKLDPVASGWPVCLKAIAAVAILVKDADKLTLGQNITVIAPHALENIVRQPPDRWMTNARMTHYQSLLLTERVTFAPPAALNPATLLPEETDEPVTHDCHQLLIEETGVRKDLTDIPLTGEVLTWFTDGSSYVVEGKRMAGAAVVDGTRTIWASSLPEGTSAQKAELMALTQALRLAEGKSINIYTDSRYAFATAHVHGAIYKQRGWLTSAGREIKNKEEILSLLEALHLPKRLAIIHCPGHQKAKDPISRGNQMADRVAKQAAQGVNLLPAGKRTADGSEFEKRTADGSEFESPKKKAKVE

SEQ ID NO: 260 - protein, 2088 aa, synthetic construct; identical to SEQ ID NO: 93

SEQ ID NO: 261 - protein, 2083 aa, synthetic construct; identical to SEQ ID NO: 81

SEQ ID NO: 262 - protein, 2080 aa, synthetic construct
MPAAKRVKLDGGDKKYSIGLDIGTNSVGWAVITDEYKVPSKKFKVLGNTDRHSIKKNLIGALLFDSGETAEATRLKRTARRRYTRRKNRICYLQEIFSNEMAKVDDSFFHRLEESFLVEEDKKHERHPIFGNIVDEVAYHEKYPTIYHLRKKLVDSTDKADLRLIYLALAHMIKFRGHFLIEGDLNPDNSDVDKLFIQLVQTYNQLFEENPINASGVDAKAILSARLSKSRRLENLIAQLPGEKKNGLFGNLIALSLGLTPNFKSNFDLAEDAKLQLSKDTYDDDLDNLLAQIGDQYADLFLAAKNLSDAILLSDILRVNTEITKAPLSASMIKRYDEHHQDLTLLKALVRQQLPEKYKEIFFDQSKNGYAGYIDGGASQEEFYKFIKPILEKMDGTEELLVKLNREDLLRKQRTFDNGSIPHQIHLGELHAILRRQEDFYPFLKDNREKIEKILTFRIPYYVGPLARGNSRFAWMTRKSEETITPWNFEEVVDKGASAQSFIERMTNFDKNLPNEKVLPKHSLLYEYFTVYNELTKVKYVTEGMRKPAFLSGEQKKAIVDLLFKTNRKVTVKQLKEDYFKKIECFDSVEISGVEDRFNASLGTYHDLLKIIKDKDFLDNEENEDILEDIVLTLTLFEDREMIEERLKTYAHLFDDKVMKQLKRRRYTGWGRLSRKLINGIRDKQSGKTILDFLKSDGFANRNFMQLIHDDSLTFKEDIQKAQVSGQGDSLHEHIANLAGSPAIKKGILQTVKVVDELVKVMGRHKPENIVIEMARENQTTQKGQKNSRERMKRIEEGIKELGSQILKEHPVENTQLQNEKLYLYYLQNGRDMYVDQELDINRLSDYDVDHIVPQSFLKDDSIDNKVLTRSDKARGKSDNVPSEEVVKKMKNYWRQLLNAKLITQRKFDNLTKAERGGLSELDKAGFIKRQLVETRQITKHVAQILDSRMNTKYDENDKLIREVKVITLKSKLVSDFRKDFQFYKVREINNYHHAHDAYLNAVVGTALIKKYPKLESEFVYGDYKVYDVRKMIAKSEQEIGKATAKYFFYSNIMNFFKTEITLANGEIRKRPLIETNGETGEIVWDKGRDFATVRKVLSMPQVNIVKKTEVQTGGFSKESILPKRNSDKLIARKKDWDPKKYGGFDSPTVAYSVLVVAKVEKGKSKKLKSVKELLGITIMERSSFEKNPIDFLEAKGYKEVKKDLIIKLPKYSLFELENGRKRMLASAGELQKGNELALPSKYVNFLYLASHYEKLKGSPEDNEQKQLFVEQHKHYLDEIIEQISEFSKRVILADANLDKVLSAYNKHRDKPIREQAENIIHLFTLTNLGAPAAFKYFDTTIDRKRYTSTKEVLDATLIHQSITGLYETRIDLSQLGGDGGGGSGGLDDEYRLYSPLVKPDQNIQFWLEQFPQAWAETAGMGLAKQVPPQVIQLKASATPVSVRQYPLSKEAQEGIRPHVQRLIQQGILVPVQSPWNTPLLPVRKPGTNDYRPVQDLREVNKRVQDIHPTVPNPYNLLCALPPQRSWYTVLDLKDAFFCLRLHPTSQPLFAFEWRDPGTGRTGQLTWTRLPQGFKNSPTIFNEALHRDLANFRIQHPQVTLLQYVDDLLLAGATKQDCLEGTKALLLELSDLGYRASAKKAQICRREVTYLGYSLRDGQRWLTEARKKTVVQIPAPTTAKQVREFLGKAGFCRLFIPGFATLAAPLYPLTKPKGEFSWAPEHQKAFDAIKKALLSAPALALPDVTKPFTLYVDERKGVARGVLTQTLGPWRRPVAYLSKKLDPVASGWPVCLKAIAAVAILVKDADKLTLGQNITVIAPHALENIVRQPPDRWMTNARMTHYQSLLLTERVTFAPPAALNPATLLPEETDEPVTHDCHQLLIEETGVRKDLTDIPLTGEVLTWFTDGSSYVVEGKRMAGAAVVDGTRTIWASSLPEGTSAQKAELMALTQALRLAEGKSINIYTDSRYAFATAHVHGAIYKQRGWLTSAGREIKNKEEILSLLEALHLPKRLAIIHCPGHQKAKDPISRGNQMADRVAKQAAQGVNLLPAGKRTADGSEFEKRTADGSEFESPKKKAKVE

SEQ ID NO: 263 - protein, 2088 aa, synthetic construct; identical to SEQ ID NO: 92

SEQ ID NO: 264 - protein, 2088 aa, synthetic construct; identical to SEQ ID NO: 53

SEQ ID NO: 265 - protein, 2083 aa, synthetic construct; identical to SEQ ID NO: 79

SEQ ID NO: 266 - protein, 2082 aa, synthetic construct
MPAAKRVKLDGGDKKYSIGLDIGTNSVGWAVITDEYKVPSKKFKVLGNTDRHSIKKNLIGALLFDSGETAEATRLKRTARRRYTRRKNRICYLQEIFSNEMAKVDDSFFHRLEESFLVEEDKKHERHPIFGNIVDEVAYHEKYPTIYHLRKKLVDSTDKADLRLIYLALAHMIKFRGHFLIEGDLNPDNSDVDKLFIQLVQTYNQLFEENPINASGVDAKAILSARLSKSRRLENLIAQLPGEKKNGLFGNLIALSLGLTPNFKSNFDLAEDAKLQLSKDTYDDDLDNLLAQIGDQYADLFLAAKNLSDAILLSDILRVNTEITKAPLSASMIKRYDEHHQDLTLLKALVRQQLPEKYKEIFFDQSKNGYAGYIDGGASQEEFYKFIKPILEKMDGTEELLVKLNREDLLRKQRTFDNGSIPHQIHLGELHAILRRQEDFYPFLKDNREKIEKILTFRIPYYVGPLARGNSRFAWMTRKSEETITPWNFEEVVDKGASAQSFIERMTNFDKNLPNEKVLPKHSLLYEYFTVYNELTKVKYVTEGMRKPAFLSGEQKKAIVDLLFKTNRKVTVKQLKEDYFKKIECFDSVEISGVEDRFNASLGTYHDLLKIIKDKDFLDNEENEDILEDIVLTLTLFEDREMIEERLKTYAHLFDDKVMKQLKRRRYTGWGRLSRKLINGIRDKQSGKTILDFLKSDGFANRNFMQLIHDDSLTFKEDIQKAQVSGQGDSLHEHIANLAGSPAIKKGILQTVKVVDELVKVMGRHKPENIVIEMARENQTTQKGQKNSRERMKRIEEGIKELGSQILKEHPVENTQLQNEKLYLYYLQNGRDMYVDQELDINRLSDYDVDHIVPQSFLKDDSIDNKVLTRSDKARGKSDNVPSEEVVKKMKNYWRQLLNAKLITQRKFDNLTKAERGGLSELDKAGFIKRQLVETRQITKHVAQILDSRMNTKYDENDKLIREVKVITLKSKLVSDFRKDFQFYKVREINNYHHAHDAYLNAVVGTALIKKYPKLESEFVYGDYKVYDVRKMIAKSEQEIGKATAKYFFYSNIMNFFKTEITLANGEIRKRPLIETNGETGEIVWDKGRDFATVRKVLSMPQVNIVKKTEVQTGGFSKESILPKRNSDKLIARKKDWDPKKYGGFDSPTVAYSVLVVAKVEKGKSKKLKSVKELLGITIMERSSFEKNPIDFLEAKGYKEVKKDLIIKLPKYSLFELENGRKRMLASAGELQKGNELALPSKYVNFLYLASHYEKLKGSPEDNEQKQLFVEQHKHYLDEIIEQISEFSKRVILADANLDKVLSAYNKHRDKPIREQAENIIHLFTLTNLGAPAAFKYFDTTIDRKRYTSTKEVLDATLIHQSITGLYETRIDLSQLGGDGGPAPAPGGLDDEYRLYSPLVKPDQNIQFWLEQFPQAWAETAGMGLAKQVPPQVIQLKASATPVSVRQYPLSKEAQEGIRPHVQRLIQQGILVPVQSPWNTPLLPVRKPGTNDYRPVQDLREVNKRVQDIHPTVPNPYNLLCALPPQRSWYTVLDLKDAFFCLRLHPTSQPLFAFEWRDPGTGRTGQLTWTRLPQGFKNSPTIFNEALHRDLANFRIQHPQVTLLQYVDDLLLAGATKQDCLEGTKALLLELSDLGYRASAKKAQICRREVTYLGYSLRDGQRWLTEARKKTVVQIPAPTTAKQVREFLGKAGFCRLFIPGFATLAAPLYPLTKPKGEFSWAPEHQKAFDAIKKALLSAPALALPDVTKPFTLYVDERKGVARGVLTQTLGPWRRPVAYLSKKLDPVASGWPVCLKAIAAVAILVKDADKLTLGQNITVIAPHALENIVRQPPDRWMTNARMTHYQSLLLTERVTFAPPAALNPATLLPEETDEPVTHDCHQLLIEETGVRKDLTDIPLTGEVLTWFTDGSSYVVEGKRMAGAAVVDGTRTIWASSLPEGTSAQKAELMALTQALRLAEGKSINIYTDSRYAFATAHVHGAIYKQRGWLTSAGREIKNKEEILSLLEALHLPKRLAIIHCPGHQKAKDPISRGNQMADRVAKQAAQGVNLLPAGKRTADGSEFEKRTADGSEFESPKKKAKVE

SEQ ID NO: 267 - protein, 2086 aa, synthetic construct
MPAAKRVKLDGGDKKYSIGLDIGTNSVGWAVITDEYKVPSKKFKVLGNTDRHSIKKNLIGALLFDSGETAEATRLKRTARRRYTRRKNRICYLQEIFSNEMAKVDDSFFHRLEESFLVEEDKKHERHPIFGNIVDEVAYHEKYPTIYHLRKKLVDSTDKADLRLIYLALAHMIKFRGHFLIEGDLNPDNSDVDKLFIQLVQTYNQLFEENPINASGVDAKAILSARLSKSRRLENLIAQLPGEKKNGLFGNLIALSLGLTPNFKSNFDLAEDAKLQLSKDTYDDDLDNLLAQIGDQYADLFLAAKNLSDAILLSDILRVNTEITKAPLSASMIKRYDEHHQDLTLLKALVRQQLPEKYKEIFFDQSKNGYAGYIDGGASQEEFYKFIKPILEKMDGTEELLVKLNREDLLRKQRTFDNGSIPHQIHLGELHAILRRQEDFYPFLKDNREKIEKILTFRIPYYVGPLARGNSRFAWMTRKSEETITPWNFEEVVDKGASAQSFIERMTNFDKNLPNEKVLPKHSLLYEYFTVYNELTKVKYVTEGMRKPAFLSGEQKKAIVDLLFKTNRKVTVKQLKEDYFKKIECFDSVEISGVEDRFNASLGTYHDLLKIIKDKDFLDNEENEDILEDIVLTLTLFEDREMIEERLKTYAHLFDDKVMKQLKRRRYTGWGRLSRKLINGIRDKQSGKTILDFLKSDGFANRNFMQLIHDDSLTFKEDIQKAQVSGQGDSLHEHIANLAGSPAIKKGILQTVKVVDELVKVMGRHKPENIVIEMARENQTTQKGQKNSRERMKRIEEGIKELGSQILKEHPVENTQLQNEKLYLYYLQNGRDMYVDQELDINRLSDYDVDHIVPQSFLKDDSIDNKVLTRSDKARGKSDNVPSEEVVKKMKNYWRQLLNAKLITQRKFDNLTKAERGGLSELDKAGFIKRQLVETRQITKHVAQILDSRMNTKYDENDKLIREVKVITLKSKLVSDFRKDFQFYKVREINNYHHAHDAYLNAVVGTALIKKYPKLESEFVYGDYKVYDVRKMIAKSEQEIGKATAKYFFYSNIMNFFKTEITLANGEIRKRPLIETNGETGEIVWDKGRDFATVRKVLSMPQVNIVKKTEVQTGGFSKESILPKRNSDKLIARKKDWDPKKYGGFDSPTVAYSVLVVAKVEKGKSKKLKSVKELLGITIMERSSFEKNPIDFLEAKGYKEVKKDLIIKLPKYSLFELENGRKRMLASAGELQKGNELALPSKYVNFLYLASHYEKLKGSPEDNEQKQLFVEQHKHYLDEIIEQISEFSKRVILADANLDKVLSAYNKHRDKPIREQAENIIHLFTLTNLGAPAAFKYFDTTIDRKRYTSTKEVLDATLIHQSITGLYETRIDLSQLGGDGGGGSPAPGSSGGLDDEYRLYSPLVKPDQNIQFWLEQFPQAWAETAGMGLAKQVPPQVIQLKASATPVSVRQYPLSKEAQEGIRPHVQRLIQQGILVPVQSPWNTPLLPVRKPGTNDYRPVQDLREVNKRVQDIHPTVPNPYNLLCALPPQRSWYTVLDLKDAFFCLRLHPTSQPLFAFEWRDPGTGRTGQLTWTRLPQGFKNSPTIFNEALHRDLANFRIQHPQVTLLQYVDDLLLAGATKQDCLEGTKALLLELSDLGYRASAKKAQICRREVTYLGYSLRDGQRWLTEARKKTVVQIPAPTTAKQVREFLGKAGFCRLFIPGFATLAAPLYPLTKPKGEFSWAPEHQKAFDAIKKALLSAPALALPDVTKPFTLYVDERKGVARGVLTQTLGPWRRPVAYLSKKLDPVASGWPVCLKAIAAVAILVKDADKLTLGQNITVIAPHALENIVRQPPDRWMTNARMTHYQSLLLTERVTFAPPAALNPATLLPEETDEPVTHDCHQLLIEETGVRKDLTDIPLTGEVLTWFTDGSSYVVEGKRMAGAAVVDGTRTIWASSLPEGTSAQKAELMALTQALRLAEGKSINIYTDSRYAFATAHVHGAIYKQRGWLTSAGREIKNKEEILSLLEALHLPKRLAIIHCPGHQKAKDPISRGNQMADRVAKQAAQGVNLLPAGKRTADGSEFEKRTADGSEFESPKKKAKVE

SEQ ID NO: 268 - protein, 2086 aa, synthetic construct; identical to SEQ ID NO: 38

SEQ ID NO: 269 - protein, 2080 aa, synthetic construct
MPAAKRVKLDGGDKKYSIGLDIGTNSVGWAVITDEYKVPSKKFKVLGNTDRHSIKKNLIGALLFDSGETAEATRLKRTARRRYTRRKNRICYLQEIFSNEMAKVDDSFFHRLEESFLVEEDKKHERHPIFGNIVDEVAYHEKYPTIYHLRKKLVDSTDKADLRLIYLALAHMIKFRGHFLIEGDLNPDNSDVDKLFIQLVQTYNQLFEENPINASGVDAKAILSARLSKSRRLENLIAQLPGEKKNGLFGNLIALSLGLTPNFKSNFDLAEDAKLQLSKDTYDDDLDNLLAQIGDQYADLFLAAKNLSDAILLSDILRVNTEITKAPLSASMIKRYDEHHQDLTLLKALVRQQLPEKYKEIFFDQSKNGYAGYIDGGASQEEFYKFIKPILEKMDGTEELLVKLNREDLLRKQRTFDNGSIPHQIHLGELHAILRRQEDFYPFLKDNREKIEKILTFRIPYYVGPLARGNSRFAWMTRKSEETITPWNFEEVVDKGASAQSFIERMTNFDKNLPNEKVLPKHSLLYEYFTVYNELTKVKYVTEGMRKPAFLSGEQKKAIVDLLFKTNRKVTVKQLKEDYFKKIECFDSVEISGVEDRFNASLGTYHDLLKIIKDKDFLDNEENEDILEDIVLTLTLFEDREMIEERLKTYAHLFDDKVMKQLKRRRYTGWGRLSRKLINGIRDKQSGKTILDFLKSDGFANRNFMQLIHDDSLTFKEDIQKAQVSGQGDSLHEHIANLAGSPAIKKGILQTVKVVDELVKVMGRHKPENIVIEMARENQTTQKGQKNSRERMKRIEEGIKELGSQILKEHPVENTQLQNEKLYLYYLQNGRDMYVDQELDINRLSDYDVDHIVPQSFLKDDSIDNKVLTRSDKARGKSDNVPSEEVVKKMKNYWRQLLNAKLITQRKFDNLTKAERGGLSELDKAGFIKRQLVETRQITKHVAQILDSRMNTKYDENDKLIREVKVITLKSKLVSDFRKDFQFYKVREINNYHHAHDAYLNAVVGTALIKKYPKLESEFVYGDYKVYDVRKMIAKSEQEIGKATAKYFFYSNIMNFFKTEITLANGEIRKRPLIETNGETGEIVWDKGRDFATVRKVLSMPQVNIVKKTEVQTGGFSKESILPKRNSDKLIARKKDWDPKKYGGFDSPTVAYSVLVVAKVEKGKSKKLKSVKELLGITIMERSSFEKNPIDFLEAKGYKEVKKDLIIKLPKYSLFELENGRKRMLASAGELQKGNELALPSKYVNFLYLASHYEKLKGSPEDNEQKQLFVEQHKHYLDEIIEQISEFSKRVILADANLDKVLSAYNKHRDKPIREQAENIIHLFTLTNLGAPAAFKYFDTTIDRKRYTSTKEVLDATLIHQSITGLYETRIDLSQLGGDGGPAPGGLDDEYRLYSPLVKPDQNIQFWLEQFPQAWAETAGMGLAKQVPPQVIQLKASATPVSVRQYPLSKEAQEGIRPHVQRLIQQGILVPVQSPWNTPLLPVRKPGTNDYRPVQDLREVNKRVQDIHPTVPNPYNLLCALPPQRSWYTVLDLKDAFFCLRLHPTSQPLFAFEWRDPGTGRTGQLTWTRLPQGFKNSPTIFNEALHRDLANFRIQHPQVTLLQYVDDLLLAGATKQDCLEGTKALLLELSDLGYRASAKKAQICRREVTYLGYSLRDGQRWLTEARKKTVVQIPAPTTAKQVREFLGKAGFCRLFIPGFATLAAPLYPLTKPKGEFSWAPEHQKAFDAIKKALLSAPALALPDVTKPFTLYVDERKGVARGVLTQTLGPWRRPVAYLSKKLDPVASGWPVCLKAIAAVAILVKDADKLTLGQNITVIAPHALENIVRQPPDRWMTNARMTHYQSLLLTERVTFAPPAALNPATLLPEETDEPVTHDCHQLLIEETGVRKDLTDIPLTGEVLTWFTDGSSYVVEGKRMAGAAVVDGTRTIWASSLPEGTSAQKAELMALTQALRLAEGKSINIYTDSRYAFATAHVHGAIYKQRGWLTSAGREIKNKEEILSLLEALHLPKRLAIIHCPGHQKAKDPISRGNQMADRVAKQAAQGVNLLPAGKRTADGSEFEKRTADGSEFESPKKKAKVE

SEQ ID NO: 270 - protein, 2086 aa, synthetic construct; identical to SEQ ID NO: 69

SEQ ID NO: 271 - protein, 2083 aa, synthetic construct; identical to SEQ ID NO: 88

SEQ ID NO: 272 - protein, 2086 aa, synthetic construct; identical to SEQ ID NO: 85

SEQ ID NO: 273 - protein, 2085 aa, synthetic construct
MPAAKRVKLDGGDKKYSIGLDIGTNSVGWAVITDEYKVPSKKFKVLGNTDRHSIKKNLIGALLFDSGETAEATRLKRTARRRYTRRKNRICYLQEIFSNEMAKVDDSFFHRLEESFLVEEDKKHERHPIFGNIVDEVAYHEKYPTIYHLRKKLVDSTDKADLRLIYLALAHMIKFRGHFLIEGDLNPDNSDVDKLFIQLVQTYNQLFEENPINASGVDAKAILSARLSKSRRLENLIAQLPGEKKNGLFGNLIALSLGLTPNFKSNFDLAEDAKLQLSKDTYDDDLDNLLAQIGDQYADLFLAAKNLSDAILLSDILRVNTEITKAPLSASMIKRYDEHHQDLTLLKALVRQQLPEKYKEIFFDQSKNGYAGYIDGGASQEEFYKFIKPILEKMDGTEELLVKLNREDLLRKQRTFDNGSIPHQIHLGELHAILRRQEDFYPFLKDNREKIEKILTFRIPYYVGPLARGNSRFAWMTRKSEETITPWNFEEVVDKGASAQSFIERMTNFDKNLPNEKVLPKHSLLYEYFTVYNELTKVKYVTEGMRKPAFLSGEQKKAIVDLLFKTNRKVTVKQLKEDYFKKIECFDSVEISGVEDRFNASLGTYHDLLKIIKDKDFLDNEENEDILEDIVLTLTLFEDREMIEERLKTYAHLFDDKVMKQLKRRRYTGWGRLSRKLINGIRDKQSGKTILDFLKSDGFANRNFMQLIHDDSLTFKEDIQKAQVSGQGDSLHEHIANLAGSPAIKKGILQTVKVVDELVKVMGRHKPENIVIEMARENQTTQKGQKNSRERMKRIEEGIKELGSQILKEHPVENTQLQNEKLYLYYLQNGRDMYVDQELDINRLSDYDVDHIVPQSFLKDDSIDNKVLTRSDKARGKSDNVPSEEVVKKMKNYWRQLLNAKLITQRKFDNLTKAERGGLSELDKAGFIKRQLVETRQITKHVAQILDSRMNTKYDENDKLIREVKVITLKSKLVSDFRKDFQFYKVREINNYHHAHDAYLNAVVGTALIKKYPKLESEFVYGDYKVYDVRKMIAKSEQEIGKATAKYFFYSNIMNFFKTEITLANGEIRKRPLIETNGETGEIVWDKGRDFATVRKVLSMPQVNIVKKTEVQTGGFSKESILPKRNSDKLIARKKDWDPKKYGGFDSPTVAYSVLVVAKVEKGKSKKLKSVKELLGITIMERSSFEKNPIDFLEAKGYKEVKKDLIIKLPKYSLFELENGRKRMLASAGELQKGNELALPSKYVNFLYLASHYEKLKGSPEDNEQKQLFVEQHKHYLDEIIEQISEFSKRVILADANLDKVLSAYNKHRDKPIREQAENIIHLFTLTNLGAPAAFKYFDTTIDRKRYTSTKEVLDATLIHQSITGLYETRIDLSQLGGDGGGGGEAAAKGGLDDEYRLYSPLVKPDQNIQFWLEQFPQAWAETAGMGLAKQVPPQVIQLKASATPVSVRQYPLSKEAQEGIRPHVQRLIQQGILVPVQSPWNTPLLPVRKPGTNDYRPVQDLREVNKRVQDIHPTVPNPYNLLCALPPQRSWYTVLDLKDAFFCLRLHPTSQPLFAFEWRDPGTGRTGQLTWTRLPQGFKNSPTIFNEALHRDLANFRIQHPQVTLLQYVDDLLLAGATKQDCLEGTKALLLELSDLGYRASAKKAQICRREVTYLGYSLRDGQRWLTEARKKTVVQIPAPTTAKQVREFLGKAGFCRLFIPGFATLAAPLYPLTKPKGEFSWAPEHQKAFDAIKKALLSAPALALPDVTKPFTLYVDERKGVARGVLTQTLGPWRRPVAYLSKKLDPVASGWPVCLKAIAAVAILVKDADKLTLGQNITVIAPHALENIVRQPPDRWMTNARMTHYQSLLLTERVTFAPPAALNPATLLPEETDEPVTHDCHQLLIEETGVRKDLTDIPLTGEVLTWFTDGSSYVVEGKRMAGAAVVDGTRTIWASSLPEGTSAQKAELMALTQALRLAEGKSINIYTDSRYAFATAHVHGAIYKQRGWLTSAGREIKNKEEILSLLEALHLPKRLAIIHCPGHQKAKDPISRGNQMADRVAKQAAQGVNLLPAGKRTADGSEFEKRTADGSEFESPKKKAKVE

SEQ ID NO: 274 - protein, 2086 aa, synthetic construct
MPAAKRVKLDGGDKKYSIGLDIGTNSVGWAVITDEYKVPSKKFKVLGNTDRHSIKKNLIGALLFDSGETAEATRLKRTARRRYTRRKNRICYLQEIFSNEMAKVDDSFFHRLEESFLVEEDKKHERHPIFGNIVDEVAYHEKYPTIYHLRKKLVDSTDKADLRLIYLALAHMIKFRGHFLIEGDLNPDNSDVDKLFIQLVQTYNQLFEENPINASGVDAKAILSARLSKSRRLENLIAQLPGEKKNGLFGNLIALSLGLTPNFKSNFDLAEDAKLQLSKDTYDDDLDNLLAQIGDQYADLFLAAKNLSDAILLSDILRVNTEITKAPLSASMIKRYDEHHQDLTLLKALVRQQLPEKYKEIFFDQSKNGYAGYIDGGASQEEFYKFIKPILEKMDGTEELLVKLNREDLLRKQRTFDNGSIPHQIHLGELHAILRRQEDFYPFLKDNREKIEKILTFRIPYYVGPLARGNSRFAWMTRKSEETITPWNFEEVVDKGASAQSFIERMTNFDKNLPNEKVLPKHSLLYEYFTVYNELTKVKYVTEGMRKPAFLSGEQKKAIVDLLFKTNRKVTVKQLKEDYFKKIECFDSVEISGVEDRFNASLGTYHDLLKIIKDKDFLDNEENEDILEDIVLTLTLFEDREMIEERLKTYAHLFDDKVMKQLKRRRYTGWGRLSRKLINGIRDKQSGKTILDFLKSDGFANRNFMQLIHDDSLTFKEDIQKAQVSGQGDSLHEHIANLAGSPAIKKGILQTVKVVDELVKVMGRHKPENIVIEMARENQTTQKGQKNSRERMKRIEEGIKELGSQILKEHPVENTQLQNEKLYLYYLQNGRDMYVDQELDINRLSDYDVDHIVPQSFLKDDSIDNKVLTRSDKARGKSDNVPSEEVVKKMKNYWRQLLNAKLITQRKFDNLTKAERGGLSELDKAGFIKRQLVETRQITKHVAQILDSRMNTKYDENDKLIREVKVITLKSKLVSDFRKDFQFYKVREINNYHHAHDAYLNAVVGTALIKKYPKLESEFVYGDYKVYDVRKMIAKSEQEIGKATAKYFFYSNIMNFFKTEITLANGEIRKRPLIETNGETGEIVWDKGRDFATVRKVLSMPQVNIVKKTEVQTGGFSKESILPKRNSDKLIARKKDWDPKKYGGFDSPTVAYSVLVVAKVEKGKSKKLKSVKELLGITIMERSSFEKNPIDFLEAKGYKEVKKDLIIKLPKYSLFELENGRKRMLASAGELQKGNELALPSKYVNFLYLASHYEKLKGSPEDNEQKQLFVEQHKHYLDEIIEQISEFSKRVILADANLDKVLSAYNKHRDKPIREQAENIIHLFTLTNLGAPAAFKYFDTTIDRKRYTSTKEVLDATLIHQSITGLYETRIDLSQLGGDGGGGSGGGGSSGGLDDEYRLYSPLVKPDQNIQFWLEQFPQAWAETAGMGLAKQVPPQVIQLKASATPVSVRQYPLSKEAQEGIRPHVQRLIQQGILVPVQSPWNTPLLPVRKPGTNDYRPVQDLREVNKRVQDIHPTVPNPYNLLCALPPQRSWYTVLDLKDAFFCLRLHPTSQPLFAFEWRDPGTGRTGQLTWTRLPQGFKNSPTIFNEALHRDLANFRIQHPQVTLLQYVDDLLLAGATKQDCLEGTKALLLELSDLGYRASAKKAQICRREVTYLGYSLRDGQRWLTEARKKTVVQIPAPTTAKQVREFLGKAGFCRLFIPGFATLAAPLYPLTKPKGEFSWAPEHQKAFDAIKKALLSAPALALPDVTKPFTLYVDERKGVARGVLTQTLGPWRRPVAYLSKKLDPVASGWPVCLKAIAAVAILVKDADKLTLGQNITVIAPHALENIVRQPPDRWMTNARMTHYQSLLLTERVTFAPPAALNPATLLPEETDEPVTHDCHQLLIEETGVRKDLTDIPLTGEVLTWFTDGSSYVVEGKRMAGAAVVDGTRTIWASSLPEGTSAQKAELMALTQALRLAEGKSINIYTDSRYAFATAHVHGAIYKQRGWLTSAGREIKNKEEILSLLEALHLPKRLAIIHCPGHQKAKDPISRGNQMADRVAKQAAQGVNLLPAGKRTADGSEFEKRTADGSEFESPKKKAKVE

SEQ ID NO: 275 - protein, 2086 aa, synthetic construct; identical to SEQ ID NO: 91

SEQ ID NO: 276 - protein, 2086 aa, synthetic construct; identical to SEQ ID NO: 95

SEQ ID NO: 277 - protein, 2085 aa, synthetic construct
MPAAKRVKLDGGDKKYSIGLDIGTNSVGWAVITDEYKVPSKKFKVLGNTDRHSIKKNLIGALLFDSGETAEATRLKRTARRRYTRRKNRICYLQEIFSNEMAKVDDSFFHRLEESFLVEEDKKHERHPIFGNIVDEVAYHEKYPTIYHLRKKLVDSTDKADLRLIYLALAHMIKFRGHFLIEGDLNPDNSDVDKLFIQLVQTYNQLFEENPINASGVDAKAILSARLSKSRRLENLIAQLPGEKKNGLFGNLIALSLGLTPNFKSNFDLAEDAKLQLSKDTYDDDLDNLLAQIGDQYADLFLAAKNLSDAILLSDILRVNTEITKAPLSASMIKRYDEHHQDLTLLKALVRQQLPEKYKEIFFDQSKNGYAGYIDGGASQEEFYKFIKPILEKMDGTEELLVKLNREDLLRKQRTFDNGSIPHQIHLGELHAILRRQEDFYPFLKDNREKIEKILTFRIPYYVGPLARGNSRFAWMTRKSEETITPWNFEEVVDKGASAQSFIERMTNFDKNLPNEKVLPKHSLLYEYFTVYNELTKVKYVTEGMRKPAFLSGEQKKAIVDLLFKTNRKVTVKQLKEDYFKKIECFDSVEISGVEDRFNASLGTYHDLLKIIKDKDFLDNEENEDILEDIVLTLTLFEDREMIEERLKTYAHLFDDKVMKQLKRRRYTGWGRLSRKLINGIRDKQSGKTILDFLKSDGFANRNFMQLIHDDSLTFKEDIQKAQVSGQGDSLHEHIANLAGSPAIKKGILQTVKVVDELVKVMGRHKPENIVIEMARENQTTQKGQKNSRERMKRIEEGIKELGSQILKEHPVENTQLQNEKLYLYYLQNGRDMYVDQELDINRLSDYDVDHIVPQSFLKDDSIDNKVLTRSDKARGKSDNVPSEEVVKKMKNYWRQLLNAKLITQRKFDNLTKAERGGLSELDKAGFIKRQLVETRQITKHVAQILDSRMNTKYDENDKLIREVKVITLKSKLVSDFRKDFQFYKVREINNYHHAHDAYLNAVVGTALIKKYPKLESEFVYGDYKVYDVRKMIAKSEQEIGKATAKYFFYSNIMNFFKTEITLANGEIRKRPLIETNGETGEIVWDKGRDFATVRKVLSMPQVNIVKKTEVQTGGFSKESILPKRNSDKLIARKKDWDPKKYGGFDSPTVAYSVLVVAKVEKGKSKKLKSVKELLGITIMERSSFEKNPIDFLEAKGYKEVKKDLIIKLPKYSLFELENGRKRMLASAGELQKGNELALPSKYVNFLYLASHYEKLKGSPEDNEQKQLFVEQHKHYLDEIIEQISEFSKRVILADANLDKVLSAYNKHRDKPIREQAENIIHLFTLTNLGAPAAFKYFDTTIDRKRYTSTKEVLDATLIHQSITGLYETRIDLSQLGGDGGGGSEAAAKGGLDDEYRLYSPLVKPDQNIQFWLEQFPQAWAETAGMGLAKQVPPQVIQLKASATPVSVRQYPLSKEAQEGIRPHVQRLIQQGILVPVQSPWNTPLLPVRKPGTNDYRPVQDLREVNKRVQDIHPTVPNPYNLLCALPPQRSWYTVLDLKDAFFCLRLHPTSQPLFAFEWRDPGTGRTGQLTWTRLPQGFKNSPTIFNEALHRDLANFRIQHPQVTLLQYVDDLLLAGATKQDCLEGTKALLLELSDLGYRASAKKAQICRREVTYLGYSLRDGQRWLTEARKKTVVQIPAPTTAKQVREFLGKAGFCRLFIPGFATLAAPLYPLTKPKGEFSWAPEHQKAFDAIKKALLSAPALALPDVTKPFTLYVDERKGVARGVLTQTLGPWRRPVAYLSKKLDPVASGWPVCLKAIAAVAILVKDADKLTLGQNITVIAPHALENIVRQPPDRWMTNARMTHYQSLLLTERVTFAPPAALNPATLLPEETDEPVTHDCHQLLIEETGVRKDLTDIPLTGEVLTWFTDGSSYVVEGKRMAGAAVVDGTRTIWASSLPEGTSAQKAELMALTQALRLAEGKSINIYTDSRYAFATAHVHGAIYKQRGWLTSAGREIKNKEEILSLLEALHLPKRLAIIHCPGHQKAKDPISRGNQMADRVAKQAAQGVNLLPAGKRTADGSEFEKRTADGSEFESPKKKAKVE

SEQ ID NO: 278 - protein, 2090 aa, synthetic construct; identical to SEQ ID NO: 112

SEQ ID NO: 279 - protein, 2094 aa, synthetic construct
MPAAKRVKLDGGDKKYSIGLDIGTNSVGWAVITDEYKVPSKKFKVLGNTDRHSIKKNLIGALLFDSGETAEATRLKRTARRRYTRRKNRICYLQEIFSNEMAKVDDSFFHRLEESFLVEEDKKHERHPIFGNIVDEVAYHEKYPTIYHLRKKLVDSTDKADLRLIYLALAHMIKFRGHFLIEGDLNPDNSDVDKLFIQLVQTYNQLFEENPINASGVDAKAILSARLSKSRRLENLIAQLPGEKKNGLFGNLIALSLGLTPNFKSNFDLAEDAKLQLSKDTYDDDLDNLLAQIGDQYADLFLAAKNLSDAILLSDILRVNTEITKAPLSASMIKRYDEHHQDLTLLKALVRQQLPEKYKEIFFDQSKNGYAGYIDGGASQEEFYKFIKPILEKMDGTEELLVKLNREDLLRKQRTFDNGSIPHQIHLGELHAILRRQEDFYPFLKDNREKIEKILTFRIPYYVGPLARGNSRFAWMTRKSEETITPWNFEEVVDKGASAQSFIERMTNFDKNLPNEKVLPKHSLLYEYFTVYNELTKVKYVTEGMRKPAFLSGEQKKAIVDLLFKTNRKVTVKQLKEDYFKKIECFDSVEISGVEDRFNASLGTYHDLLKIIKDKDFLDNEENEDILEDIVLTLTLFEDREMIEERLKTYAHLFDDKVMKQLKRRRYTGWGRLSRKLINGIRDKQSGKTILDFLKSDGFANRNFMQLIHDDSLTFKEDIQKAQVSGQGDSLHEHIANLAGSPAIKKGILQTVKVVDELVKVMGRHKPENIVIEMARENQTTQKGQKNSRERMKRIEEGIKELGSQILKEHPVENTQLQNEKLYLYYLQNGRDMYVDQELDINRLSDYDVDHIVPQSFLKDDSIDNKVLTRSDKARGKSDNVPSEEVVKKMKNYWRQLLNAKLITQRKFDNLTKAERGGLSELDKAGFIKRQLVETRQITKHVAQILDSRMNTKYDENDKLIREVKVITLKSKLVSDFRKDFQFYKVREINNYHHAHDAYLNAVVGTALIKKYPKLESEFVYGDYKVYDVRKMIAKSEQEIGKATAKYFFYSNIMNFFKTEITLANGEIRKRPLIETNGETGEIVWDKGRDFATVRKVLSMPQVNIVKKTEVQTGGFSKESILPKRNSDKLIARKKDWDPKKYGGFDSPTVAYSVLVVAKVEKGKSKKLKSVKELLGITIMERSSFEKNPIDFLEAKGYKEVKKDLIIKLPKYSLFELENGRKRMLASAGELQKGNELALPSKYVNFLYLASHYEKLKGSPEDNEQKQLFVEQHKHYLDEIIEQISEFSKRVILADANLDKVLSAYNKHRDKPIREQAENIIHLFTLTNLGAPAAFKYFDTTIDRKRYTSTKEVLDATLIHQSITGLYETRIDLSQLGGDGGEAAAKEAAAKEAAAKGGTLQLDDEYRLYSPLVKPDQNIQFWLEQFPQAWAETAGMGLAKQVPPQVIQLKASATPVSVRQYPLSKEAQEGIRPHVQRLIQQGILVPVQSPWNTPLLPVRKPGTNDYRPVQDLREVNKRVQDIHPTVPNPYNLLCALPPQRSWYTVLDLKDAFFCLRLHPTSQPLFAFEWRDPGTGRTGQLTWTRLPQGFKNSPTIFDEALHRDLANFRIQHPQVTLLQYVDDLLLAGATKQDCLEGTKALLLELSDLGYRASAKKAQICRREVTYLGYSLRDGQRWLTEARKKTVVQIPAPTTAKQVREFLGTAGFCRLWIPGFATLAAPLYPLTKEKGEFSWAPEHQKAFDAIKKALLSAPALALPDVTKPFTLYVDERKGVARGVLTQTLGPWRRPVAYLSKKLDPVASGWPVCLKAIAAVAILVKDADKLTLGQNITVIAPHALENIVRQPPDRWMTNARMTHYQSLLLTERVTFAPPAALNPATLLPEETDEPVTHDCHQLLIEETGVRKDLTDIPLTGEVLTWFTDGSSYVVEGKRMAGAAVVDGTRTIWASSLPEGTSAQKAELMALTQALRLAEGKSINIYTDSRYAFATAHVHGAIYKQRGLLTSAGREIKNKEEILSLLEALHLPKRLAIIHCPGHQKAKDPISRGNQMADRVAKQAAQGVNLLAGKRTADGSEFEKRTADGSEFESPKKKAKVE

SEQ ID NO: 280 - protein, 2109 aa, synthetic construct
MPAAKRVKLDGGDKKYSIGLDIGTNSVGWAVITDEYKVPSKKFKVLGNTDRHSIKKNLIGALLFDSGETAEATRLKRTARRRYTRRKNRICYLQEIFSNEMAKVDDSFFHRLEESFLVEEDKKHERHPIFGNIVDEVAYHEKYPTIYHLRKKLVDSTDKADLRLIYLALAHMIKFRGHFLIEGDLNPDNSDVDKLFIQLVQTYNQLFEENPINASGVDAKAILSARLSKSRRLENLIAQLPGEKKNGLFGNLIALSLGLTPNFKSNFDLAEDAKLQLSKDTYDDDLDNLLAQIGDQYADLFLAAKNLSDAILLSDILRVNTEITKAPLSASMIKRYDEHHQDLTLLKALVRQQLPEKYKEIFFDQSKNGYAGYIDGGASQEEFYKFIKPILEKMDGTEELLVKLNREDLLRKQRTFDNGSIPHQIHLGELHAILRRQEDFYPFLKDNREKIEKILTFRIPYYVGPLARGNSRFAWMTRKSEETITPWNFEEVVDKGASAQSFIERMTNFDKNLPNEKVLPKHSLLYEYFTVYNELTKVKYVTEGMRKPAFLSGEQKKAIVDLLFKTNRKVTVKQLKEDYFKKIECFDSVEISGVEDRFNASLGTYHDLLKIIKDKDFLDNEENEDILEDIVLTLTLFEDREMIEERLKTYAHLFDDKVMKQLKRRRYTGWGRLSRKLINGIRDKQSGKTILDFLKSDGFANRNFMQLIHDDSLTFKEDIQKAQVSGQGDSLHEHIANLAGSPAIKKGILQTVKVVDELVKVMGRHKPENIVIEMARENQTTQKGQKNSRERMKRIEEGIKELGSQILKEHPVENTQLQNEKLYLYYLQNGRDMYVDQELDINRLSDYDVDHIVPQSFLKDDSIDNKVLTRSDKARGKSDNVPSEEVVKKMKNYWRQLLNAKLITQRKFDNLTKAERGGLSELDKAGFIKRQLVETRQITKHVAQILDSRMNTKYDENDKLIREVKVITLKSKLVSDFRKDFQFYKVREINNYHHAHDAYLNAVVGTALIKKYPKLESEFVYGDYKVYDVRKMIAKSEQEIGKATAKYFFYSNIMNFFKTEITLANGEIRKRPLIETNGETGEIVWDKGRDFATVRKVLSMPQVNIVKKTEVQTGGFSKESILPKRNSDKLIARKKDWDPKKYGGFDSPTVAYSVLVVAKVEKGKSKKLKSVKELLGITIMERSSFEKNPIDFLEAKGYKEVKKDLIIKLPKYSLFELENGRKRMLASAGELQKGNELALPSKYVNFLYLASHYEKLKGSPEDNEQKQLFVEQHKHYLDEIIEQISEFSKRVILADANLDKVLSAYNKHRDKPIREQAENIIHLFTLTNLGAPAAFKYFDTTIDRKRYTSTKEVLDATLIHQSITGLYETRIDLSQLGGDGGEAAAKEAAAKEAAAKEAAAKEAAAKEAAAKGGTLQLDDEYRLYSPLVKPDQNIQFWLEQFPQAWAETAGMGLAKQVPPQVIQLKASATPVSVRQYPLSKEAQEGIRPHVQRLIQQGILVPVQSPWNTPLLPVRKPGTNDYRPVQDLREVNKRVQDIHPTVPNPYNLLCALPPQRSWYTVLDLKDAFFCLRLHPTSQPLFAFEWRDPGTGRTGQLTWTRLPQGFKNSPTIFDEALHRDLANFRIQHPQVTLLQYVDDLLLAGATKQDCLEGTKALLLELSDLGYRASAKKAQICRREVTYLGYSLRDGQRWLTEARKKTVVQIPAPTTAKQVREFLGTAGFCRLWIPGFATLAAPLYPLTKEKGEFSWAPEHQKAFDAIKKALLSAPALALPDVTKPFTLYVDERKGVARGVLTQTLGPWRRPVAYLSKKLDPVASGWPVCLKAIAAVAILVKDADKLTLGQNITVIAPHALENIVRQPPDRWMTNARMTHYQSLLLTERVTFAPPAALNPATLLPEETDEPVTHDCHQLLIEETGVRKDLTDIPLTGEVLTWFTDGSSYVVEGKRMAGAAVVDGTRTIWASSLPEGTSAQKAELMALTQALRLAEGKSINIYTDSRYAFATAHVHGAIYKQRGLLTSAGREIKNKEEILSLLEALHLPKRLAIIHCPGHQKAKDPISRGNQMADRVAKQAAQGVNLLAGKRTADGSEFEKRTADGSEFESPKKKAKVE

SEQ ID NO: 281 - protein, 2088 aa, synthetic construct
MPAAKRVKLDGGDKKYSIGLDIGTNSVGWAVITDEYKVPSKKFKVLGNTDRHSIKKNLIGALLFDSGETAEATRLKRTARRRYTRRKNRICYLQEIFSNEMAKVDDSFFHRLEESFLVEEDKKHERHPIFGNIVDEVAYHEKYPTIYHLRKKLVDSTDKADLRLIYLALAHMIKFRGHFLIEGDLNPDNSDVDKLFIQLVQTYNQLFEENPINASGVDAKAILSARLSKSRRLENLIAQLPGEKKNGLFGNLIALSLGLTPNFKSNFDLAEDAKLQLSKDTYDDDLDNLLAQIGDQYADLFLAAKNLSDAILLSDILRVNTEITKAPLSASMIKRYDEHHQDLTLLKALVRQQLPEKYKEIFFDQSKNGYAGYIDGGASQEEFYKFIKPILEKMDGTEELLVKLNREDLLRKQRTFDNGSIPHQIHLGELHAILRRQEDFYPFLKDNREKIEKILTFRIPYYVGPLARGNSRFAWMTRKSEETITPWNFEEVVDKGASAQSFIERMTNFDKNLPNEKVLPKHSLLYEYFTVYNELTKVKYVTEGMRKPAFLSGEQKKAIVDLLFKTNRKVTVKQLKEDYFKKIECFDSVEISGVEDRFNASLGTYHDLLKIIKDKDFLDNEENEDILEDIVLTLTLFEDREMIEERLKTYAHLFDDKVMKQLKRRRYTGWGRLSRKLINGIRDKQSGKTILDFLKSDGFANRNFMQLIHDDSLTFKEDIQKAQVSGQGDSLHEHIANLAGSPAIKKGILQTVKVVDELVKVMGRHKPENIVIEMARENQTTQKGQKNSRERMKRIEEGIKELGSQILKEHPVENTQLQNEKLYLYYLQNGRDMYVDQELDINRLSDYDVDHIVPQSFLKDDSIDNKVLTRSDKARGKSDNVPSEEVVKKMKNYWRQLLNAKLITQRKFDNLTKAERGGLSELDKAGFIKRQLVETRQITKHVAQILDSRMNTKYDENDKLIREVKVITLKSKLVSDFRKDFQFYKVREINNYHHAHDAYLNAVVGTALIKKYPKLESEFVYGDYKVYDVRKMIAKSEQEIGKATAKYFFYSNIMNFFKTEITLANGEIRKRPLIETNGETGEIVWDKGRDFATVRKVLSMPQVNIVKKTEVQTGGFSKESILPKRNSDKLIARKKDWDPKKYGGFDSPTVAYSVLVVAKVEKGKSKKLKSVKELLGITIMERSSFEKNPIDFLEAKGYKEVKKDLIIKLPKYSLFELENGRKRMLASAGELQKGNELALPSKYVNFLYLASHYEKLKGSPEDNEQKQLFVEQHKHYLDEIIEQISEFSKRVILADANLDKVLSAYNKHRDKPIREQAENIIHLFTLTNLGAPAAFKYFDTTIDRKRYTSTKEVLDATLIHQSITGLYETRIDLSQLGGDGGPAPGGSGSSGGTLQLDDEYRLYSPLVKPDQNIQFWLEQFPQAWAETAGMGLAKQVPPQVIQLKASATPVSVRQYPLSKEAQEGIRPHVQRLIQQGILVPVQSPWNTPLLPVRKPGTNDYRPVQDLREVNKRVQDIHPTVPNPYNLLCALPPQRSWYTVLDLKDAFFCLRLHPTSQPLFAFEWRDPGTGRTGQLTWTRLPQGFKNSPTIFDEALHRDLANFRIQHPQVTLLQYVDDLLLAGATKQDCLEGTKALLLELSDLGYRASAKKAQICRREVTYLGYSLRDGQRWLTEARKKTVVQIPAPTTAKQVREFLGTAGFCRLWIPGFATLAAPLYPLTKEKGEFSWAPEHQKAFDAIKKALLSAPALALPDVTKPFTLYVDERKGVARGVLTQTLGPWRRPVAYLSKKLDPVASGWPVCLKAIAAVAILVKDADKLTLGQNITVIAPHALENIVRQPPDRWMTNARMTHYQSLLLTERVTFAPPAALNPATLLPEETDEPVTHDCHQLLIEETGVRKDLTDIPLTGEVLTWFTDGSSYVVEGKRMAGAAVVDGTRTIWASSLPEGTSAQKAELMALTQALRLAEGKSINIYTDSRYAFATAHVHGAIYKQRGLLTSAGREIKNKEEILSLLEALHLPKRLAIIHCPGHQKAKDPISRGNQMADRVAKQAAQGVNLLAGKRTADGSEFEKRTADGSEFESPKKKAKVE

SEQ ID NO: 282 - protein, 2087 aa, synthetic construct
MPAAKRVKLDGGDKKYSIGLDIGTNSVGWAVITDEYKVPSKKFKVLGNTDRHSIKKNLIGALLFDSGETAEATRLKRTARRRYTRRKNRICYLQEIFSNEMAKVDDSFFHRLEESFLVEEDKKHERHPIFGNIVDEVAYHEKYPTIYHLRKKLVDSTDKADLRLIYLALAHMIKFRGHFLIEGDLNPDNSDVDKLFIQLVQTYNQLFEENPINASGVDAKAILSARLSKSRRLENLIAQLPGEKKNGLFGNLIALSLGLTPNFKSNFDLAEDAKLQLSKDTYDDDLDNLLAQIGDQYADLFLAAKNLSDAILLSDILRVNTEITKAPLSASMIKRYDEHHQDLTLLKALVRQQLPEKYKEIFFDQSKNGYAGYIDGGASQEEFYKFIKPILEKMDGTEELLVKLNREDLLRKQRTFDNGSIPHQIHLGELHAILRRQEDFYPFLKDNREKIEKILTFRIPYYVGPLARGNSRFAWMTRKSEETITPWNFEEVVDKGASAQSFIERMTNFDKNLPNEKVLPKHSLLYEYFTVYNELTKVKYVTEGMRKPAFLSGEQKKAIVDLLFKTNRKVTVKQLKEDYFKKIECFDSVEISGVEDRFNASLGTYHDLLKIIKDKDFLDNEENEDILEDIVLTLTLFEDREMIEERLKTYAHLFDDKVMKQLKRRRYTGWGRLSRKLINGIRDKQSGKTILDFLKSDGFANRNFMQLIHDDSLTFKEDIQKAQVSGQGDSLHEHIANLAGSPAIKKGILQTVKVVDELVKVMGRHKPENIVIEMARENQTTQKGQKNSRERMKRIEEGIKELGSQILKEHPVENTQLQNEKLYLYYLQNGRDMYVDQELDINRLSDYDVDHIVPQSFLKDDSIDNKVLTRSDKARGKSDNVPSEEVVKKMKNYWRQLLNAKLITQRKFDNLTKAERGGLSELDKAGFIKRQLVETRQITKHVAQILDSRMNTKYDENDKLIREVKVITLKSKLVSDFRKDFQFYKVREINNYHHAHDAYLNAVVGTALIKKYPKLESEFVYGDYKVYDVRKMIAKSEQEIGKATAKYFFYSNIMNFFKTEITLANGEIRKRPLIETNGETGEIVWDKGRDFATVRKVLSMPQVNIVKKTEVQTGGFSKESILPKRNSDKLIARKKDWDPKKYGGFDSPTVAYSVLVVAKVEKGKSKKLKSVKELLGITIMERSSFEKNPIDFLEAKGYKEVKKDLIIKLPKYSLFELENGRKRMLASAGELQKGNELALPSKYVNFLYLASHYEKLKGSPEDNEQKQLFVEQHKHYLDEIIEQISEFSKRVILADANLDKVLSAYNKHRDKPIREQAENIIHLFTLTNLGAPAAFKYFDTTIDRKRYTSTKEVLDATLIHQSITGLYETRIDLSQLGGDGGEAAAKGGGGGTLQLDDEYRLYSPLVKPDQNIQFWLEQFPQAWAETAGMGLAKQVPPQVIQLKASATPVSVRQYPLSKEAQEGIRPHVQRLIQQGILVPVQSPWNTPLLPVRKPGTNDYRPVQDLREVNKRVQDIHPTVPNPYNLLCALPPQRSWYTVLDLKDAFFCLRLHPTSQPLFAFEWRDPGTGRTGQLTWTRLPQGFKNSPTIFDEALHRDLANFRIQHPQVTLLQYVDDLLLAGATKQDCLEGTKALLLELSDLGYRASAKKAQICRREVTYLGYSLRDGQRWLTEARKKTVVQIPAPTTAKQVREFLGTAGFCRLWIPGFATLAAPLYPLTKEKGEFSWAPEHQKAFDAIKKALLSAPALALPDVTKPFTLYVDERKGVARGVLTQTLGPWRRPVAYLSKKLDPVASGWPVCLKAIAAVAILVKDADKLTLGQNITVIAPHALENIVRQPPDRWMTNARMTHYQSLLLTERVTFAPPAALNPATLLPEETDEPVTHDCHQLLIEETGVRKDLTDIPLTGEVLTWFTDGSSYVVEGKRMAGAAVVDGTRTIWASSLPEGTSAQKAELMALTQALRLAEGKSINIYTDSRYAFATAHVHGAIYKQRGLLTSAGREIKNKEEILSLLEALHLPKRLAIIHCPGHQKAKDPISRGNQMADRVAKQAAQGVNLLAGKRTADGSEFEKRTADGSEFESPKKKAKVE

SEQ ID NO: 283 - protein, 2091 aa, synthetic construct
MPAAKRVKLDGGDKKYSIGLDIGTNSVGWAVITDEYKVPSKKFKVLGNTDRHSIKKNLIGALLFDSGETAEATRLKRTARRRYTRRKNRICYLQEIFSNEMAKVDDSFFHRLEESFLVEEDKKHERHPIFGNIVDEVAYHEKYPTIYHLRKKLVDSTDKADLRLIYLALAHMIKFRGHFLIEGDLNPDNSDVDKLFIQLVQTYNQLFEENPINASGVDAKAILSARLSKSRRLENLIAQLPGEKKNGLFGNLIALSLGLTPNFKSNFDLAEDAKLQLSKDTYDDDLDNLLAQIGDQYADLFLAAKNLSDAILLSDILRVNTEITKAPLSASMIKRYDEHHQDLTLLKALVRQQLPEKYKEIFFDQSKNGYAGYIDGGASQEEFYKFIKPILEKMDGTEELLVKLNREDLLRKQRTFDNGSIPHQIHLGELHAILRRQEDFYPFLKDNREKIEKILTFRIPYYVGPLARGNSRFAWMTRKSEETITPWNFEEVVDKGASAQSFIERMTNFDKNLPNEKVLPKHSLLYEYFTVYNELTKVKYVTEGMRKPAFLSGEQKKAIVDLLFKTNRKVTVKQLKEDYFKKIECFDSVEISGVEDRFNASLGTYHDLLKIIKDKDFLDNEENEDILEDIVLTLTLFEDREMIEERLKTYAHLFDDKVMKQLKRRRYTGWGRLSRKLINGIRDKQSGKTILDFLKSDGFANRNFMQLIHDDSLTFKEDIQKAQVSGQGDSLHEHIANLAGSPAIKKGILQTVKVVDELVKVMGRHKPENIVIEMARENQTTQKGQKNSRERMKRIEEGIKELGSQILKEHPVENTQLQNEKLYLYYLQNGRDMYVDQELDINRLSDYDVDHIVPQSFLKDDSIDNKVLTRSDKARGKSDNVPSEEVVKKMKNYWRQLLNAKLITQRKFDNLTKAERGGLSELDKAGFIKRQLVETRQITKHVAQILDSRMNTKYDENDKLIREVKVITLKSKLVSDFRKDFQFYKVREINNYHHAHDAYLNAVVGTALIKKYPKLESEFVYGDYKVYDVRKMIAKSEQEIGKATAKYFFYSNIMNFFKTEITLANGEIRKRPLIETNGETGEIVWDKGRDFATVRKVLSMPQVNIVKKTEVQTGGFSKESILPKRNSDKLIARKKDWDPKKYGGFDSPTVAYSVLVVAKVEKGKSKKLKSVKELLGITIMERSSFEKNPIDFLEAKGYKEVKKDLIIKLPKYSLFELENGRKRMLASAGELQKGNELALPSKYVNFLYLASHYEKLKGSPEDNEQKQLFVEQHKHYLDEIIEQISEFSKRVILADANLDKVLSAYNKHRDKPIREQAENIIHLFTLTNLGAPAAFKYFDTTIDRKRYTSTKEVLDATLIHQSITGLYETRIDLSQLGGDGGGSAGSAAGSGEFGGTLQLDDEYRLYSPLVKPDQNIQFWLEQFPQAWAETAGMGLAKQVPPQVIQLKASATPVSVRQYPLSKEAQEGIRPHVQRLIQQGILVPVQSPWNTPLLPVRKPGTNDYRPVQDLREVNKRVQDIHPTVPNPYNLLCALPPQRSWYTVLDLKDAFFCLRLHPTSQPLFAFEWRDPGTGRTGQLTWTRLPQGFKNSPTIFDEALHRDLANFRIQHPQVTLLQYVDDLLLAGATKQDCLEGTKALLLELSDLGYRASAKKAQICRREVTYLGYSLRDGQRWLTEARKKTVVQIPAPTTAKQVREFLGTAGFCRLWIPGFATLAAPLYPLTKEKGEFSWAPEHQKAFDAIKKALLSAPALALPDVTKPFTLYVDERKGVARGVLTQTLGPWRRPVAYLSKKLDPVASGWPVCLKAIAAVAILVKDADKLTLGQNITVIAPHALENIVRQPPDRWMTNARMTHYQSLLLTERVTFAPPAALNPATLLPEETDEPVTHDCHQLLIEETGVRKDLTDIPLTGEVLTWFTDGSSYVVEGKRMAGAAVVDGTRTIWASSLPEGTSAQKAELMALTQALRLAEGKSINIYTDSRYAFATAHVHGAIYKQRGLLTSAGREIKNKEEILSLLEALHLPKRLAIIHCPGHQKAKDPISRGNQMADRVAKQAAQGVNLLAGKRTADGSEFEKRTADGSEFESPKKKAKVE

SEQ ID NO: 284 - protein, 2088 aa, synthetic construct
MPAAKRVKLDGGDKKYSIGLDIGTNSVGWAVITDEYKVPSKKFKVLGNTDRHSIKKNLIGALLFDSGETAEATRLKRTARRRYTRRKNRICYLQEIFSNEMAKVDDSFFHRLEESFLVEEDKKHERHPIFGNIVDEVAYHEKYPTIYHLRKKLVDSTDKADLRLIYLALAHMIKFRGHFLIEGDLNPDNSDVDKLFIQLVQTYNQLFEENPINASGVDAKAILSARLSKSRRLENLIAQLPGEKKNGLFGNLIALSLGLTPNFKSNFDLAEDAKLQLSKDTYDDDLDNLLAQIGDQYADLFLAAKNLSDAILLSDILRVNTEITKAPLSASMIKRYDEHHQDLTLLKALVRQQLPEKYKEIFFDQSKNGYAGYIDGGASQEEFYKFIKPILEKMDGTEELLVKLNREDLLRKQRTFDNGSIPHQIHLGELHAILRRQEDFYPFLKDNREKIEKILTFRIPYYVGPLARGNSRFAWMTRKSEETITPWNFEEVVDKGASAQSFIERMTNFDKNLPNEKVLPKHSLLYEYFTVYNELTKVKYVTEGMRKPAFLSGEQKKAIVDLLFKTNRKVTVKQLKEDYFKKIECFDSVEISGVEDRFNASLGTYHDLLKIIKDKDFLDNEENEDILEDIVLTLTLFEDREMIEERLKTYAHLFDDKVMKQLKRRRYTGWGRLSRKLINGIRDKQSGKTILDFLKSDGFANRNFMQLIHDDSLTFKEDIQKAQVSGQGDSLHEHIANLAGSPAIKKGILQTVKVVDELVKVMGRHKPENIVIEMARENQTTQKGQKNSRERMKRIEEGIKELGSQILKEHPVENTQLQNEKLYLYYLQNGRDMYVDQELDINRLSDYDVDHIVPQSFLKDDSIDNKVLTRSDKARGKSDNVPSEEVVKKMKNYWRQLLNAKLITQRKFDNLTKAERGGLSELDKAGFIKRQLVETRQITKHVAQILDSRMNTKYDENDKLIREVKVITLKSKLVSDFRKDFQFYKVREINNYHHAHDAYLNAVVGTALIKKYPKLESEFVYGDYKVYDVRKMIAKSEQEIGKATAKYFFYSNIMNFFKTEITLANGEIRKRPLIETNGETGEIVWDKGRDFATVRKVLSMPQVNIVKKTEVQTGGFSKESILPKRNSDKLIARKKDWDPKKYGGFDSPTVAYSVLVVAKVEKGKSKKLKSVKELLGITIMERSSFEKNPIDFLEAKGYKEVKKDLIIKLPKYSLFELENGRKRMLASAGELQKGNELALPSKYVNFLYLASHYEKLKGSPEDNEQKQLFVEQHKHYLDEIIEQISEFSKRVILADANLDKVLSAYNKHRDKPIREQAENIIHLFTLTNLGAPAAFKYFDTTIDRKRYTSTKEVLDATLIHQSITGLYETRIDLSQLGGDGGGSSGGGGGSGGTLQLDDEYRLYSPLVKPDQNIQFWLEQFPQAWAETAGMGLAKQVPPQVIQLKASATPVSVRQYPLSKEAQEGIRPHVQRLIQQGILVPVQSPWNTPLLPVRKPGTNDYRPVQDLREVNKRVQDIHPTVPNPYNLLCALPPQRSWYTVLDLKDAFFCLRLHPTSQPLFAFEWRDPGTGRTGQLTWTRLPQGFKNSPTIFDEALHRDLANFRIQHPQVTLLQYVDDLLLAGATKQDCLEGTKALLLELSDLGYRASAKKAQICRREVTYLGYSLRDGQRWLTEARKKTVVQIPAPTTAKQVREFLGTAGFCRLWIPGFATLAAPLYPLTKEKGEFSWAPEHQKAFDAIKKALLSAPALALPDVTKPFTLYVDERKGVARGVLTQTLGPWRRPVAYLSKKLDPVASGWPVCLKAIAAVAILVKDADKLTLGQNITVIAPHALENIVRQPPDRWMTNARMTHYQSLLLTERVTFAPPAALNPATLLPEETDEPVTHDCHQLLIEETGVRKDLTDIPLTGEVLTWFTDGSSYVVEGKRMAGAAVVDGTRTIWASSLPEGTSAQKAELMALTQALRLAEGKSINIYTDSRYAFATAHVHGAIYKQRGLLTSAGREIKNKEEILSLLEALHLPKRLAIIHCPGHQKAKDPISRGNQMADRVAKQAAQGVNLLAGKRTADGSEFEKRTADGSEFESPKKKAKVE

SEQ ID NO: 285 - protein, 2090 aa, synthetic construct
MPAAKRVKLDGGDKKYSIGLDIGTNSVGWAVITDEYKVPSKKFKVLGNTDRHSIKKNLIGALLFDSGETAEATRLKRTARRRYTRRKNRICYLQEIFSNEMAKVDDSFFHRLEESFLVEEDKKHERHPIFGNIVDEVAYHEKYPTIYHLRKKLVDSTDKADLRLIYLALAHMIKFRGHFLIEGDLNPDNSDVDKLFIQLVQTYNQLFEENPINASGVDAKAILSARLSKSRRLENLIAQLPGEKKNGLFGNLIALSLGLTPNFKSNFDLAEDAKLQLSKDTYDDDLDNLLAQIGDQYADLFLAAKNLSDAILLSDILRVNTEITKAPLSASMIKRYDEHHQDLTLLKALVRQQLPEKYKEIFFDQSKNGYAGYIDGGASQEEFYKFIKPILEKMDGTEELLVKLNREDLLRKQRTFDNGSIPHQIHLGELHAILRRQEDFYPFLKDNREKIEKILTFRIPYYVGPLARGNSRFAWMTRKSEETITPWNFEEVVDKGASAQSFIERMTNFDKNLPNEKVLPKHSLLYEYFTVYNELTKVKYVTEGMRKPAFLSGEQKKAIVDLLFKTNRKVTVKQLKEDYFKKIECFDSVEISGVEDRFNASLGTYHDLLKIIKDKDFLDNEENEDILEDIVLTLTLFEDREMIEERLKTYAHLFDDKVMKQLKRRRYTGWGRLSRKLINGIRDKQSGKTILDFLKSDGFANRNFMQLIHDDSLTFKEDIQKAQVSGQGDSLHEHIANLAGSPAIKKGILQTVKVVDELVKVMGRHKPENIVIEMARENQTTQKGQKNSRERMKRIEEGIKELGSQILKEHPVENTQLQNEKLYLYYLQNGRDMYVDQELDINRLSDYDVDHIVPQSFLKDDSIDNKVLTRSDKARGKSDNVPSEEVVKKMKNYWRQLLNAKLITQRKFDNLTKAERGGLSELDKAGFIKRQLVETRQITKHVAQILDSRMNTKYDENDKLIREVKVITLKSKLVSDFRKDFQFYKVREINNYHHAHDAYLNAVVGTALIKKYPKLESEFVYGDYKVYDVRKMIAKSEQEIGKATAKYFFYSNIMNFFKTEITLANGEIRKRPLIETNGETGEIVWDKGRDFATVRKVLSMPQVNIVKKTEVQTGGFSKESILPKRNSDKLIARKKDWDPKKYGGFDSPTVAYSVLVVAKVEKGKSKKLKSVKELLGITIMERSSFEKNPIDFLEAKGYKEVKKDLIIKLPKYSLFELENGRKRMLASAGELQKGNELALPSKYVNFLYLASHYEKLKGSPEDNEQKQLFVEQHKHYLDEIIEQISEFSKRVILADANLDKVLSAYNKHRDKPIREQAENIIHLFTLTNLGAPAAFKYFDTTIDRKRYTSTKEVLDATLIHQSITGLYETRIDLSQLGGDGGGSSEAAAKGGGGGTLQLDDEYRLYSPLVKPDQNIQFWLEQFPQAWAETAGMGLAKQVPPQVIQLKASATPVSVRQYPLSKEAQEGIRPHVQRLIQQGILVPVQSPWNTPLLPVRKPGTNDYRPVQDLREVNKRVQDIHPTVPNPYNLLCALPPQRSWYTVLDLKDAFFCLRLHPTSQPLFAFEWRDPGTGRTGQLTWTRLPQGFKNSPTIFDEALHRDLANFRIQHPQVTLLQYVDDLLLAGATKQDCLEGTKALLLELSDLGYRASAKKAQICRREVTYLGYSLRDGQRWLTEARKKTVVQIPAPTTAKQVREFLGTAGFCRLWIPGFATLAAPLYPLTKEKGEFSWAPEHQKAFDAIKKALLSAPALALPDVTKPFTLYVDERKGVARGVLTQTLGPWRRPVAYLSKKLDPVASGWPVCLKAIAAVAILVKDADKLTLGQNITVIAPHALENIVRQPPDRWMTNARMTHYQSLLLTERVTFAPPAALNPATLLPEETDEPVTHDCHQLLIEETGVRKDLTDIPLTGEVLTWFTDGSSYVVEGKRMAGAAVVDGTRTIWASSLPEGTSAQKAELMALTQALRLAEGKSINIYTDSRYAFATAHVHGAIYKQRGLLTSAGREIKNKEEILSLLEALHLPKRLAIIHCPGHQKAKDPISRGNQMADRVAKQAAQGVNLLAGKRTADGSEFEKRTADGSEFESPKKKAKVE

SEQ ID NO: 286 - protein, 2090 aa, synthetic construct
MPAAKRVKLDGGDKKYSIGLDIGTNSVGWAVITDEYKVPSKKFKVLGNTDRHSIKKNLIGALLFDSGETAEATRLKRTARRRYTRRKNRICYLQEIFSNEMAKVDDSFFHRLEESFLVEEDKKHERHPIFGNIVDEVAYHEKYPTIYHLRKKLVDSTDKADLRLIYLALAHMIKFRGHFLIEGDLNPDNSDVDKLFIQLVQTYNQLFEENPINASGVDAKAILSARLSKSRRLENLIAQLPGEKKNGLFGNLIALSLGLTPNFKSNFDLAEDAKLQLSKDTYDDDLDNLLAQIGDQYADLFLAAKNLSDAILLSDILRVNTEITKAPLSASMIKRYDEHHQDLTLLKALVRQQLPEKYKEIFFDQSKNGYAGYIDGGASQEEFYKFIKPILEKMDGTEELLVKLNREDLLRKQRTFDNGSIPHQIHLGELHAILRRQEDFYPFLKDNREKIEKILTFRIPYYVGPLARGNSRFAWMTRKSEETITPWNFEEVVDKGASAQSFIERMTNFDKNLPNEKVLPKHSLLYEYFTVYNELTKVKYVTEGMRKPAFLSGEQKKAIVDLLFKTNRKVTVKQLKEDYFKKIECFDSVEISGVEDRFNASLGTYHDLLKIIKDKDFLDNEENEDILEDIVLTLTLFEDREMIEERLKTYAHLFDDKVMKQLKRRRYTGWGRLSRKLINGIRDKQSGKTILDFLKSDGFANRNFMQLIHDDSLTFKEDIQKAQVSGQGDSLHEHIANLAGSPAIKKGILQTVKVVDELVKVMGRHKPENIVIEMARENQTTQKGQKNSRERMKRIEEGIKELGSQILKEHPVENTQLQNEKLYLYYLQNGRDMYVDQELDINRLSDYDVDHIVPQSFLKDDSIDNKVLTRSDKARGKSDNVPSEEVVKKMKNYWRQLLNAKLITQRKFDNLTKAERGGLSELDKAGFIKRQLVETRQITKHVAQILDSRMNTKYDENDKLIREVKVITLKSKLVSDFRKDFQFYKVREINNYHHAHDAYLNAVVGTALIKKYPKLESEFVYGDYKVYDVRKMIAKSEQEIGKATAKYFFYSNIMNFFKTEITLANGEIRKRPLIETNGETGEIVWDKGRDFATVRKVLSMPQVNIVKKTEVQTGGFSKESILPKRNSDKLIARKKDWDPKKYGGFDSPTVAYSVLVVAKVEKGKSKKLKSVKELLGITIMERSSFEKNPIDFLEAKGYKEVKKDLIIKLPKYSLFELENGRKRMLASAGELQKGNELALPSKYVNFLYLASHYEKLKGSPEDNEQKQLFVEQHKHYLDEIIEQISEFSKRVILADANLDKVLSAYNKHRDKPIREQAENIIHLFTLTNLGAPAAFKYFDTTIDRKRYTSTKEVLDATLIHQSITGLYETRIDLSQLGGDGGGGSGGGEAAAKGGTLQLDDEYRLYSPLVKPDQNIQFWLEQFPQAWAETAGMGLAKQVPPQVIQLKASATPVSVRQYPLSKEAQEGIRPHVQRLIQQGILVPVQSPWNTPLLPVRKPGTNDYRPVQDLREVNKRVQDIHPTVPNPYNLLCALPPQRSWYTVLDLKDAFFCLRLHPTSQPLFAFEWRDPGTGRTGQLTWTRLPQGFKNSPTIFDEALHRDLANFRIQHPQVTLLQYVDDLLLAGATKQDCLEGTKALLLELSDLGYRASAKKAQICRREVTYLGYSLRDGQRWLTEARKKTVVQIPAPTTAKQVREFLGTAGFCRLWIPGFATLAAPLYPLTKEKGEFSWAPEHQKAFDAIKKALLSAPALALPDVTKPFTLYVDERKGVARGVLTQTLGPWRRPVAYLSKKLDPVASGWPVCLKAIAAVAILVKDADKLTLGQNITVIAPHALENIVRQPPDRWMTNARMTHYQSLLLTERVTFAPPAALNPATLLPEETDEPVTHDCHQLLIEETGVRKDLTDIPLTGEVLTWFTDGSSYVVEGKRMAGAAVVDGTRTIWASSLPEGTSAQKAELMALTQALRLAEGKSINIYTDSRYAFATAHVHGAIYKQRGLLTSAGREIKNKEEILSLLEALHLPKRLAIIHCPGHQKAKDPISRGNQMADRVAKQAAQGVNLLAGKRTADGSEFEKRTADGSEFESPKKKAKVE

SEQ ID NO: 287 - protein, 2090 aa, synthetic construct
MPAAKRVKLDGGDKKYSIGLDIGTNSVGWAVITDEYKVPSKKFKVLGNTDRHSIKKNLIGALLFDSGETAEATRLKRTARRRYTRRKNRICYLQEIFSNEMAKVDDSFFHRLEESFLVEEDKKHERHPIFGNIVDEVAYHEKYPTIYHLRKKLVDSTDKADLRLIYLALAHMIKFRGHFLIEGDLNPDNSDVDKLFIQLVQTYNQLFEENPINASGVDAKAILSARLSKSRRLENLIAQLPGEKKNGLFGNLIALSLGLTPNFKSNFDLAEDAKLQLSKDTYDDDLDNLLAQIGDQYADLFLAAKNLSDAILLSDILRVNTEITKAPLSASMIKRYDEHHQDLTLLKALVRQQLPEKYKEIFFDQSKNGYAGYIDGGASQEEFYKFIKPILEKMDGTEELLVKLNREDLLRKQRTFDNGSIPHQIHLGELHAILRRQEDFYPFLKDNREKIEKILTFRIPYYVGPLARGNSRFAWMTRKSEETITPWNFEEVVDKGASAQSFIERMTNFDKNLPNEKVLPKHSLLYEYFTVYNELTKVKYVTEGMRKPAFLSGEQKKAIVDLLFKTNRKVTVKQLKEDYFKKIECFDSVEISGVEDRFNASLGTYHDLLKIIKDKDFLDNEENEDILEDIVLTLTLFEDREMIEERLKTYAHLFDDKVMKQLKRRRYTGWGRLSRKLINGIRDKQSGKTILDFLKSDGFANRNFMQLIHDDSLTFKEDIQKAQVSGQGDSLHEHIANLAGSPAIKKGILQTVKVVDELVKVMGRHKPENIVIEMARENQTTQKGQKNSRERMKRIEEGIKELGSQILKEHPVENTQLQNEKLYLYYLQNGRDMYVDQELDINRLSDYDVDHIVPQSFLKDDSIDNKVLTRSDKARGKSDNVPSEEVVKKMKNYWRQLLNAKLITQRKFDNLTKAERGGLSELDKAGFIKRQLVETRQITKHVAQILDSRMNTKYDENDKLIREVKVITLKSKLVSDFRKDFQFYKVREINNYHHAHDAYLNAVVGTALIKKYPKLESEFVYGDYKVYDVRKMIAKSEQEIGKATAKYFFYSNIMNFFKTEITLANGEIRKRPLIETNGETGEIVWDKGRDFATVRKVLSMPQVNIVKKTEVQTGGFSKESILPKRNSDKLIARKKDWDPKKYGGFDSPTVAYSVLVVAKVEKGKSKKLKSVKELLGITIMERSSFEKNPIDFLEAKGYKEVKKDLIIKLPKYSLFELENGRKRMLASAGELQKGNELALPSKYVNFLYLASHYEKLKGSPEDNEQKQLFVEQHKHYLDEIIEQISEFSKRVILADANLDKVLSAYNKHRDKPIREQAENIIHLFTLTNLGAPAAFKYFDTTIDRKRYTSTKEVLDATLIHQSITGLYETRIDLSQLGGDGGEAAAKPAPGGSGGTLQLDDEYRLYSPLVKPDQNIQFWLEQFPQAWAETAGMGLAKQVPPQVIQLKASATPVSVRQYPLSKEAQEGIRPHVQRLIQQGILVPVQSPWNTPLLPVRKPGTNDYRPVQDLREVNKRVQDIHPTVPNPYNLLCALPPQRSWYTVLDLKDAFFCLRLHPTSQPLFAFEWRDPGTGRTGQLTWTRLPQGFKNSPTIFDEALHRDLANFRIQHPQVTLLQYVDDLLLAGATKQDCLEGTKALLLELSDLGYRASAKKAQICRREVTYLGYSLRDGQRWLTEARKKTVVQIPAPTTAKQVREFLGTAGFCRLWIPGFATLAAPLYPLTKEKGEFSWAPEHQKAFDAIKKALLSAPALALPDVTKPFTLYVDERKGVARGVLTQTLGPWRRPVAYLSKKLDPVASGWPVCLKAIAAVAILVKDADKLTLGQNITVIAPHALENIVRQPPDRWMTNARMTHYQSLLLTERVTFAPPAALNPATLLPEETDEPVTHDCHQLLIEETGVRKDLTDIPLTGEVLTWFTDGSSYVVEGKRMAGAAVVDGTRTIWASSLPEGTSAQKAELMALTQALRLAEGKSINIYTDSRYAFATAHVHGAIYKQRGLLTSAGREIKNKEEILSLLEALHLPKRLAIIHCPGHQKAKDPISRGNQMADRVAKQAAQGVNLLAGKRTADGSEFEKRTADGSEFESPKKKAKVE

SEQ ID NO: 288 - protein, 2090 aa, synthetic construct
MPAAKRVKLDGGDKKYSIGLDIGTNSVGWAVITDEYKVPSKKFKVLGNTDRHSIKKNLIGALLFDSGETAEATRLKRTARRRYTRRKNRICYLQEIFSNEMAKVDDSFFHRLEESFLVEEDKKHERHPIFGNIVDEVAYHEKYPTIYHLRKKLVDSTDKADLRLIYLALAHMIKFRGHFLIEGDLNPDNSDVDKLFIQLVQTYNQLFEENPINASGVDAKAILSARLSKSRRLENLIAQLPGEKKNGLFGNLIALSLGLTPNFKSNFDLAEDAKLQLSKDTYDDDLDNLLAQIGDQYADLFLAAKNLSDAILLSDILRVNTEITKAPLSASMIKRYDEHHQDLTLLKALVRQQLPEKYKEIFFDQSKNGYAGYIDGGASQEEFYKFIKPILEKMDGTEELLVKLNREDLLRKQRTFDNGSIPHQIHLGELHAILRRQEDFYPFLKDNREKIEKILTFRIPYYVGPLARGNSRFAWMTRKSEETITPWNFEEVVDKGASAQSFIERMTNFDKNLPNEKVLPKHSLLYEYFTVYNELTKVKYVTEGMRKPAFLSGEQKKAIVDLLFKTNRKVTVKQLKEDYFKKIECFDSVEISGVEDRFNASLGTYHDLLKIIKDKDFLDNEENEDILEDIVLTLTLFEDREMIEERLKTYAHLFDDKVMKQLKRRRYTGWGRLSRKLINGIRDKQSGKTILDFLKSDGFANRNFMQLIHDDSLTFKEDIQKAQVSGQGDSLHEHIANLAGSPAIKKGILQTVKVVDELVKVMGRHKPENIVIEMARENQTTQKGQKNSRERMKRIEEGIKELGSQILKEHPVENTQLQNEKLYLYYLQNGRDMYVDQELDINRLSDYDVDHIVPQSFLKDDSIDNKVLTRSDKARGKSDNVPSEEVVKKMKNYWRQLLNAKLITQRKFDNLTKAERGGLSELDKAGFIKRQLVETRQITKHVAQILDSRMNTKYDENDKLIREVKVITLKSKLVSDFRKDFQFYKVREINNYHHAHDAYLNAVVGTALIKKYPKLESEFVYGDYKVYDVRKMIAKSEQEIGKATAKYFFYSNIMNFFKTEITLANGEIRKRPLIETNGETGEIVWDKGRDFATVRKVLSMPQVNIVKKTEVQTGGFSKESILPKRNSDKLIARKKDWDPKKYGGFDSPTVAYSVLVVAKVEKGKSKKLKSVKELLGITIMERSSFEKNPIDFLEAKGYKEVKKDLIIKLPKYSLFELENGRKRMLASAGELQKGNELALPSKYVNFLYLASHYEKLKGSPEDNEQKQLFVEQHKHYLDEIIEQISEFSKRVILADANLDKVLSAYNKHRDKPIREQAENIIHLFTLTNLGAPAAFKYFDTTIDRKRYTSTKEVLDATLIHQSITGLYETRIDLSQLGGDGGEAAAKGGGGGSGGTLQLDDEYRLYSPLVKPDQNIQFWLEQFPQAWAETAGMGLAKQVPPQVIQLKASATPVSVRQYPLSKEAQEGIRPHVQRLIQQGILVPVQSPWNTPLLPVRKPGTNDYRPVQDLREVNKRVQDIHPTVPNPYNLLCALPPQRSWYTVLDLKDAFFCLRLHPTSQPLFAFEWRDPGTGRTGQLTWTRLPQGFKNSPTIFDEALHRDLANFRIQHPQVTLLQYVDDLLLAGATKQDCLEGTKALLLELSDLGYRASAKKAQICRREVTYLGYSLRDGQRWLTEARKKTVVQIPAPTTAKQVREFLGTAGFCRLWIPGFATLAAPLYPLTKEKGEFSWAPEHQKAFDAIKKALLSAPALALPDVTKPFTLYVDERKGVARGVLTQTLGPWRRPVAYLSKKLDPVASGWPVCLKAIAAVAILVKDADKLTLGQNITVIAPHALENIVRQPPDRWMTNARMTHYQSLLLTERVTFAPPAALNPATLLPEETDEPVTHDCHQLLIEETGVRKDLTDIPLTGEVLTWFTDGSSYVVEGKRMAGAAVVDGTRTIWASSLPEGTSAQKAELMALTQALRLAEGKSINIYTDSRYAFATAHVHGAIYKQRGLLTSAGREIKNKEEILSLLEALHLPKRLAIIHCPGHQKAKDPISRGNQMADRVAKQAAQGVNLLAGKRTADGSEFEKRTADGSEFESPKKKAKVE

SEQ ID NO: 289 - protein, 2082 aa, synthetic construct
MPAAKRVKLDGGDKKYSIGLDIGTNSVGWAVITDEYKVPSKKFKVLGNTDRHSIKKNLIGALLFDSGETAEATRLKRTARRRYTRRKNRICYLQEIFSNEMAKVDDSFFHRLEESFLVEEDKKHERHPIFGNIVDEVAYHEKYPTIYHLRKKLVDSTDKADLRLIYLALAHMIKFRGHFLIEGDLNPDNSDVDKLFIQLVQTYNQLFEENPINASGVDAKAILSARLSKSRRLENLIAQLPGEKKNGLFGNLIALSLGLTPNFKSNFDLAEDAKLQLSKDTYDDDLDNLLAQIGDQYADLFLAAKNLSDAILLSDILRVNTEITKAPLSASMIKRYDEHHQDLTLLKALVRQQLPEKYKEIFFDQSKNGYAGYIDGGASQEEFYKFIKPILEKMDGTEELLVKLNREDLLRKQRTFDNGSIPHQIHLGELHAILRRQEDFYPFLKDNREKIEKILTFRIPYYVGPLARGNSRFAWMTRKSEETITPWNFEEVVDKGASAQSFIERMTNFDKNLPNEKVLPKHSLLYEYFTVYNELTKVKYVTEGMRKPAFLSGEQKKAIVDLLFKTNRKVTVKQLKEDYFKKIECFDSVEISGVEDRFNASLGTYHDLLKIIKDKDFLDNEENEDILEDIVLTLTLFEDREMIEERLKTYAHLFDDKVMKQLKRRRYTGWGRLSRKLINGIRDKQSGKTILDFLKSDGFANRNFMQLIHDDSLTFKEDIQKAQVSGQGDSLHEHIANLAGSPAIKKGILQTVKVVDELVKVMGRHKPENIVIEMARENQTTQKGQKNSRERMKRIEEGIKELGSQILKEHPVENTQLQNEKLYLYYLQNGRDMYVDQELDINRLSDYDVDHIVPQSFLKDDSIDNKVLTRSDKARGKSDNVPSEEVVKKMKNYWRQLLNAKLITQRKFDNLTKAERGGLSELDKAGFIKRQLVETRQITKHVAQILDSRMNTKYDENDKLIREVKVITLKSKLVSDFRKDFQFYKVREINNYHHAHDAYLNAVVGTALIKKYPKLESEFVYGDYKVYDVRKMIAKSEQEIGKATAKYFFYSNIMNFFKTEITLANGEIRKRPLIETNGETGEIVWDKGRDFATVRKVLSMPQVNIVKKTEVQTGGFSKESILPKRNSDKLIARKKDWDPKKYGGFDSPTVAYSVLVVAKVEKGKSKKLKSVKELLGITIMERSSFEKNPIDFLEAKGYKEVKKDLIIKLPKYSLFELENGRKRMLASAGELQKGNELALPSKYVNFLYLASHYEKLKGSPEDNEQKQLFVEQHKHYLDEIIEQISEFSKRVILADANLDKVLSAYNKHRDKPIREQAENIIHLFTLTNLGAPAAFKYFDTTIDRKRYTSTKEVLDATLIHQSITGLYETRIDLSQLGGDGGGGGGGTLQLDDEYRLYSPLVKPDQNIQFWLEQFPQAWAETAGMGLAKQVPPQVIQLKASATPVSVRQYPLSKEAQEGIRPHVQRLIQQGILVPVQSPWNTPLLPVRKPGTNDYRPVQDLREVNKRVQDIHPTVPNPYNLLCALPPQRSWYTVLDLKDAFFCLRLHPTSQPLFAFEWRDPGTGRTGQLTWTRLPQGFKNSPTIFDEALHRDLANFRIQHPQVTLLQYVDDLLLAGATKQDCLEGTKALLLELSDLGYRASAKKAQICRREVTYLGYSLRDGQRWLTEARKKTVVQIPAPTTAKQVREFLGTAGFCRLWIPGFATLAAPLYPLTKEKGEFSWAPEHQKAFDAIKKALLSAPALALPDVTKPFTLYVDERKGVARGVLTQTLGPWRRPVAYLSKKLDPVASGWPVCLKAIAAVAILVKDADKLTLGQNITVIAPHALENIVRQPPDRWMTNARMTHYQSLLLTERVTFAPPAALNPATLLPEETDEPVTHDCHQLLIEETGVRKDLTDIPLTGEVLTWFTDGSSYVVEGKRMAGAAVVDGTRTIWASSLPEGTSAQKAELMALTQALRLAEGKSINIYTDSRYAFATAHVHGAIYKQRGLLTSAGREIKNKEEILSLLEALHLPKRLAIIHCPGHQKAKDPISRGNQMADRVAKQAAQGVNLLAGKRTADGSEFEKRTADGSEFESPKKKAKVE

SEQ ID NO: 290 - protein, 2090 aa, synthetic construct
MPAAKRVKLDGGDKKYSIGLDIGTNSVGWAVITDEYKVPSKKFKVLGNTDRHSIKKNLIGALLFDSGETAEATRLKRTARRRYTRRKNRICYLQEIFSNEMAKVDDSFFHRLEESFLVEEDKKHERHPIFGNIVDEVAYHEKYPTIYHLRKKLVDSTDKADLRLIYLALAHMIKFRGHFLIEGDLNPDNSDVDKLFIQLVQTYNQLFEENPINASGVDAKAILSARLSKSRRLENLIAQLPGEKKNGLFGNLIALSLGLTPNFKSNFDLAEDAKLQLSKDTYDDDLDNLLAQIGDQYADLFLAAKNLSDAILLSDILRVNTEITKAPLSASMIKRYDEHHQDLTLLKALVRQQLPEKYKEIFFDQSKNGYAGYIDGGASQEEFYKFIKPILEKMDGTEELLVKLNREDLLRKQRTFDNGSIPHQIHLGELHAILRRQEDFYPFLKDNREKIEKILTFRIPYYVGPLARGNSRFAWMTRKSEETITPWNFEEVVDKGASAQSFIERMTNFDKNLPNEKVLPKHSLLYEYFTVYNELTKVKYVTEGMRKPAFLSGEQKKAIVDLLFKTNRKVTVKQLKEDYFKKIECFDSVEISGVEDRFNASLGTYHDLLKIIKDKDFLDNEENEDILEDIVLTLTLFEDREMIEERLKTYAHLFDDKVMKQLKRRRYTGWGRLSRKLINGIRDKQSGKTILDFLKSDGFANRNFMQLIHDDSLTFKEDIQKAQVSGQGDSLHEHIANLAGSPAIKKGILQTVKVVDELVKVMGRHKPENIVIEMARENQTTQKGQKNSRERMKRIEEGIKELGSQILKEHPVENTQLQNEKLYLYYLQNGRDMYVDQELDINRLSDYDVDHIVPQSFLKDDSIDNKVLTRSDKARGKSDNVPSEEVVKKMKNYWRQLLNAKLITQRKFDNLTKAERGGLSELDKAGFIKRQLVETRQITKHVAQILDSRMNTKYDENDKLIREVKVITLKSKLVSDFRKDFQFYKVREINNYHHAHDAYLNAVVGTALIKKYPKLESEFVYGDYKVYDVRKMIAKSEQEIGKATAKYFFYSNIMNFFKTEITLANGEIRKRPLIETNGETGEIVWDKGRDFATVRKVLSMPQVNIVKKTEVQTGGFSKESILPKRNSDKLIARKKDWDPKKYGGFDSPTVAYSVLVVAKVEKGKSKKLKSVKELLGITIMERSSFEKNPIDFLEAKGYKEVKKDLIIKLPKYSLFELENGRKRMLASAGELQKGNELALPSKYVNFLYLASHYEKLKGSPEDNEQKQLFVEQHKHYLDEIIEQISEFSKRVILADANLDKVLSAYNKHRDKPIREQAENIIHLFTLTNLGAPAAFKYFDTTIDRKRYTSTKEVLDATLIHQSITGLYETRIDLSQLGGDGGEAAAKGGGGSSGGTLQLDDEYRLYSPLVKPDQNIQFWLEQFPQAWAETAGMGLAKQVPPQVIQLKASATPVSVRQYPLSKEAQEGIRPHVQRLIQQGILVPVQSPWNTPLLPVRKPGTNDYRPVQDLREVNKRVQDIHPTVPNPYNLLCALPPQRSWYTVLDLKDAFFCLRLHPTSQPLFAFEWRDPGTGRTGQLTWTRLPQGFKNSPTIFDEALHRDLANFRIQHPQVTLLQYVDDLLLAGATKQDCLEGTKALLLELSDLGYRASAKKAQICRREVTYLGYSLRDGQRWLTEARKKTVVQIPAPTTAKQVREFLGTAGFCRLWIPGFATLAAPLYPLTKEKGEFSWAPEHQKAFDAIKKALLSAPALALPDVTKPFTLYVDERKGVARGVLTQTLGPWRRPVAYLSKKLDPVASGWPVCLKAIAAVAILVKDADKLTLGQNITVIAPHALENIVRQPPDRWMTNARMTHYQSLLLTERVTFAPPAALNPATLLPEETDEPVTHDCHQLLIEETGVRKDLTDIPLTGEVLTWFTDGSSYVVEGKRMAGAAVVDGTRTIWASSLPEGTSAQKAELMALTQALRLAEGKSINIYTDSRYAFATAHVHGAIYKQRGLLTSAGREIKNKEEILSLLEALHLPKRLAIIHCPGHQKAKDPISRGNQMADRVAKQAAQGVNLLAGKRTADGSEFEKRTADGSEFESPKKKAKVE

SEQ ID NO: 291 - protein, 2083 aa, synthetic construct
MPAAKRVKLDGGDKKYSIGLDIGTNSVGWAVITDEYKVPSKKFKVLGNTDRHSIKKNLIGALLFDSGETAEATRLKRTARRRYTRRKNRICYLQEIFSNEMAKVDDSFFHRLEESFLVEEDKKHERHPIFGNIVDEVAYHEKYPTIYHLRKKLVDSTDKADLRLIYLALAHMIKFRGHFLIEGDLNPDNSDVDKLFIQLVQTYNQLFEENPINASGVDAKAILSARLSKSRRLENLIAQLPGEKKNGLFGNLIALSLGLTPNFKSNFDLAEDAKLQLSKDTYDDDLDNLLAQIGDQYADLFLAAKNLSDAILLSDILRVNTEITKAPLSASMIKRYDEHHQDLTLLKALVRQQLPEKYKEIFFDQSKNGYAGYIDGGASQEEFYKFIKPILEKMDGTEELLVKLNREDLLRKQRTFDNGSIPHQIHLGELHAILRRQEDFYPFLKDNREKIEKILTFRIPYYVGPLARGNSRFAWMTRKSEETITPWNFEEVVDKGASAQSFIERMTNFDKNLPNEKVLPKHSLLYEYFTVYNELTKVKYVTEGMRKPAFLSGEQKKAIVDLLFKTNRKVTVKQLKEDYFKKIECFDSVEISGVEDRFNASLGTYHDLLKIIKDKDFLDNEENEDILEDIVLTLTLFEDREMIEERLKTYAHLFDDKVMKQLKRRRYTGWGRLSRKLINGIRDKQSGKTILDFLKSDGFANRNFMQLIHDDSLTFKEDIQKAQVSGQGDSLHEHIANLAGSPAIKKGILQTVKVVDELVKVMGRHKPENIVIEMARENQTTQKGQKNSRERMKRIEEGIKELGSQILKEHPVENTQLQNEKLYLYYLQNGRDMYVDQELDINRLSDYDVDHIVPQSFLKDDSIDNKVLTRSDKARGKSDNVPSEEVVKKMKNYWRQLLNAKLITQRKFDNLTKAERGGLSELDKAGFIKRQLVETRQITKHVAQILDSRMNTKYDENDKLIREVKVITLKSKLVSDFRKDFQFYKVREINNYHHAHDAYLNAVVGTALIKKYPKLESEFVYGDYKVYDVRKMIAKSEQEIGKATAKYFFYSNIMNFFKTEITLANGEIRKRPLIETNGETGEIVWDKGRDFATVRKVLSMPQVNIVKKTEVQTGGFSKESILPKRNSDKLIARKKDWDPKKYGGFDSPTVAYSVLVVAKVEKGKSKKLKSVKELLGITIMERSSFEKNPIDFLEAKGYKEVKKDLIIKLPKYSLFELENGRKRMLASAGELQKGNELALPSKYVNFLYLASHYEKLKGSPEDNEQKQLFVEQHKHYLDEIIEQISEFSKRVILADANLDKVLSAYNKHRDKPIREQAENIIHLFTLTNLGAPAAFKYFDTTIDRKRYTSTKEVLDATLIHQSITGLYETRIDLSQLGGDGGGGGGGGTLQLDDEYRLYSPLVKPDQNIQFWLEQFPQAWAETAGMGLAKQVPPQVIQLKASATPVSVRQYPLSKEAQEGIRPHVQRLIQQGILVPVQSPWNTPLLPVRKPGTNDYRPVQDLREVNKRVQDIHPTVPNPYNLLCALPPQRSWYTVLDLKDAFFCLRLHPTSQPLFAFEWRDPGTGRTGQLTWTRLPQGFKNSPTIFDEALHRDLANFRIQHPQVTLLQYVDDLLLAGATKQDCLEGTKALLLELSDLGYRASAKKAQICRREVTYLGYSLRDGQRWLTEARKKTVVQIPAPTTAKQVREFLGTAGFCRLWIPGFATLAAPLYPLTKEKGEFSWAPEHQKAFDAIKKALLSAPALALPDVTKPFTLYVDERKGVARGVLTQTLGPWRRPVAYLSKKLDPVASGWPVCLKAIAAVAILVKDADKLTLGQNITVIAPHALENIVRQPPDRWMTNARMTHYQSLLLTERVTFAPPAALNPATLLPEETDEPVTHDCHQLLIEETGVRKDLTDIPLTGEVLTWFTDGSSYVVEGKRMAGAAVVDGTRTIWASSLPEGTSAQKAELMALTQALRLAEGKSINIYTDSRYAFATAHVHGAIYKQRGLLTSAGREIKNKEEILSLLEALHLPKRLAIIHCPGHQKAKDPISRGNQMADRVAKQAAQGVNLLAGKRTADGSEFEKRTADGSEFESPKKKAKVE

SEQ ID NO: 292 - protein, 2097 aa, synthetic construct
MPAAKRVKLDGGDKKYSIGLDIGTNSVGWAVITDEYKVPSKKFKVLGNTDRHSIKKNLIGALLFDSGETAEATRLKRTARRRYTRRKNRICYLQEIFSNEMAKVDDSFFHRLEESFLVEEDKKHERHPIFGNIVDEVAYHEKYPTIYHLRKKLVDSTDKADLRLIYLALAHMIKFRGHFLIEGDLNPDNSDVDKLFIQLVQTYNQLFEENPINASGVDAKAILSARLSKSRRLENLIAQLPGEKKNGLFGNLIALSLGLTPNFKSNFDLAEDAKLQLSKDTYDDDLDNLLAQIGDQYADLFLAAKNLSDAILLSDILRVNTEITKAPLSASMIKRYDEHHQDLTLLKALVRQQLPEKYKEIFFDQSKNGYAGYIDGGASQEEFYKFIKPILEKMDGTEELLVKLNREDLLRKQRTFDNGSIPHQIHLGELHAILRRQEDFYPFLKDNREKIEKILTFRIPYYVGPLARGNSRFAWMTRKSEETITPWNFEEVVDKGASAQSFIERMTNFDKNLPNEKVLPKHSLLYEYFTVYNELTKVKYVTEGMRKPAFLSGEQKKAIVDLLFKTNRKVTVKQLKEDYFKKIECFDSVEISGVEDRFNASLGTYHDLLKIIKDKDFLDNEENEDILEDIVLTLTLFEDREMIEERLKTYAHLFDDKVMKQLKRRRYTGWGRLSRKLINGIRDKQSGKTILDFLKSDGFANRNFMQLIHDDSLTFKEDIQKAQVSGQGDSLHEHIANLAGSPAIKKGILQTVKVVDELVKVMGRHKPENIVIEMARENQTTQKGQKNSRERMKRIEEGIKELGSQILKEHPVENTQLQNEKLYLYYLQNGRDMYVDQELDINRLSDYDVDHIVPQSFLKDDSIDNKVLTRSDKARGKSDNVPSEEVVKKMKNYWRQLLNAKLITQRKFDNLTKAERGGLSELDKAGFIKRQLVETRQITKHVAQILDSRMNTKYDENDKLIREVKVITLKSKLVSDFRKDFQFYKVREINNYHHAHDAYLNAVVGTALIKKYPKLESEFVYGDYKVYDVRKMIAKSEQEIGKATAKYFFYSNIMNFFKTEITLANGEIRKRPLIETNGETGEIVWDKGRDFATVRKVLSMPQVNIVKKTEVQTGGFSKESILPKRNSDKLIARKKDWDPKKYGGFDSPTVAYSVLVVAKVEKGKSKKLKSVKELLGITIMERSSFEKNPIDFLEAKGYKEVKKDLIIKLPKYSLFELENGRKRMLASAGELQKGNELALPSKYVNFLYLASHYEKLKGSPEDNEQKQLFVEQHKHYLDEIIEQISEFSKRVILADANLDKVLSAYNKHRDKPIREQAENIIHLFTLTNLGAPAAFKYFDTTIDRKRYTSTKEVLDATLIHQSITGLYETRIDLSQLGGDGGGGSGGSGGSGGSGGSGGSGGTLQLDDEYRLYSPLVKPDQNIQFWLEQFPQAWAETAGMGLAKQVPPQVIQLKASATPVSVRQYPLSKEAQEGIRPHVQRLIQQGILVPVQSPWNTPLLPVRKPGTNDYRPVQDLREVNKRVQDIHPTVPNPYNLLCALPPQRSWYTVLDLKDAFFCLRLHPTSQPLFAFEWRDPGTGRTGQLTWTRLPQGFKNSPTIFDEALHRDLANFRIQHPQVTLLQYVDDLLLAGATKQDCLEGTKALLLELSDLGYRASAKKAQICRREVTYLGYSLRDGQRWLTEARKKTVVQIPAPTTAKQVREFLGTAGFCRLWIPGFATLAAPLYPLTKEKGEFSWAPEHQKAFDAIKKALLSAPALALPDVTKPFTLYVDERKGVARGVLTQTLGPWRRPVAYLSKKLDPVASGWPVCLKAIAAVAILVKDADKLTLGQNITVIAPHALENIVRQPPDRWMTNARMTHYQSLLLTERVTFAPPAALNPATLLPEETDEPVTHDCHQLLIEETGVRKDLTDIPLTGEVLTWFTDGSSYVVEGKRMAGAAVVDGTRTIWASSLPEGTSAQKAELMALTQALRLAEGKSINIYTDSRYAFATAHVHGAIYKQRGLLTSAGREIKNKEEILSLLEALHLPKRLAIIHCPGHQKAKDPISRGNQMADRVAKQAAQGVNLLAGKRTADGSEFEKRTADGSEFESPKKKAKVE

SEQ ID NO: 293 - protein, 2087 aa, synthetic construct
MPAAKRVKLDGGDKKYSIGLDIGTNSVGWAVITDEYKVPSKKFKVLGNTDRHSIKKNLIGALLFDSGETAEATRLKRTARRRYTRRKNRICYLQEIFSNEMAKVDDSFFHRLEESFLVEEDKKHERHPIFGNIVDEVAYHEKYPTIYHLRKKLVDSTDKADLRLIYLALAHMIKFRGHFLIEGDLNPDNSDVDKLFIQLVQTYNQLFEENPINASGVDAKAILSARLSKSRRLENLIAQLPGEKKNGLFGNLIALSLGLTPNFKSNFDLAEDAKLQLSKDTYDDDLDNLLAQIGDQYADLFLAAKNLSDAILLSDILRVNTEITKAPLSASMIKRYDEHHQDLTLLKALVRQQLPEKYKEIFFDQSKNGYAGYIDGGASQEEFYKFIKPILEKMDGTEELLVKLNREDLLRKQRTFDNGSIPHQIHLGELHAILRRQEDFYPFLKDNREKIEKILTFRIPYYVGPLARGNSRFAWMTRKSEETITPWNFEEVVDKGASAQSFIERMTNFDKNLPNEKVLPKHSLLYEYFTVYNELTKVKYVTEGMRKPAFLSGEQKKAIVDLLFKTNRKVTVKQLKEDYFKKIECFDSVEISGVEDRFNASLGTYHDLLKIIKDKDFLDNEENEDILEDIVLTLTLFEDREMIEERLKTYAHLFDDKVMKQLKRRRYTGWGRLSRKLINGIRDKQSGKTILDFLKSDGFANRNFMQLIHDDSLTFKEDIQKAQVSGQGDSLHEHIANLAGSPAIKKGILQTVKVVDELVKVMGRHKPENIVIEMARENQTTQKGQKNSRERMKRIEEGIKELGSQILKEHPVENTQLQNEKLYLYYLQNGRDMYVDQELDINRLSDYDVDHIVPQSFLKDDSIDNKVLTRSDKARGKSDNVPSEEVVKKMKNYWRQLLNAKLITQRKFDNLTKAERGGLSELDKAGFIKRQLVETRQITKHVAQILDSRMNTKYDENDKLIREVKVITLKSKLVSDFRKDFQFYKVREINNYHHAHDAYLNAVVGTALIKKYPKLESEFVYGDYKVYDVRKMIAKSEQEIGKATAKYFFYSNIMNFFKTEITLANGEIRKRPLIETNGETGEIVWDKGRDFATVRKVLSMPQVNIVKKTEVQTGGFSKESILPKRNSDKLIARKKDWDPKKYGGFDSPTVAYSVLVVAKVEKGKSKKLKSVKELLGITIMERSSFEKNPIDFLEAKGYKEVKKDLIIKLPKYSLFELENGRKRMLASAGELQKGNELALPSKYVNFLYLASHYEKLKGSPEDNEQKQLFVEQHKHYLDEIIEQISEFSKRVILADANLDKVLSAYNKHRDKPIREQAENIIHLFTLTNLGAPAAFKYFDTTIDRKRYTSTKEVLDATLIHQSITGLYETRIDLSQLGGDGGGSSEAAAKGGTLQLDDEYRLYSPLVKPDQNIQFWLEQFPQAWAETAGMGLAKQVPPQVIQLKASATPVSVRQYPLSKEAQEGIRPHVQRLIQQGILVPVQSPWNTPLLPVRKPGTNDYRPVQDLREVNKRVQDIHPTVPNPYNLLCALPPQRSWYTVLDLKDAFFCLRLHPTSQPLFAFEWRDPGTGRTGQLTWTRLPQGFKNSPTIFDEALHRDLANFRIQHPQVTLLQYVDDLLLAGATKQDCLEGTKALLLELSDLGYRASAKKAQICRREVTYLGYSLRDGQRWLTEARKKTVVQIPAPTTAKQVREFLGTAGFCRLWIPGFATLAAPLYPLTKEKGEFSWAPEHQKAFDAIKKALLSAPALALPDVTKPFTLYVDERKGVARGVLTQTLGPWRRPVAYLSKKLDPVASGWPVCLKAIAAVAILVKDADKLTLGQNITVIAPHALENIVRQPPDRWMTNARMTHYQSLLLTERVTFAPPAALNPATLLPEETDEPVTHDCHQLLIEETGVRKDLTDIPLTGEVLTWFTDGSSYVVEGKRMAGAAVVDGTRTIWASSLPEGTSAQKAELMALTQALRLAEGKSINIYTDSRYAFATAHVHGAIYKQRGLLTSAGREIKNKEEILSLLEALHLPKRLAIIHCPGHQKAKDPISRGNQMADRVAKQAAQGVNLLAGKRTADGSEFEKRTADGSEFESPKKKAKVE

SEQ ID NO: 294 - protein, 2088 aa, synthetic construct
MPAAKRVKLDGGDKKYSIGLDIGTNSVGWAVITDEYKVPSKKFKVLGNTDRHSIKKNLIGALLFDSGETAEATRLKRTARRRYTRRKNRICYLQEIFSNEMAKVDDSFFHRLEESFLVEEDKKHERHPIFGNIVDEVAYHEKYPTIYHLRKKLVDSTDKADLRLIYLALAHMIKFRGHFLIEGDLNPDNSDVDKLFIQLVQTYNQLFEENPINASGVDAKAILSARLSKSRRLENLIAQLPGEKKNGLFGNLIALSLGLTPNFKSNFDLAEDAKLQLSKDTYDDDLDNLLAQIGDQYADLFLAAKNLSDAILLSDILRVNTEITKAPLSASMIKRYDEHHQDLTLLKALVRQQLPEKYKEIFFDQSKNGYAGYIDGGASQEEFYKFIKPILEKMDGTEELLVKLNREDLLRKQRTFDNGSIPHQIHLGELHAILRRQEDFYPFLKDNREKIEKILTFRIPYYVGPLARGNSRFAWMTRKSEETITPWNFEEVVDKGASAQSFIERMTNFDKNLPNEKVLPKHSLLYEYFTVYNELTKVKYVTEGMRKPAFLSGEQKKAIVDLLFKTNRKVTVKQLKEDYFKKIECFDSVEISGVEDRFNASLGTYHDLLKIIKDKDFLDNEENEDILEDIVLTLTLFEDREMIEERLKTYAHLFDDKVMKQLKRRRYTGWGRLSRKLINGIRDKQSGKTILDFLKSDGFANRNFMQLIHDDSLTFKEDIQKAQVSGQGDSLHEHIANLAGSPAIKKGILQTVKVVDELVKVMGRHKPENIVIEMARENQTTQKGQKNSRERMKRIEEGIKELGSQILKEHPVENTQLQNEKLYLYYLQNGRDMYVDQELDINRLSDYDVDHIVPQSFLKDDSIDNKVLTRSDKARGKSDNVPSEEVVKKMKNYWRQLLNAKLITQRKFDNLTKAERGGLSELDKAGFIKRQLVETRQITKHVAQILDSRMNTKYDENDKLIREVKVITLKSKLVSDFRKDFQFYKVREINNYHHAHDAYLNAVVGTALIKKYPKLESEFVYGDYKVYDVRKMIAKSEQEIGKATAKYFFYSNIMNFFKTEITLANGEIRKRPLIETNGETGEIVWDKGRDFATVRKVLSMPQVNIVKKTEVQTGGFSKESILPKRNSDKLIARKKDWDPKKYGGFDSPTVAYSVLVVAKVEKGKSKKLKSVKELLGITIMERSSFEKNPIDFLEAKGYKEVKKDLIIKLPKYSLFELENGRKRMLASAGELQKGNELALPSKYVNFLYLASHYEKLKGSPEDNEQKQLFVEQHKHYLDEIIEQISEFSKRVILADANLDKVLSAYNKHRDKPIREQAENIIHLFTLTNLGAPAAFKYFDTTIDRKRYTSTKEVLDATLIHQSITGLYETRIDLSQLGGDGGGGSGGSGGSGGTLQLDDEYRLYSPLVKPDQNIQFWLEQFPQAWAETAGMGLAKQVPPQVIQLKASATPVSVRQYPLSKEAQEGIRPHVQRLIQQGILVPVQSPWNTPLLPVRKPGTNDYRPVQDLREVNKRVQDIHPTVPNPYNLLCALPPQRSWYTVLDLKDAFFCLRLHPTSQPLFAFEWRDPGTGRTGQLTWTRLPQGFKNSPTIFDEALHRDLANFRIQHPQVTLLQYVDDLLLAGATKQDCLEGTKALLLELSDLGYRASAKKAQICRREVTYLGYSLRDGQRWLTEARKKTVVQIPAPTTAKQVREFLGTAGFCRLWIPGFATLAAPLYPLTKEKGEFSWAPEHQKAFDAIKKALLSAPALALPDVTKPFTLYVDERKGVARGVLTQTLGPWRRPVAYLSKKLDPVASGWPVCLKAIAAVAILVKDADKLTLGQNITVIAPHALENIVRQPPDRWMTNARMTHYQSLLLTERVTFAPPAALNPATLLPEETDEPVTHDCHQLLIEETGVRKDLTDIPLTGEVLTWFTDGSSYVVEGKRMAGAAVVDGTRTIWASSLPEGTSAQKAELMALTQALRLAEGKSINIYTDSRYAFATAHVHGAIYKQRGLLTSAGREIKNKEEILSLLEALHLPKRLAIIHCPGHQKAKDPISRGNQMADRVAKQAAQGVNLLAGKRTADGSEFEKRTADGSEFESPKKKAKVE

SEQ ID NO: 295 - protein, 2088 aa, synthetic construct
MPAAKRVKLDGGDKKYSIGLDIGTNSVGWAVITDEYKVPSKKFKVLGNTDRHSIKKNLIGALLFDSGETAEATRLKRTARRRYTRRKNRICYLQEIFSNEMAKVDDSFFHRLEESFLVEEDKKHERHPIFGNIVDEVAYHEKYPTIYHLRKKLVDSTDKADLRLIYLALAHMIKFRGHFLIEGDLNPDNSDVDKLFIQLVQTYNQLFEENPINASGVDAKAILSARLSKSRRLENLIAQLPGEKKNGLFGNLIALSLGLTPNFKSNFDLAEDAKLQLSKDTYDDDLDNLLAQIGDQYADLFLAAKNLSDAILLSDILRVNTEITKAPLSASMIKRYDEHHQDLTLLKALVRQQLPEKYKEIFFDQSKNGYAGYIDGGASQEEFYKFIKPILEKMDGTEELLVKLNREDLLRKQRTFDNGSIPHQIHLGELHAILRRQEDFYPFLKDNREKIEKILTFRIPYYVGPLARGNSRFAWMTRKSEETITPWNFEEVVDKGASAQSFIERMTNFDKNLPNEKVLPKHSLLYEYFTVYNELTKVKYVTEGMRKPAFLSGEQKKAIVDLLFKTNRKVTVKQLKEDYFKKIECFDSVEISGVEDRFNASLGTYHDLLKIIKDKDFLDNEENEDILEDIVLTLTLFEDREMIEERLKTYAHLFDDKVMKQLKRRRYTGWGRLSRKLINGIRDKQSGKTILDFLKSDGFANRNFMQLIHDDSLTFKEDIQKAQVSGQGDSLHEHIANLAGSPAIKKGILQTVKVVDELVKVMGRHKPENIVIEMARENQTTQKGQKNSRERMKRIEEGIKELGSQILKEHPVENTQLQNEKLYLYYLQNGRDMYVDQELDINRLSDYDVDHIVPQSFLKDDSIDNKVLTRSDKARGKSDNVPSEEVVKKMKNYWRQLLNAKLITQRKFDNLTKAERGGLSELDKAGFIKRQLVETRQITKHVAQILDSRMNTKYDENDKLIREVKVITLKSKLVSDFRKDFQFYKVREINNYHHAHDAYLNAVVGTALIKKYPKLESEFVYGDYKVYDVRKMIAKSEQEIGKATAKYFFYSNIMNFFKTEITLANGEIRKRPLIETNGETGEIVWDKGRDFATVRKVLSMPQVNIVKKTEVQTGGFSKESILPKRNSDKLIARKKDWDPKKYGGFDSPTVAYSVLVVAKVEKGKSKKLKSVKELLGITIMERSSFEKNPIDFLEAKGYKEVKKDLIIKLPKYSLFELENGRKRMLASAGELQKGNELALPSKYVNFLYLASHYEKLKGSPEDNEQKQLFVEQHKHYLDEIIEQISEFSKRVILADANLDKVLSAYNKHRDKPIREQAENIIHLFTLTNLGAPAAFKYFDTTIDRKRYTSTKEVLDATLIHQSITGLYETRIDLSQLGGDGGGSSPAPGGSGGTLQLDDEYRLYSPLVKPDQNIQFWLEQFPQAWAETAGMGLAKQVPPQVIQLKASATPVSVRQYPLSKEAQEGIRPHVQRLIQQGILVPVQSPWNTPLLPVRKPGTNDYRPVQDLREVNKRVQDIHPTVPNPYNLLCALPPQRSWYTVLDLKDAFFCLRLHPTSQPLFAFEWRDPGTGRTGQLTWTRLPQGFKNSPTIFDEALHRDLANFRIQHPQVTLLQYVDDLLLAGATKQDCLEGTKALLLELSDLGYRASAKKAQICRREVTYLGYSLRDGQRWLTEARKKTVVQIPAPTTAKQVREFLGTAGFCRLWIPGFATLAAPLYPLTKEKGEFSWAPEHQKAFDAIKKALLSAPALALPDVTKPFTLYVDERKGVARGVLTQTLGPWRRPVAYLSKKLDPVASGWPVCLKAIAAVAILVKDADKLTLGQNITVIAPHALENIVRQPPDRWMTNARMTHYQSLLLTERVTFAPPAALNPATLLPEETDEPVTHDCHQLLIEETGVRKDLTDIPLTGEVLTWFTDGSSYVVEGKRMAGAAVVDGTRTIWASSLPEGTSAQKAELMALTQALRLAEGKSINIYTDSRYAFATAHVHGAIYKQRGLLTSAGREIKNKEEILSLLEALHLPKRLAIIHCPGHQKAKDPISRGNQMADRVAKQAAQGVNLLAGKRTADGSEFEKRTADGSEFESPKKKAKVE

SEQ ID NO: 296 - protein, 2090 aa, synthetic construct
MPAAKRVKLDGGDKKYSIGLDIGTNSVGWAVITDEYKVPSKKFKVLGNTDRHSIKKNLIGALLFDSGETAEATRLKRTARRRYTRRKNRICYLQEIFSNEMAKVDDSFFHRLEESFLVEEDKKHERHPIFGNIVDEVAYHEKYPTIYHLRKKLVDSTDKADLRLIYLALAHMIKFRGHFLIEGDLNPDNSDVDKLFIQLVQTYNQLFEENPINASGVDAKAILSARLSKSRRLENLIAQLPGEKKNGLFGNLIALSLGLTPNFKSNFDLAEDAKLQLSKDTYDDDLDNLLAQIGDQYADLFLAAKNLSDAILLSDILRVNTEITKAPLSASMIKRYDEHHQDLTLLKALVRQQLPEKYKEIFFDQSKNGYAGYIDGGASQEEFYKFIKPILEKMDGTEELLVKLNREDLLRKQRTFDNGSIPHQIHLGELHAILRRQEDFYPFLKDNREKIEKILTFRIPYYVGPLARGNSRFAWMTRKSEETITPWNFEEVVDKGASAQSFIERMTNFDKNLPNEKVLPKHSLLYEYFTVYNELTKVKYVTEGMRKPAFLSGEQKKAIVDLLFKTNRKVTVKQLKEDYFKKIECFDSVEISGVEDRFNASLGTYHDLLKIIKDKDFLDNEENEDILEDIVLTLTLFEDREMIEERLKTYAHLFDDKVMKQLKRRRYTGWGRLSRKLINGIRDKQSGKTILDFLKSDGFANRNFMQLIHDDSLTFKEDIQKAQVSGQGDSLHEHIANLAGSPAIKKGILQTVKVVDELVKVMGRHKPENIVIEMARENQTTQKGQKNSRERMKRIEEGIKELGSQILKEHPVENTQLQNEKLYLYYLQNGRDMYVDQELDINRLSDYDVDHIVPQSFLKDDSIDNKVLTRSDKARGKSDNVPSEEVVKKMKNYWRQLLNAKLITQRKFDNLTKAERGGLSELDKAGFIKRQLVETRQITKHVAQILDSRMNTKYDENDKLIREVKVITLKSKLVSDFRKDFQFYKVREINNYHHAHDAYLNAVVGTALIKKYPKLESEFVYGDYKVYDVRKMIAKSEQEIGKATAKYFFYSNIMNFFKTEITLANGEIRKRPLIETNGETGEIVWDKGRDFATVRKVLSMPQVNIVKKTEVQTGGFSKESILPKRNSDKLIARKKDWDPKKYGGFDSPTVAYSVLVVAKVEKGKSKKLKSVKELLGITIMERSSFEKNPIDFLEAKGYKEVKKDLIIKLPKYSLFELENGRKRMLASAGELQKGNELALPSKYVNFLYLASHYEKLKGSPEDNEQKQLFVEQHKHYLDEIIEQISEFSKRVILADANLDKVLSAYNKHRDKPIREQAENIIHLFTLTNLGAPAAFKYFDTTIDRKRYTSTKEVLDATLIHQSITGLYETRIDLSQLGGDGGEAAAKGSSGGGGGTLQLDDEYRLYSPLVKPDQNIQFWLEQFPQAWAETAGMGLAKQVPPQVIQLKASATPVSVRQYPLSKEAQEGIRPHVQRLIQQGILVPVQSPWNTPLLPVRKPGTNDYRPVQDLREVNKRVQDIHPTVPNPYNLLCALPPQRSWYTVLDLKDAFFCLRLHPTSQPLFAFEWRDPGTGRTGQLTWTRLPQGFKNSPTIFDEALHRDLANFRIQHPQVTLLQYVDDLLLAGATKQDCLEGTKALLLELSDLGYRASAKKAQICRREVTYLGYSLRDGQRWLTEARKKTVVQIPAPTTAKQVREFLGTAGFCRLWIPGFATLAAPLYPLTKEKGEFSWAPEHQKAFDAIKKALLSAPALALPDVTKPFTLYVDERKGVARGVLTQTLGPWRRPVAYLSKKLDPVASGWPVCLKAIAAVAILVKDADKLTLGQNITVIAPHALENIVRQPPDRWMTNARMTHYQSLLLTERVTFAPPAALNPATLLPEETDEPVTHDCHQLLIEETGVRKDLTDIPLTGEVLTWFTDGSSYVVEGKRMAGAAVVDGTRTIWASSLPEGTSAQKAELMALTQALRLAEGKSINIYTDSRYAFATAHVHGAIYKQRGLLTSAGREIKNKEEILSLLEALHLPKRLAIIHCPGHQKAKDPISRGNQMADRVAKQAAQGVNLLAGKRTADGSEFEKRTADGSEFESPKKKAKVE

SEQ ID NO: 297 - protein, 2087 aa, synthetic construct
MPAAKRVKLDGGDKKYSIGLDIGTNSVGWAVITDEYKVPSKKFKVLGNTDRHSIKKNLIGALLFDSGETAEATRLKRTARRRYTRRKNRICYLQEIFSNEMAKVDDSFFHRLEESFLVEEDKKHERHPIFGNIVDEVAYHEKYPTIYHLRKKLVDSTDKADLRLIYLALAHMIKFRGHFLIEGDLNPDNSDVDKLFIQLVQTYNQLFEENPINASGVDAKAILSARLSKSRRLENLIAQLPGEKKNGLFGNLIALSLGLTPNFKSNFDLAEDAKLQLSKDTYDDDLDNLLAQIGDQYADLFLAAKNLSDAILLSDILRVNTEITKAPLSASMIKRYDEHHQDLTLLKALVRQQLPEKYKEIFFDQSKNGYAGYIDGGASQEEFYKFIKPILEKMDGTEELLVKLNREDLLRKQRTFDNGSIPHQIHLGELHAILRRQEDFYPFLKDNREKIEKILTFRIPYYVGPLARGNSRFAWMTRKSEETITPWNFEEVVDKGASAQSFIERMTNFDKNLPNEKVLPKHSLLYEYFTVYNELTKVKYVTEGMRKPAFLSGEQKKAIVDLLFKTNRKVTVKQLKEDYFKKIECFDSVEISGVEDRFNASLGTYHDLLKIIKDKDFLDNEENEDILEDIVLTLTLFEDREMIEERLKTYAHLFDDKVMKQLKRRRYTGWGRLSRKLINGIRDKQSGKTILDFLKSDGFANRNFMQLIHDDSLTFKEDIQKAQVSGQGDSLHEHIANLAGSPAIKKGILQTVKVVDELVKVMGRHKPENIVIEMARENQTTQKGQKNSRERMKRIEEGIKELGSQILKEHPVENTQLQNEKLYLYYLQNGRDMYVDQELDINRLSDYDVDHIVPQSFLKDDSIDNKVLTRSDKARGKSDNVPSEEVVKKMKNYWRQLLNAKLITQRKFDNLTKAERGGLSELDKAGFIKRQLVETRQITKHVAQILDSRMNTKYDENDKLIREVKVITLKSKLVSDFRKDFQFYKVREINNYHHAHDAYLNAVVGTALIKKYPKLESEFVYGDYKVYDVRKMIAKSEQEIGKATAKYFFYSNIMNFFKTEITLANGEIRKRPLIETNGETGEIVWDKGRDFATVRKVLSMPQVNIVKKTEVQTGGFSKESILPKRNSDKLIARKKDWDPKKYGGFDSPTVAYSVLVVAKVEKGKSKKLKSVKELLGITIMERSSFEKNPIDFLEAKGYKEVKKDLIIKLPKYSLFELENGRKRMLASAGELQKGNELALPSKYVNFLYLASHYEKLKGSPEDNEQKQLFVEQHKHYLDEIIEQISEFSKRVILADANLDKVLSAYNKHRDKPIREQAENIIHLFTLTNLGAPAAFKYFDTTIDRKRYTSTKEVLDATLIHQSITGLYETRIDLSQLGGDGGEAAAKPAPGGTLQLDDEYRLYSPLVKPDQNIQFWLEQFPQAWAETAGMGLAKQVPPQVIQLKASATPVSVRQYPLSKEAQEGIRPHVQRLIQQGILVPVQSPWNTPLLPVRKPGTNDYRPVQDLREVNKRVQDIHPTVPNPYNLLCALPPQRSWYTVLDLKDAFFCLRLHPTSQPLFAFEWRDPGTGRTGQLTWTRLPQGFKNSPTIFDEALHRDLANFRIQHPQVTLLQYVDDLLLAGATKQDCLEGTKALLLELSDLGYRASAKKAQICRREVTYLGYSLRDGQRWLTEARKKTVVQIPAPTTAKQVREFLGTAGFCRLWIPGFATLAAPLYPLTKEKGEFSWAPEHQKAFDAIKKALLSAPALALPDVTKPFTLYVDERKGVARGVLTQTLGPWRRPVAYLSKKLDPVASGWPVCLKAIAAVAILVKDADKLTLGQNITVIAPHALENIVRQPPDRWMTNARMTHYQSLLLTERVTFAPPAALNPATLLPEETDEPVTHDCHQLLIEETGVRKDLTDIPLTGEVLTWFTDGSSYVVEGKRMAGAAVVDGTRTIWASSLPEGTSAQKAELMALTQALRLAEGKSINIYTDSRYAFATAHVHGAIYKQRGLLTSAGREIKNKEEILSLLEALHLPKRLAIIHCPGHQKAKDPISRGNQMADRVAKQAAQGVNLLAGKRTADGSEFEKRTADGSEFESPKKKAKVE

SEQ ID NO: 298 - protein, 2094 aa, synthetic construct
MPAAKRVKLDGGDKKYSIGLDIGTNSVGWAVITDEYKVPSKKFKVLGNTDRHSIKKNLIGALLFDSGETAEATRLKRTARRRYTRRKNRICYLQEIFSNEMAKVDDSFFHRLEESFLVEEDKKHERHPIFGNIVDEVAYHEKYPTIYHLRKKLVDSTDKADLRLIYLALAHMIKFRGHFLIEGDLNPDNSDVDKLFIQLVQTYNQLFEENPINASGVDAKAILSARLSKSRRLENLIAQLPGEKKNGLFGNLIALSLGLTPNFKSNFDLAEDAKLQLSKDTYDDDLDNLLAQIGDQYADLFLAAKNLSDAILLSDILRVNTEITKAPLSASMIKRYDEHHQDLTLLKALVRQQLPEKYKEIFFDQSKNGYAGYIDGGASQEEFYKFIKPILEKMDGTEELLVKLNREDLLRKQRTFDNGSIPHQIHLGELHAILRRQEDFYPFLKDNREKIEKILTFRIPYYVGPLARGNSRFAWMTRKSEETITPWNFEEVVDKGASAQSFIERMTNFDKNLPNEKVLPKHSLLYEYFTVYNELTKVKYVTEGMRKPAFLSGEQKKAIVDLLFKTNRKVTVKQLKEDYFKKIECFDSVEISGVEDRFNASLGTYHDLLKIIKDKDFLDNEENEDILEDIVLTLTLFEDREMIEERLKTYAHLFDDKVMKQLKRRRYTGWGRLSRKLINGIRDKQSGKTILDFLKSDGFANRNFMQLIHDDSLTFKEDIQKAQVSGQGDSLHEHIANLAGSPAIKKGILQTVKVVDELVKVMGRHKPENIVIEMARENQTTQKGQKNSRERMKRIEEGIKELGSQILKEHPVENTQLQNEKLYLYYLQNGRDMYVDQELDINRLSDYDVDHIVPQSFLKDDSIDNKVLTRSDKARGKSDNVPSEEVVKKMKNYWRQLLNAKLITQRKFDNLTKAERGGLSELDKAGFIKRQLVETRQITKHVAQILDSRMNTKYDENDKLIREVKVITLKSKLVSDFRKDFQFYKVREINNYHHAHDAYLNAVVGTALIKKYPKLESEFVYGDYKVYDVRKMIAKSEQEIGKATAKYFFYSNIMNFFKTEITLANGEIRKRPLIETNGETGEIVWDKGRDFATVRKVLSMPQVNIVKKTEVQTGGFSKESILPKRNSDKLIARKKDWDPKKYGGFDSPTVAYSVLVVAKVEKGKSKKLKSVKELLGITIMERSSFEKNPIDFLEAKGYKEVKKDLIIKLPKYSLFELENGRKRMLASAGELQKGNELALPSKYVNFLYLASHYEKLKGSPEDNEQKQLFVEQHKHYLDEIIEQISEFSKRVILADANLDKVLSAYNKHRDKPIREQAENIIHLFTLTNLGAPAAFKYFDTTIDRKRYTSTKEVLDATLIHQSITGLYETRIDLSQLGGDGGEAAAKEAAAKEAAAKGGTLQLDDEYRLYSPLVKPDQNIQFWLEQFPQAWAETAGMGLAKQVPPQVIQLKASATPVSVRQYPLSKEAQEGIRPHVQRLIQQGILVPVQSPWNTPLLPVRKPGTNDYRPVQDLREVNKRVQDIHPTVPNPYNLLCALPPQRSWYTVLDLKDAFFCLRLHPTSQPLFAFEWRDPGTGRTGQLTWTRLPQGFKNSPTIFNEALHRDLANFRIQHPQVTLLQYVDDLLLAGATKQDCLEGTKALLLELSDLGYRASAKKAQICRREVTYLGYSLRDGQRWLTEARKKTVVQIPAPTTAKQVREFLGTAGFCRLWIPGFATLAAPLYPLTKPKGEFSWAPEHQKAFDAIKKALLSAPALALPDVTKPFTLYVDERKGVARGVLTQTLGPWRRPVAYLSKKLDPVASGWPVCLKAIAAVAILVKDADKLTLGQNITVIAPHALENIVRQPPDRWMTNARMTHYQSLLLTERVTFAPPAALNPATLLPEETDEPVTHDCHQLLIEETGVRKDLTDIPLTGEVLTWFTDGSSYVVEGKRMAGAAVVDGTRTIWASSLPEGTSAQKAELMALTQALRLAEGKSINIYTDSRYAFATAHVHGAIYKQRGWLTSAGREIKNKEEILSLLEALHLPKRLAIIHCPGHQKAKDPISRGNQMADRVAKQAAQGVNLLAGKRTADGSEFEKRTADGSEFESPKKKAKVE

SEQ ID NO: 299 - protein, 2090 aa, synthetic construct
MPAAKRVKLDGGDKKYSIGLDIGTNSVGWAVITDEYKVPSKKFKVLGNTDRHSIKKNLIGALLFDSGETAEATRLKRTARRRYTRRKNRICYLQEIFSNEMAKVDDSFFHRLEESFLVEEDKKHERHPIFGNIVDEVAYHEKYPTIYHLRKKLVDSTDKADLRLIYLALAHMIKFRGHFLIEGDLNPDNSDVDKLFIQLVQTYNQLFEENPINASGVDAKAILSARLSKSRRLENLIAQLPGEKKNGLFGNLIALSLGLTPNFKSNFDLAEDAKLQLSKDTYDDDLDNLLAQIGDQYADLFLAAKNLSDAILLSDILRVNTEITKAPLSASMIKRYDEHHQDLTLLKALVRQQLPEKYKEIFFDQSKNGYAGYIDGGASQEEFYKFIKPILEKMDGTEELLVKLNREDLLRKQRTFDNGSIPHQIHLGELHAILRRQEDFYPFLKDNREKIEKILTFRIPYYVGPLARGNSRFAWMTRKSEETITPWNFEEVVDKGASAQSFIERMTNFDKNLPNEKVLPKHSLLYEYFTVYNELTKVKYVTEGMRKPAFLSGEQKKAIVDLLFKTNRKVTVKQLKEDYFKKIECFDSVEISGVEDRFNASLGTYHDLLKIIKDKDFLDNEENEDILEDIVLTLTLFEDREMIEERLKTYAHLFDDKVMKQLKRRRYTGWGRLSRKLINGIRDKQSGKTILDFLKSDGFANRNFMQLIHDDSLTFKEDIQKAQVSGQGDSLHEHIANLAGSPAIKKGILQTVKVVDELVKVMGRHKPENIVIEMARENQTTQKGQKNSRERMKRIEEGIKELGSQILKEHPVENTQLQNEKLYLYYLQNGRDMYVDQELDINRLSDYDVDHIVPQSFLKDDSIDNKVLTRSDKARGKSDNVPSEEVVKKMKNYWRQLLNAKLITQRKFDNLTKAERGGLSELDKAGFIKRQLVETRQITKHVAQILDSRMNTKYDENDKLIREVKVITLKSKLVSDFRKDFQFYKVREINNYHHAHDAYLNAVVGTALIKKYPKLESEFVYGDYKVYDVRKMIAKSEQEIGKATAKYFFYSNIMNFFKTEITLANGEIRKRPLIETNGETGEIVWDKGRDFATVRKVLSMPQVNIVKKTEVQTGGFSKESILPKRNSDKLIARKKDWDPKKYGGFDSPTVAYSVLVVAKVEKGKSKKLKSVKELLGITIMERSSFEKNPIDFLEAKGYKEVKKDLIIKLPKYSLFELENGRKRMLASAGELQKGNELALPSKYVNFLYLASHYEKLKGSPEDNEQKQLFVEQHKHYLDEIIEQISEFSKRVILADANLDKVLSAYNKHRDKPIREQAENIIHLFTLTNLGAPAAFKYFDTTIDRKRYTSTKEVLDATLIHQSITGLYETRIDLSQLGGDGGEAAAKGGSGGGGGTLQLDDEYRLYSPLVKPDQNIQFWLEQFPQAWAETAGMGLAKQVPPQVIQLKASATPVSVRQYPLSKEAQEGIRPHVQRLIQQGILVPVQSPWNTPLLPVRKPGTNDYRPVQDLREVNKRVQDIHPTVPNPYNLLCALPPQRSWYTVLDLKDAFFCLRLHPTSQPLFAFEWRDPGTGRTGQLTWTRLPQGFKNSPTIFNEALHRDLANFRIQHPQVTLLQYVDDLLLAGATKQDCLEGTKALLLELSDLGYRASAKKAQICRREVTYLGYSLRDGQRWLTEARKKTVVQIPAPTTAKQVREFLGTAGFCRLWIPGFATLAAPLYPLTKPKGEFSWAPEHQKAFDAIKKALLSAPALALPDVTKPFTLYVDERKGVARGVLTQTLGPWRRPVAYLSKKLDPVASGWPVCLKAIAAVAILVKDADKLTLGQNITVIAPHALENIVRQPPDRWMTNARMTHYQSLLLTERVTFAPPAALNPATLLPEETDEPVTHDCHQLLIEETGVRKDLTDIPLTGEVLTWFTDGSSYVVEGKRMAGAAVVDGTRTIWASSLPEGTSAQKAELMALTQALRLAEGKSINIYTDSRYAFATAHVHGAIYKQRGWLTSAGREIKNKEEILSLLEALHLPKRLAIIHCPGHQKAKDPISRGNQMADRVAKQAAQGVNLLAGKRTADGSEFEKRTADGSEFESPKKKAKVE

SEQ ID NO: 300 - protein, 2125 aa, synthetic construct; identical to SEQ ID NO: 156

SEQ ID NO: 301 - protein, 2090 aa, synthetic construct
MPAAKRVKLDGGDKKYSIGLDIGTNSVGWAVITDEYKVPSKKFKVLGNTDRHSIKKNLIGALLFDSGETAEATRLKRTARRRYTRRKNRICYLQEIFSNEMAKVDDSFFHRLEESFLVEEDKKHERHPIFGNIVDEVAYHEKYPTIYHLRKKLVDSTDKADLRLIYLALAHMIKFRGHFLIEGDLNPDNSDVDKLFIQLVQTYNQLFEENPINASGVDAKAILSARLSKSRRLENLIAQLPGEKKNGLFGNLIALSLGLTPNFKSNFDLAEDAKLQLSKDTYDDDLDNLLAQIGDQYADLFLAAKNLSDAILLSDILRVNTEITKAPLSASMIKRYDEHHQDLTLLKALVRQQLPEKYKEIFFDQSKNGYAGYIDGGASQEEFYKFIKPILEKMDGTEELLVKLNREDLLRKQRTFDNGSIPHQIHLGELHAILRRQEDFYPFLKDNREKIEKILTFRIPYYVGPLARGNSRFAWMTRKSEETITPWNFEEVVDKGASAQSFIERMTNFDKNLPNEKVLPKHSLLYEYFTVYNELTKVKYVTEGMRKPAFLSGEQKKAIVDLLFKTNRKVTVKQLKEDYFKKIECFDSVEISGVEDRFNASLGTYHDLLKIIKDKDFLDNEENEDILEDIVLTLTLFEDREMIEERLKTYAHLFDDKVMKQLKRRRYTGWGRLSRKLINGIRDKQSGKTILDFLKSDGFANRNFMQLIHDDSLTFKEDIQKAQVSGQGDSLHEHIANLAGSPAIKKGILQTVKVVDELVKVMGRHKPENIVIEMARENQTTQKGQKNSRERMKRIEEGIKELGSQILKEHPVENTQLQNEKLYLYYLQNGRDMYVDQELDINRLSDYDVDHIVPQSFLKDDSIDNKVLTRSDKARGKSDNVPSEEVVKKMKNYWRQLLNAKLITQRKFDNLTKAERGGLSELDKAGFIKRQLVETRQITKHVAQILDSRMNTKYDENDKLIREVKVITLKSKLVSDFRKDFQFYKVREINNYHHAHDAYLNAVVGTALIKKYPKLESEFVYGDYKVYDVRKMIAKSEQEIGKATAKYFFYSNIMNFFKTEITLANGEIRKRPLIETNGETGEIVWDKGRDFATVRKVLSMPQVNIVKKTEVQTGGFSKESILPKRNSDKLIARKKDWDPKKYGGFDSPTVAYSVLVVAKVEKGKSKKLKSVKELLGITIMERSSFEKNPIDFLEAKGYKEVKKDLIIKLPKYSLFELENGRKRMLASAGELQKGNELALPSKYVNFLYLASHYEKLKGSPEDNEQKQLFVEQHKHYLDEIIEQISEFSKRVILADANLDKVLSAYNKHRDKPIREQAENIIHLFTLTNLGAPAAFKYFDTTIDRKRYTSTKEVLDATLIHQSITGLYETRIDLSQLGGDGGGGGEAAAKGSSGGTLQLDDEYRLYSPLVKPDQNIQFWLEQFPQAWAETAGMGLAKQVPPQVIQLKASATPVSVRQYPLSKEAQEGIRPHVQRLIQQGILVPVQSPWNTPLLPVRKPGTNDYRPVQDLREVNKRVQDIHPTVPNPYNLLCALPPQRSWYTVLDLKDAFFCLRLHPTSQPLFAFEWRDPGTGRTGQLTWTRLPQGFKNSPTIFNEALHRDLANFRIQHPQVTLLQYVDDLLLAGATKQDCLEGTKALLLELSDLGYRASAKKAQICRREVTYLGYSLRDGQRWLTEARKKTVVQIPAPTTAKQVREFLGTAGFCRLWIPGFATLAAPLYPLTKPKGEFSWAPEHQKAFDAIKKALLSAPALALPDVTKPFTLYVDERKGVARGVLTQTLGPWRRPVAYLSKKLDPVASGWPVCLKAIAAVAILVKDADKLTLGQNITVIAPHALENIVRQPPDRWMTNARMTHYQSLLLTERVTFAPPAALNPATLLPEETDEPVTHDCHQLLIEETGVRKDLTDIPLTGEVLTWFTDGSSYVVEGKRMAGAAVVDGTRTIWASSLPEGTSAQKAELMALTQALRLAEGKSINIYTDSRYAFATAHVHGAIYKQRGWLTSAGREIKNKEEILSLLEALHLPKRLAIIHCPGHQKAKDPISRGNQMADRVAKQAAQGVNLLAGKRTADGSEFEKRTADGSEFESPKKKAKVE

SEQ ID NO: 302 - protein, 2090 aa, synthetic construct; identical to SEQ ID NO: 164

SEQ ID NO: 303 - protein, 2112 aa, synthetic construct; identical to SEQ ID NO: 140

SEQ ID NO: 304 - protein, 2090 aa, synthetic construct
MPAAKRVKLDGGDKKYSIGLDIGTNSVGWAVITDEYKVPSKKFKVLGNTDRHSIKKNLIGALLFDSGETAEATRLKRTARRRYTRRKNRICYLQEIFSNEMAKVDDSFFHRLEESFLVEEDKKHERHPIFGNIVDEVAYHEKYPTIYHLRKKLVDSTDKADLRLIYLALAHMIKFRGHFLIEGDLNPDNSDVDKLFIQLVQTYNQLFEENPINASGVDAKAILSARLSKSRRLENLIAQLPGEKKNGLFGNLIALSLGLTPNFKSNFDLAEDAKLQLSKDTYDDDLDNLLAQIGDQYADLFLAAKNLSDAILLSDILRVNTEITKAPLSASMIKRYDEHHQDLTLLKALVRQQLPEKYKEIFFDQSKNGYAGYIDGGASQEEFYKFIKPILEKMDGTEELLVKLNREDLLRKQRTFDNGSIPHQIHLGELHAILRRQEDFYPFLKDNREKIEKILTFRIPYYVGPLARGNSRFAWMTRKSEETITPWNFEEVVDKGASAQSFIERMTNFDKNLPNEKVLPKHSLLYEYFTVYNELTKVKYVTEGMRKPAFLSGEQKKAIVDLLFKTNRKVTVKQLKEDYFKKIECFDSVEISGVEDRFNASLGTYHDLLKIIKDKDFLDNEENEDILEDIVLTLTLFEDREMIEERLKTYAHLFDDKVMKQLKRRRYTGWGRLSRKLINGIRDKQSGKTILDFLKSDGFANRNFMQLIHDDSLTFKEDIQKAQVSGQGDSLHEHIANLAGSPAIKKGILQTVKVVDELVKVMGRHKPENIVIEMARENQTTQKGQKNSRERMKRIEEGIKELGSQILKEHPVENTQLQNEKLYLYYLQNGRDMYVDQELDINRLSDYDVDHIVPQSFLKDDSIDNKVLTRSDKARGKSDNVPSEEVVKKMKNYWRQLLNAKLITQRKFDNLTKAERGGLSELDKAGFIKRQLVETRQITKHVAQILDSRMNTKYDENDKLIREVKVITLKSKLVSDFRKDFQFYKVREINNYHHAHDAYLNAVVGTALIKKYPKLESEFVYGDYKVYDVRKMIAKSEQEIGKATAKYFFYSNIMNFFKTEITLANGEIRKRPLIETNGETGEIVWDKGRDFATVRKVLSMPQVNIVKKTEVQTGGFSKESILPKRNSDKLIARKKDWDPKKYGGFDSPTVAYSVLVVAKVEKGKSKKLKSVKELLGITIMERSSFEKNPIDFLEAKGYKEVKKDLIIKLPKYSLFELENGRKRMLASAGELQKGNELALPSKYVNFLYLASHYEKLKGSPEDNEQKQLFVEQHKHYLDEIIEQISEFSKRVILADANLDKVLSAYNKHRDKPIREQAENIIHLFTLTNLGAPAAFKYFDTTIDRKRYTSTKEVLDATLIHQSITGLYETRIDLSQLGGDGGEAAAKPAPGSSGGTLQLDDEYRLYSPLVKPDQNIQFWLEQFPQAWAETAGMGLAKQVPPQVIQLKASATPVSVRQYPLSKEAQEGIRPHVQRLIQQGILVPVQSPWNTPLLPVRKPGTNDYRPVQDLREVNKRVQDIHPTVPNPYNLLCALPPQRSWYTVLDLKDAFFCLRLHPTSQPLFAFEWRDPGTGRTGQLTWTRLPQGFKNSPTIFNEALHRDLANFRIQHPQVTLLQYVDDLLLAGATKQDCLEGTKALLLELSDLGYRASAKKAQICRREVTYLGYSLRDGQRWLTEARKKTVVQIPAPTTAKQVREFLGTAGFCRLWIPGFATLAAPLYPLTKPKGEFSWAPEHQKAFDAIKKALLSAPALALPDVTKPFTLYVDERKGVARGVLTQTLGPWRRPVAYLSKKLDPVASGWPVCLKAIAAVAILVKDADKLTLGQNITVIAPHALENIVRQPPDRWMTNARMTHYQSLLLTERVTFAPPAALNPATLLPEETDEPVTHDCHQLLIEETGVRKDLTDIPLTGEVLTWFTDGSSYVVEGKRMAGAAVVDGTRTIWASSLPEGTSAQKAELMALTQALRLAEGKSINIYTDSRYAFATAHVHGAIYKQRGWLTSAGREIKNKEEILSLLEALHLPKRLAIIHCPGHQKAKDPISRGNQMADRVAKQAAQGVNLLAGKRTADGSEFEKRTADGSEFESPKKKAKVE

SEQ ID NO: 305 - protein, 2090 aa, synthetic construct; identical to SEQ ID NO: 127

SEQ ID NO: 306 - protein, 2087 aa, synthetic construct; identical to SEQ ID NO: 126

SEQ ID NO: 307 - protein, 2088 aa, synthetic construct
MPAAKRVKLDGGDKKYSIGLDIGTNSVGWAVITDEYKVPSKKFKVLGNTDRHSIKKNLIGALLFDSGETAEATRLKRTARRRYTRRKNRICYLQEIFSNEMAKVDDSFFHRLEESFLVEEDKKHERHPIFGNIVDEVAYHEKYPTIYHLRKKLVDSTDKADLRLIYLALAHMIKFRGHFLIEGDLNPDNSDVDKLFIQLVQTYNQLFEENPINASGVDAKAILSARLSKSRRLENLIAQLPGEKKNGLFGNLIALSLGLTPNFKSNFDLAEDAKLQLSKDTYDDDLDNLLAQIGDQYADLFLAAKNLSDAILLSDILRVNTEITKAPLSASMIKRYDEHHQDLTLLKALVRQQLPEKYKEIFFDQSKNGYAGYIDGGASQEEFYKFIKPILEKMDGTEELLVKLNREDLLRKQRTFDNGSIPHQIHLGELHAILRRQEDFYPFLKDNREKIEKILTFRIPYYVGPLARGNSRFAWMTRKSEETITPWNFEEVVDKGASAQSFIERMTNFDKNLPNEKVLPKHSLLYEYFTVYNELTKVKYVTEGMRKPAFLSGEQKKAIVDLLFKTNRKVTVKQLKEDYFKKIECFDSVEISGVEDRFNASLGTYHDLLKIIKDKDFLDNEENEDILEDIVLTLTLFEDREMIEERLKTYAHLFDDKVMKQLKRRRYTGWGRLSRKLINGIRDKQSGKTILDFLKSDGFANRNFMQLIHDDSLTFKEDIQKAQVSGQGDSLHEHIANLAGSPAIKKGILQTVKVVDELVKVMGRHKPENIVIEMARENQTTQKGQKNSRERMKRIEEGIKELGSQILKEHPVENTQLQNEKLYLYYLQNGRDMYVDQELDINRLSDYDVDHIVPQSFLKDDSIDNKVLTRSDKARGKSDNVPSEEVVKKMKNYWRQLLNAKLITQRKFDNLTKAERGGLSELDKAGFIKRQLVETRQITKHVAQILDSRMNTKYDENDKLIREVKVITLKSKLVSDFRKDFQFYKVREINNYHHAHDAYLNAVVGTALIKKYPKLESEFVYGDYKVYDVRKMIAKSEQEIGKATAKYFFYSNIMNFFKTEITLANGEIRKRPLIETNGETGEIVWDKGRDFATVRKVLSMPQVNIVKKTEVQTGGFSKESILPKRNSDKLIARKKDWDPKKYGGFDSPTVAYSVLVVAKVEKGKSKKLKSVKELLGITIMERSSFEKNPIDFLEAKGYKEVKKDLIIKLPKYSLFELENGRKRMLASAGELQKGNELALPSKYVNFLYLASHYEKLKGSPEDNEQKQLFVEQHKHYLDEIIEQISEFSKRVILADANLDKVLSAYNKHRDKPIREQAENIIHLFTLTNLGAPAAFKYFDTTIDRKRYTSTKEVLDATLIHQSITGLYETRIDLSQLGGDGGGGGGSSPAPGGTLQLDDEYRLYSPLVKPDQNIQFWLEQFPQAWAETAGMGLAKQVPPQVIQLKASATPVSVRQYPLSKEAQEGIRPHVQRLIQQGILVPVQSPWNTPLLPVRKPGTNDYRPVQDLREVNKRVQDIHPTVPNPYNLLCALPPQRSWYTVLDLKDAFFCLRLHPTSQPLFAFEWRDPGTGRTGQLTWTRLPQGFKNSPTIFNEALHRDLANFRIQHPQVTLLQYVDDLLLAGATKQDCLEGTKALLLELSDLGYRASAKKAQICRREVTYLGYSLRDGQRWLTEARKKTVVQIPAPTTAKQVREFLGTAGFCRLWIPGFATLAAPLYPLTKPKGEFSWAPEHQKAFDAIKKALLSAPALALPDVTKPFTLYVDERKGVARGVLTQTLGPWRRPVAYLSKKLDPVASGWPVCLKAIAAVAILVKDADKLTLGQNITVIAPHALENIVRQPPDRWMTNARMTHYQSLLLTERVTFAPPAALNPATLLPEETDEPVTHDCHQLLIEETGVRKDLTDIPLTGEVLTWFTDGSSYVVEGKRMAGAAVVDGTRTIWASSLPEGTSAQKAELMALTQALRLAEGKSINIYTDSRYAFATAHVHGAIYKQRGWLTSAGREIKNKEEILSLLEALHLPKRLAIIHCPGHQKAKDPISRGNQMADRVAKQAAQGVNLLAGKRTADGSEFEKRTADGSEFESPKKKAKVE

SEQ ID NO: 308 - protein, 2084 aa, synthetic construct; identical to SEQ ID NO: 151

SEQ ID NO: 309 - protein, 2092 aa, synthetic construct; identical to SEQ ID NO: 157

SEQ ID NO: 310 - protein, 2090 aa, synthetic construct
MPAAKRVKLDGGDKKYSIGLDIGTNSVGWAVITDEYKVPSKKFKVLGNTDRHSIKKNLIGALLFDSGETAEATRLKRTARRRYTRRKNRICYLQEIFSNEMAKVDDSFFHRLEESFLVEEDKKHERHPIFGNIVDEVAYHEKYPTIYHLRKKLVDSTDKADLRLIYLALAHMIKFRGHFLIEGDLNPDNSDVDKLFIQLVQTYNQLFEENPINASGVDAKAILSARLSKSRRLENLIAQLPGEKKNGLFGNLIALSLGLTPNFKSNFDLAEDAKLQLSKDTYDDDLDNLLAQIGDQYADLFLAAKNLSDAILLSDILRVNTEITKAPLSASMIKRYDEHHQDLTLLKALVRQQLPEKYKEIFFDQSKNGYAGYIDGGASQEEFYKFIKPILEKMDGTEELLVKLNREDLLRKQRTFDNGSIPHQIHLGELHAILRRQEDFYPFLKDNREKIEKILTFRIPYYVGPLARGNSRFAWMTRKSEETITPWNFEEVVDKGASAQSFIERMTNFDKNLPNEKVLPKHSLLYEYFTVYNELTKVKYVTEGMRKPAFLSGEQKKAIVDLLFKTNRKVTVKQLKEDYFKKIECFDSVEISGVEDRFNASLGTYHDLLKIIKDKDFLDNEENEDILEDIVLTLTLFEDREMIEERLKTYAHLFDDKVMKQLKRRRYTGWGRLSRKLINGIRDKQSGKTILDFLKSDGFANRNFMQLIHDDSLTFKEDIQKAQVSGQGDSLHEHIANLAGSPAIKKGILQTVKVVDELVKVMGRHKPENIVIEMARENQTTQKGQKNSRERMKRIEEGIKELGSQILKEHPVENTQLQNEKLYLYYLQNGRDMYVDQELDINRLSDYDVDHIVPQSFLKDDSIDNKVLTRSDKARGKSDNVPSEEVVKKMKNYWRQLLNAKLITQRKFDNLTKAERGGLSELDKAGFIKRQLVETRQITKHVAQILDSRMNTKYDENDKLIREVKVITLKSKLVSDFRKDFQFYKVREINNYHHAHDAYLNAVVGTALIKKYPKLESEFVYGDYKVYDVRKMIAKSEQEIGKATAKYFFYSNIMNFFKTEITLANGEIRKRPLIETNGETGEIVWDKGRDFATVRKVLSMPQVNIVKKTEVQTGGFSKESILPKRNSDKLIARKKDWDPKKYGGFDSPTVAYSVLVVAKVEKGKSKKLKSVKELLGITIMERSSFEKNPIDFLEAKGYKEVKKDLIIKLPKYSLFELENGRKRMLASAGELQKGNELALPSKYVNFLYLASHYEKLKGSPEDNEQKQLFVEQHKHYLDEIIEQISEFSKRVILADANLDKVLSAYNKHRDKPIREQAENIIHLFTLTNLGAPAAFKYFDTTIDRKRYTSTKEVLDATLIHQSITGLYETRIDLSQLGGDGGGSSPAPEAAAKGGTLQLDDEYRLYSPLVKPDQNIQFWLEQFPQAWAETAGMGLAKQVPPQVIQLKASATPVSVRQYPLSKEAQEGIRPHVQRLIQQGILVPVQSPWNTPLLPVRKPGTNDYRPVQDLREVNKRVQDIHPTVPNPYNLLCALPPQRSWYTVLDLKDAFFCLRLHPTSQPLFAFEWRDPGTGRTGQLTWTRLPQGFKNSPTIFNEALHRDLANFRIQHPQVTLLQYVDDLLLAGATKQDCLEGTKALLLELSDLGYRASAKKAQICRREVTYLGYSLRDGQRWLTEARKKTVVQIPAPTTAKQVREFLGTAGFCRLWIPGFATLAAPLYPLTKPKGEFSWAPEHQKAFDAIKKALLSAPALALPDVTKPFTLYVDERKGVARGVLTQTLGPWRRPVAYLSKKLDPVASGWPVCLKAIAAVAILVKDADKLTLGQNITVIAPHALENIVRQPPDRWMTNARMTHYQSLLLTERVTFAPPAALNPATLLPEETDEPVTHDCHQLLIEETGVRKDLTDIPLTGEVLTWFTDGSSYVVEGKRMAGAAVVDGTRTIWASSLPEGTSAQKAELMALTQALRLAEGKSINIYTDSRYAFATAHVHGAIYKQRGWLTSAGREIKNKEEILSLLEALHLPKRLAIIHCPGHQKAKDPISRGNQMADRVAKQAAQGVNLLAGKRTADGSEFEKRTADGSEFESPKKKAKVE

SEQ ID NO: 311 - protein, 2090 aa, synthetic construct
MPAAKRVKLDGGDKKYSIGLDIGTNSVGWAVITDEYKVPSKKFKVLGNTDRHSIKKNLIGALLFDSGETAEATRLKRTARRRYTRRKNRICYLQEIFSNEMAKVDDSFFHRLEESFLVEEDKKHERHPIFGNIVDEVAYHEKYPTIYHLRKKLVDSTDKADLRLIYLALAHMIKFRGHFLIEGDLNPDNSDVDKLFIQLVQTYNQLFEENPINASGVDAKAILSARLSKSRRLENLIAQLPGEKKNGLFGNLIALSLGLTPNFKSNFDLAEDAKLQLSKDTYDDDLDNLLAQIGDQYADLFLAAKNLSDAILLSDILRVNTEITKAPLSASMIKRYDEHHQDLTLLKALVRQQLPEKYKEIFFDQSKNGYAGYIDGGASQEEFYKFIKPILEKMDGTEELLVKLNREDLLRKQRTFDNGSIPHQIHLGELHAILRRQEDFYPFLKDNREKIEKILTFRIPYYVGPLARGNSRFAWMTRKSEETITPWNFEEVVDKGASAQSFIERMTNFDKNLPNEKVLPKHSLLYEYFTVYNELTKVKYVTEGMRKPAFLSGEQKKAIVDLLFKTNRKVTVKQLKEDYFKKIECFDSVEISGVEDRFNASLGTYHDLLKIIKDKDFLDNEENEDILEDIVLTLTLFEDREMIEERLKTYAHLFDDKVMKQLKRRRYTGWGRLSRKLINGIRDKQSGKTILDFLKSDGFANRNFMQLIHDDSLTFKEDIQKAQVSGQGDSLHEHIANLAGSPAIKKGILQTVKVVDELVKVMGRHKPENIVIEMARENQTTQKGQKNSRERMKRIEEGIKELGSQILKEHPVENTQLQNEKLYLYYLQNGRDMYVDQELDINRLSDYDVDHIVPQSFLKDDSIDNKVLTRSDKARGKSDNVPSEEVVKKMKNYWRQLLNAKLITQRKFDNLTKAERGGLSELDKAGFIKRQLVETRQITKHVAQILDSRMNTKYDENDKLIREVKVITLKSKLVSDFRKDFQFYKVREINNYHHAHDAYLNAVVGTALIKKYPKLESEFVYGDYKVYDVRKMIAKSEQEIGKATAKYFFYSNIMNFFKTEITLANGEIRKRPLIETNGETGEIVWDKGRDFATVRKVLSMPQVNIVKKTEVQTGGFSKESILPKRNSDKLIARKKDWDPKKYGGFDSPTVAYSVLVVAKVEKGKSKKLKSVKELLGITIMERSSFEKNPIDFLEAKGYKEVKKDLIIKLPKYSLFELENGRKRMLASAGELQKGNELALPSKYVNFLYLASHYEKLKGSPEDNEQKQLFVEQHKHYLDEIIEQISEFSKRVILADANLDKVLSAYNKHRDKPIREQAENIIHLFTLTNLGAPAAFKYFDTTIDRKRYTSTKEVLDATLIHQSITGLYETRIDLSQLGGDGGGGGGGSEAAAKGGTLQLDDEYRLYSPLVKPDQNIQFWLEQFPQAWAETAGMGLAKQVPPQVIQLKASATPVSVRQYPLSKEAQEGIRPHVQRLIQQGILVPVQSPWNTPLLPVRKPGTNDYRPVQDLREVNKRVQDIHPTVPNPYNLLCALPPQRSWYTVLDLKDAFFCLRLHPTSQPLFAFEWRDPGTGRTGQLTWTRLPQGFKNSPTIFNEALHRDLANFRIQHPQVTLLQYVDDLLLAGATKQDCLEGTKALLLELSDLGYRASAKKAQICRREVTYLGYSLRDGQRWLTEARKKTVVQIPAPTTAKQVREFLGTAGFCRLWIPGFATLAAPLYPLTKPKGEFSWAPEHQKAFDAIKKALLSAPALALPDVTKPFTLYVDERKGVARGVLTQTLGPWRRPVAYLSKKLDPVASGWPVCLKAIAAVAILVKDADKLTLGQNITVIAPHALENIVRQPPDRWMTNARMTHYQSLLLTERVTFAPPAALNPATLLPEETDEPVTHDCHQLLIEETGVRKDLTDIPLTGEVLTWFTDGSSYVVEGKRMAGAAVVDGTRTIWASSLPEGTSAQKAELMALTQALRLAEGKSINIYTDSRYAFATAHVHGAIYKQRGWLTSAGREIKNKEEILSLLEALHLPKRLAIIHCPGHQKAKDPISRGNQMADRVAKQAAQGVNLLAGKRTADGSEFEKRTADGSEFESPKKKAKVE

SEQ ID NO: 312 - protein, 2090 aa, synthetic construct; identical to SEQ ID NO: 116

SEQ ID NO: 313 - protein, 2109 aa, synthetic construct; identical to SEQ ID NO: 117

SEQ ID NO: 314 - protein, 2088 aa, synthetic construct
MPAAKRVKLDGGDKKYSIGLDIGTNSVGWAVITDEYKVPSKKFKVLGNTDRHSIKKNLIGALLFDSGETAEATRLKRTARRRYTRRKNRICYLQEIFSNEMAKVDDSFFHRLEESFLVEEDKKHERHPIFGNIVDEVAYHEKYPTIYHLRKKLVDSTDKADLRLIYLALAHMIKFRGHFLIEGDLNPDNSDVDKLFIQLVQTYNQLFEENPINASGVDAKAILSARLSKSRRLENLIAQLPGEKKNGLFGNLIALSLGLTPNFKSNFDLAEDAKLQLSKDTYDDDLDNLLAQIGDQYADLFLAAKNLSDAILLSDILRVNTEITKAPLSASMIKRYDEHHQDLTLLKALVRQQLPEKYKEIFFDQSKNGYAGYIDGGASQEEFYKFIKPILEKMDGTEELLVKLNREDLLRKQRTFDNGSIPHQIHLGELHAILRRQEDFYPFLKDNREKIEKILTFRIPYYVGPLARGNSRFAWMTRKSEETITPWNFEEVVDKGASAQSFIERMTNFDKNLPNEKVLPKHSLLYEYFTVYNELTKVKYVTEGMRKPAFLSGEQKKAIVDLLFKTNRKVTVKQLKEDYFKKIECFDSVEISGVEDRFNASLGTYHDLLKIIKDKDFLDNEENEDILEDIVLTLTLFEDREMIEERLKTYAHLFDDKVMKQLKRRRYTGWGRLSRKLINGIRDKQSGKTILDFLKSDGFANRNFMQLIHDDSLTFKEDIQKAQVSGQGDSLHEHIANLAGSPAIKKGILQTVKVVDELVKVMGRHKPENIVIEMARENQTTQKGQKNSRERMKRIEEGIKELGSQILKEHPVENTQLQNEKLYLYYLQNGRDMYVDQELDINRLSDYDVDHIVPQSFLKDDSIDNKVLTRSDKARGKSDNVPSEEVVKKMKNYWRQLLNAKLITQRKFDNLTKAERGGLSELDKAGFIKRQLVETRQITKHVAQILDSRMNTKYDENDKLIREVKVITLKSKLVSDFRKDFQFYKVREINNYHHAHDAYLNAVVGTALIKKYPKLESEFVYGDYKVYDVRKMIAKSEQEIGKATAKYFFYSNIMNFFKTEITLANGEIRKRPLIETNGETGEIVWDKGRDFATVRKVLSMPQVNIVKKTEVQTGGFSKESILPKRNSDKLIARKKDWDPKKYGGFDSPTVAYSVLVVAKVEKGKSKKLKSVKELLGITIMERSSFEKNPIDFLEAKGYKEVKKDLIIKLPKYSLFELENGRKRMLASAGELQKGNELALPSKYVNFLYLASHYEKLKGSPEDNEQKQLFVEQHKHYLDEIIEQISEFSKRVILADANLDKVLSAYNKHRDKPIREQAENIIHLFTLTNLGAPAAFKYFDTTIDRKRYTSTKEVLDATLIHQSITGLYETRIDLSQLGGDGGGGGPAPGSSGGTLQLDDEYRLYSPLVKPDQNIQFWLEQFPQAWAETAGMGLAKQVPPQVIQLKASATPVSVRQYPLSKEAQEGIRPHVQRLIQQGILVPVQSPWNTPLLPVRKPGTNDYRPVQDLREVNKRVQDIHPTVPNPYNLLCALPPQRSWYTVLDLKDAFFCLRLHPTSQPLFAFEWRDPGTGRTGQLTWTRLPQGFKNSPTIFNEALHRDLANFRIQHPQVTLLQYVDDLLLAGATKQDCLEGTKALLLELSDLGYRASAKKAQICRREVTYLGYSLRDGQRWLTEARKKTVVQIPAPTTAKQVREFLGTAGFCRLWIPGFATLAAPLYPLTKPKGEFSWAPEHQKAFDAIKKALLSAPALALPDVTKPFTLYVDERKGVARGVLTQTLGPWRRPVAYLSKKLDPVASGWPVCLKAIAAVAILVKDADKLTLGQNITVIAPHALENIVRQPPDRWMTNARMTHYQSLLLTERVTFAPPAALNPATLLPEETDEPVTHDCHQLLIEETGVRKDLTDIPLTGEVLTWFTDGSSYVVEGKRMAGAAVVDGTRTIWASSLPEGTSAQKAELMALTQALRLAEGKSINIYTDSRYAFATAHVHGAIYKQRGWLTSAGREIKNKEEILSLLEALHLPKRLAIIHCPGHQKAKDPISRGNQMADRVAKQAAQGVNLLAGKRTADGSEFEKRTADGSEFESPKKKAKVE

SEQ ID NO: 315 - protein, 2082 aa, synthetic construct; identical to SEQ ID NO: 120

SEQ ID NO: 316 - protein, 2097 aa, synthetic construct; identical to SEQ ID NO: 142

SEQ ID NO: 317 - protein, 2090 aa, synthetic construct
MPAAKRVKLDGGDKKYSIGLDIGTNSVGWAVITDEYKVPSKKFKVLGNTDRHSIKKNLIGALLFDSGETAEATRLKRTARRRYTRRKNRICYLQEIFSNEMAKVDDSFFHRLEESFLVEEDKKHERHPIFGNIVDEVAYHEKYPTIYHLRKKLVDSTDKADLRLIYLALAHMIKFRGHFLIEGDLNPDNSDVDKLFIQLVQTYNQLFEENPINASGVDAKAILSARLSKSRRLENLIAQLPGEKKNGLFGNLIALSLGLTPNFKSNFDLAEDAKLQLSKDTYDDDLDNLLAQIGDQYADLFLAAKNLSDAILLSDILRVNTEITKAPLSASMIKRYDEHHQDLTLLKALVRQQLPEKYKEIFFDQSKNGYAGYIDGGASQEEFYKFIKPILEKMDGTEELLVKLNREDLLRKQRTFDNGSIPHQIHLGELHAILRRQEDFYPFLKDNREKIEKILTFRIPYYVGPLARGNSRFAWMTRKSEETITPWNFEEVVDKGASAQSFIERMTNFDKNLPNEKVLPKHSLLYEYFTVYNELTKVKYVTEGMRKPAFLSGEQKKAIVDLLFKTNRKVTVKQLKEDYFKKIECFDSVEISGVEDRFNASLGTYHDLLKIIKDKDFLDNEENEDILEDIVLTLTLFEDREMIEERLKTYAHLFDDKVMKQLKRRRYTGWGRLSRKLINGIRDKQSGKTILDFLKSDGFANRNFMQLIHDDSLTFKEDIQKAQVSGQGDSLHEHIANLAGSPAIKKGILQTVKVVDELVKVMGRHKPENIVIEMARENQTTQKGQKNSRERMKRIEEGIKELGSQILKEHPVENTQLQNEKLYLYYLQNGRDMYVDQELDINRLSDYDVDHIVPQSFLKDDSIDNKVLTRSDKARGKSDNVPSEEVVKKMKNYWRQLLNAKLITQRKFDNLTKAERGGLSELDKAGFIKRQLVETRQITKHVAQILDSRMNTKYDENDKLIREVKVITLKSKLVSDFRKDFQFYKVREINNYHHAHDAYLNAVVGTALIKKYPKLESEFVYGDYKVYDVRKMIAKSEQEIGKATAKYFFYSNIMNFFKTEITLANGEIRKRPLIETNGETGEIVWDKGRDFATVRKVLSMPQVNIVKKTEVQTGGFSKESILPKRNSDKLIARKKDWDPKKYGGFDSPTVAYSVLVVAKVEKGKSKKLKSVKELLGITIMERSSFEKNPIDFLEAKGYKEVKKDLIIKLPKYSLFELENGRKRMLASAGELQKGNELALPSKYVNFLYLASHYEKLKGSPEDNEQKQLFVEQHKHYLDEIIEQISEFSKRVILADANLDKVLSAYNKHRDKPIREQAENIIHLFTLTNLGAPAAFKYFDTTIDRKRYTSTKEVLDATLIHQSITGLYETRIDLSQLGGDGGGSSGGGEAAAKGGTLQLDDEYRLYSPLVKPDQNIQFWLEQFPQAWAETAGMGLAKQVPPQVIQLKASATPVSVRQYPLSKEAQEGIRPHVQRLIQQGILVPVQSPWNTPLLPVRKPGTNDYRPVQDLREVNKRVQDIHPTVPNPYNLLCALPPQRSWYTVLDLKDAFFCLRLHPTSQPLFAFEWRDPGTGRTGQLTWTRLPQGFKNSPTIFNEALHRDLANFRIQHPQVTLLQYVDDLLLAGATKQDCLEGTKALLLELSDLGYRASAKKAQICRREVTYLGYSLRDGQRWLTEARKKTVVQIPAPTTAKQVREFLGTAGFCRLWIPGFATLAAPLYPLTKPKGEFSWAPEHQKAFDAIKKALLSAPALALPDVTKPFTLYVDERKGVARGVLTQTLGPWRRPVAYLSKKLDPVASGWPVCLKAIAAVAILVKDADKLTLGQNITVIAPHALENIVRQPPDRWMTNARMTHYQSLLLTERVTFAPPAALNPATLLPEETDEPVTHDCHQLLIEETGVRKDLTDIPLTGEVLTWFTDGSSYVVEGKRMAGAAVVDGTRTIWASSLPEGTSAQKAELMALTQALRLAEGKSINIYTDSRYAFATAHVHGAIYKQRGWLTSAGREIKNKEEILSLLEALHLPKRLAIIHCPGHQKAKDPISRGNQMADRVAKQAAQGVNLLAGKRTADGSEFEKRTADGSEFESPKKKAKVE

SEQ ID NO: 318 - protein, 2090 aa, synthetic construct; identical to SEQ ID NO: 121

SEQ ID NO: 319 - protein, 2090 aa, synthetic construct; identical to SEQ ID NO: 124

SEQ ID NO: 320 - protein, 2088 aa, synthetic construct
MPAAKRVKLDGGDKKYSIGLDIGTNSVGWAVITDEYKVPSKKFKVLGNTDRHSIKKNLIGALLFDSGETAEATRLKRTARRRYTRRKNRICYLQEIFSNEMAKVDDSFFHRLEESFLVEEDKKHERHPIFGNIVDEVAYHEKYPTIYHLRKKLVDSTDKADLRLIYLALAHMIKFRGHFLIEGDLNPDNSDVDKLFIQLVQTYNQLFEENPINASGVDAKAILSARLSKSRRLENLIAQLPGEKKNGLFGNLIALSLGLTPNFKSNFDLAEDAKLQLSKDTYDDDLDNLLAQIGDQYADLFLAAKNLSDAILLSDILRVNTEITKAPLSASMIKRYDEHHQDLTLLKALVRQQLPEKYKEIFFDQSKNGYAGYIDGGASQEEFYKFIKPILEKMDGTEELLVKLNREDLLRKQRTFDNGSIPHQIHLGELHAILRRQEDFYPFLKDNREKIEKILTFRIPYYVGPLARGNSRFAWMTRKSEETITPWNFEEVVDKGASAQSFIERMTNFDKNLPNEKVLPKHSLLYEYFTVYNELTKVKYVTEGMRKPAFLSGEQKKAIVDLLFKTNRKVTVKQLKEDYFKKIECFDSVEISGVEDRFNASLGTYHDLLKIIKDKDFLDNEENEDILEDIVLTLTLFEDREMIEERLKTYAHLFDDKVMKQLKRRRYTGWGRLSRKLINGIRDKQSGKTILDFLKSDGFANRNFMQLIHDDSLTFKEDIQKAQVSGQGDSLHEHIANLAGSPAIKKGILQTVKVVDELVKVMGRHKPENIVIEMARENQTTQKGQKNSRERMKRIEEGIKELGSQILKEHPVENTQLQNEKLYLYYLQNGRDMYVDQELDINRLSDYDVDHIVPQSFLKDDSIDNKVLTRSDKARGKSDNVPSEEVVKKMKNYWRQLLNAKLITQRKFDNLTKAERGGLSELDKAGFIKRQLVETRQITKHVAQILDSRMNTKYDENDKLIREVKVITLKSKLVSDFRKDFQFYKVREINNYHHAHDAYLNAVVGTALIKKYPKLESEFVYGDYKVYDVRKMIAKSEQEIGKATAKYFFYSNIMNFFKTEITLANGEIRKRPLIETNGETGEIVWDKGRDFATVRKVLSMPQVNIVKKTEVQTGGFSKESILPKRNSDKLIARKKDWDPKKYGGFDSPTVAYSVLVVAKVEKGKSKKLKSVKELLGITIMERSSFEKNPIDFLEAKGYKEVKKDLIIKLPKYSLFELENGRKRMLASAGELQKGNELALPSKYVNFLYLASHYEKLKGSPEDNEQKQLFVEQHKHYLDEIIEQISEFSKRVILADANLDKVLSAYNKHRDKPIREQAENIIHLFTLTNLGAPAAFKYFDTTIDRKRYTSTKEVLDATLIHQSITGLYETRIDLSQLGGDGGGGGGGSGSSGGTLQLDDEYRLYSPLVKPDQNIQFWLEQFPQAWAETAGMGLAKQVPPQVIQLKASATPVSVRQYPLSKEAQEGIRPHVQRLIQQGILVPVQSPWNTPLLPVRKPGTNDYRPVQDLREVNKRVQDIHPTVPNPYNLLCALPPQRSWYTVLDLKDAFFCLRLHPTSQPLFAFEWRDPGTGRTGQLTWTRLPQGFKNSPTIFNEALHRDLANFRIQHPQVTLLQYVDDLLLAGATKQDCLEGTKALLLELSDLGYRASAKKAQICRREVTYLGYSLRDGQRWLTEARKKTVVQIPAPTTAKQVREFLGTAGFCRLWIPGFATLAAPLYPLTKPKGEFSWAPEHQKAFDAIKKALLSAPALALPDVTKPFTLYVDERKGVARGVLTQTLGPWRRPVAYLSKKLDPVASGWPVCLKAIAAVAILVKDADKLTLGQNITVIAPHALENIVRQPPDRWMTNARMTHYQSLLLTERVTFAPPAALNPATLLPEETDEPVTHDCHQLLIEETGVRKDLTDIPLTGEVLTWFTDGSSYVVEGKRMAGAAVVDGTRTIWASSLPEGTSAQKAELMALTQALRLAEGKSINIYTDSRYAFATAHVHGAIYKQRGWLTSAGREIKNKEEILSLLEALHLPKRLAIIHCPGHQKAKDPISRGNQMADRVAKQAAQGVNLLAGKRTADGSEFEKRTADGSEFESPKKKAKVE

SEQ ID NO: 321 - protein, 2090 aa, synthetic construct; identical to SEQ ID NO: 138

SEQ ID NO: 322 - protein, 2090 aa, synthetic construct
MPAAKRVKLDGGDKKYSIGLDIGTNSVGWAVITDEYKVPSKKFKVLGNTDRHSIKKNLIGALLFDSGETAEATRLKRTARRRYTRRKNRICYLQEIFSNEMAKVDDSFFHRLEESFLVEEDKKHERHPIFGNIVDEVAYHEKYPTIYHLRKKLVDSTDKADLRLIYLALAHMIKFRGHFLIEGDLNPDNSDVDKLFIQLVQTYNQLFEENPINASGVDAKAILSARLSKSRRLENLIAQLPGEKKNGLFGNLIALSLGLTPNFKSNFDLAEDAKLQLSKDTYDDDLDNLLAQIGDQYADLFLAAKNLSDAILLSDILRVNTEITKAPLSASMIKRYDEHHQDLTLLKALVRQQLPEKYKEIFFDQSKNGYAGYIDGGASQEEFYKFIKPILEKMDGTEELLVKLNREDLLRKQRTFDNGSIPHQIHLGELHAILRRQEDFYPFLKDNREKIEKILTFRIPYYVGPLARGNSRFAWMTRKSEETITPWNFEEVVDKGASAQSFIERMTNFDKNLPNEKVLPKHSLLYEYFTVYNELTKVKYVTEGMRKPAFLSGEQKKAIVDLLFKTNRKVTVKQLKEDYFKKIECFDSVEISGVEDRFNASLGTYHDLLKIIKDKDFLDNEENEDILEDIVLTLTLFEDREMIEERLKTYAHLFDDKVMKQLKRRRYTGWGRLSRKLINGIRDKQSGKTILDFLKSDGFANRNFMQLIHDDSLTFKEDIQKAQVSGQGDSLHEHIANLAGSPAIKKGILQTVKVVDELVKVMGRHKPENIVIEMARENQTTQKGQKNSRERMKRIEEGIKELGSQILKEHPVENTQLQNEKLYLYYLQNGRDMYVDQELDINRLSDYDVDHIVPQSFLKDDSIDNKVLTRSDKARGKSDNVPSEEVVKKMKNYWRQLLNAKLITQRKFDNLTKAERGGLSELDKAGFIKRQLVETRQITKHVAQILDSRMNTKYDENDKLIREVKVITLKSKLVSDFRKDFQFYKVREINNYHHAHDAYLNAVVGTALIKKYPKLESEFVYGDYKVYDVRKMIAKSEQEIGKATAKYFFYSNIMNFFKTEITLANGEIRKRPLIETNGETGEIVWDKGRDFATVRKVLSMPQVNIVKKTEVQTGGFSKESILPKRNSDKLIARKKDWDPKKYGGFDSPTVAYSVLVVAKVEKGKSKKLKSVKELLGITIMERSSFEKNPIDFLEAKGYKEVKKDLIIKLPKYSLFELENGRKRMLASAGELQKGNELALPSKYVNFLYLASHYEKLKGSPEDNEQKQLFVEQHKHYLDEIIEQISEFSKRVILADANLDKVLSAYNKHRDKPIREQAENIIHLFTLTNLGAPAAFKYFDTTIDRKRYTSTKEVLDATLIHQSITGLYETRIDLSQLGGDGGGGGEAAAKGGSGGTLQLDDEYRLYSPLVKPDQNIQFWLEQFPQAWAETAGMGLAKQVPPQVIQLKASATPVSVRQYPLSKEAQEGIRPHVQRLIQQGILVPVQSPWNTPLLPVRKPGTNDYRPVQDLREVNKRVQDIHPTVPNPYNLLCALPPQRSWYTVLDLKDAFFCLRLHPTSQPLFAFEWRDPGTGRTGQLTWTRLPQGFKNSPTIFNEALHRDLANFRIQHPQVTLLQYVDDLLLAGATKQDCLEGTKALLLELSDLGYRASAKKAQICRREVTYLGYSLRDGQRWLTEARKKTVVQIPAPTTAKQVREFLGTAGFCRLWIPGFATLAAPLYPLTKPKGEFSWAPEHQKAFDAIKKALLSAPALALPDVTKPFTLYVDERKGVARGVLTQTLGPWRRPVAYLSKKLDPVASGWPVCLKAIAAVAILVKDADKLTLGQNITVIAPHALENIVRQPPDRWMTNARMTHYQSLLLTERVTFAPPAALNPATLLPEETDEPVTHDCHQLLIEETGVRKDLTDIPLTGEVLTWFTDGSSYVVEGKRMAGAAVVDGTRTIWASSLPEGTSAQKAELMALTQALRLAEGKSINIYTDSRYAFATAHVHGAIYKQRGWLTSAGREIKNKEEILSLLEALHLPKRLAIIHCPGHQKAKDPISRGNQMADRVAKQAAQGVNLLAGKRTADGSEFEKRTADGSEFESPKKKAKVE

SEQ ID NO: 323 - protein, 2090 aa, synthetic construct
MPAAKRVKLDGGDKKYSIGLDIGTNSVGWAVITDEYKVPSKKFKVLGNTDRHSIKKNLIGALLFDSGETAEATRLKRTARRRYTRRKNRICYLQEIFSNEMAKVDDSFFHRLEESFLVEEDKKHERHPIFGNIVDEVAYHEKYPTIYHLRKKLVDSTDKADLRLIYLALAHMIKFRGHFLIEGDLNPDNSDVDKLFIQLVQTYNQLFEENPINASGVDAKAILSARLSKSRRLENLIAQLPGEKKNGLFGNLIALSLGLTPNFKSNFDLAEDAKLQLSKDTYDDDLDNLLAQIGDQYADLFLAAKNLSDAILLSDILRVNTEITKAPLSASMIKRYDEHHQDLTLLKALVRQQLPEKYKEIFFDQSKNGYAGYIDGGASQEEFYKFIKPILEKMDGTEELLVKLNREDLLRKQRTFDNGSIPHQIHLGELHAILRRQEDFYPFLKDNREKIEKILTFRIPYYVGPLARGNSRFAWMTRKSEETITPWNFEEVVDKGASAQSFIERMTNFDKNLPNEKVLPKHSLLYEYFTVYNELTKVKYVTEGMRKPAFLSGEQKKAIVDLLFKTNRKVTVKQLKEDYFKKIECFDSVEISGVEDRFNASLGTYHDLLKIIKDKDFLDNEENEDILEDIVLTLTLFEDREMIEERLKTYAHLFDDKVMKQLKRRRYTGWGRLSRKLINGIRDKQSGKTILDFLKSDGFANRNFMQLIHDDSLTFKEDIQKAQVSGQGDSLHEHIANLAGSPAIKKGILQTVKVVDELVKVMGRHKPENIVIEMARENQTTQKGQKNSRERMKRIEEGIKELGSQILKEHPVENTQLQNEKLYLYYLQNGRDMYVDQELDINRLSDYDVDHIVPQSFLKDDSIDNKVLTRSDKARGKSDNVPSEEVVKKMKNYWRQLLNAKLITQRKFDNLTKAERGGLSELDKAGFIKRQLVETRQITKHVAQILDSRMNTKYDENDKLIREVKVITLKSKLVSDFRKDFQFYKVREINNYHHAHDAYLNAVVGTALIKKYPKLESEFVYGDYKVYDVRKMIAKSEQEIGKATAKYFFYSNIMNFFKTEITLANGEIRKRPLIETNGETGEIVWDKGRDFATVRKVLSMPQVNIVKKTEVQTGGFSKESILPKRNSDKLIARKKDWDPKKYGGFDSPTVAYSVLVVAKVEKGKSKKLKSVKELLGITIMERSSFEKNPIDFLEAKGYKEVKKDLIIKLPKYSLFELENGRKRMLASAGELQKGNELALPSKYVNFLYLASHYEKLKGSPEDNEQKQLFVEQHKHYLDEIIEQISEFSKRVILADANLDKVLSAYNKHRDKPIREQAENIIHLFTLTNLGAPAAFKYFDTTIDRKRYTSTKEVLDATLIHQSITGLYETRIDLSQLGGDGGGGSEAAAKGSSGGTLQLDDEYRLYSPLVKPDQNIQFWLEQFPQAWAETAGMGLAKQVPPQVIQLKASATPVSVRQYPLSKEAQEGIRPHVQRLIQQGILVPVQSPWNTPLLPVRKPGTNDYRPVQDLREVNKRVQDIHPTVPNPYNLLCALPPQRSWYTVLDLKDAFFCLRLHPTSQPLFAFEWRDPGTGRTGQLTWTRLPQGFKNSPTIFNEALHRDLANFRIQHPQVTLLQYVDDLLLAGATKQDCLEGTKALLLELSDLGYRASAKKAQICRREVTYLGYSLRDGQRWLTEARKKTVVQIPAPTTAKQVREFLGTAGFCRLWIPGFATLAAPLYPLTKPKGEFSWAPEHQKAFDAIKKALLSAPALALPDVTKPFTLYVDERKGVARGVLTQTLGPWRRPVAYLSKKLDPVASGWPVCLKAIAAVAILVKDADKLTLGQNITVIAPHALENIVRQPPDRWMTNARMTHYQSLLLTERVTFAPPAALNPATLLPEETDEPVTHDCHQLLIEETGVRKDLTDIPLTGEVLTWFTDGSSYVVEGKRMAGAAVVDGTRTIWASSLPEGTSAQKAELMALTQALRLAEGKSINIYTDSRYAFATAHVHGAIYKQRGWLTSAGREIKNKEEILSLLEALHLPKRLAIIHCPGHQKAKDPISRGNQMADRVAKQAAQGVNLLAGKRTADGSEFEKRTADGSEFESPKKKAKVE

SEQ ID NO: 324 - protein, 2090 aa, synthetic construct
MPAAKRVKLDGGDKKYSIGLDIGTNSVGWAVITDEYKVPSKKFKVLGNTDRHSIKKNLIGALLFDSGETAEATRLKRTARRRYTRRKNRICYLQEIFSNEMAKVDDSFFHRLEESFLVEEDKKHERHPIFGNIVDEVAYHEKYPTIYHLRKKLVDSTDKADLRLIYLALAHMIKFRGHFLIEGDLNPDNSDVDKLFIQLVQTYNQLFEENPINASGVDAKAILSARLSKSRRLENLIAQLPGEKKNGLFGNLIALSLGLTPNFKSNFDLAEDAKLQLSKDTYDDDLDNLLAQIGDQYADLFLAAKNLSDAILLSDILRVNTEITKAPLSASMIKRYDEHHQDLTLLKALVRQQLPEKYKEIFFDQSKNGYAGYIDGGASQEEFYKFIKPILEKMDGTEELLVKLNREDLLRKQRTFDNGSIPHQIHLGELHAILRRQEDFYPFLKDNREKIEKILTFRIPYYVGPLARGNSRFAWMTRKSEETITPWNFEEVVDKGASAQSFIERMTNFDKNLPNEKVLPKHSLLYEYFTVYNELTKVKYVTEGMRKPAFLSGEQKKAIVDLLFKTNRKVTVKQLKEDYFKKIECFDSVEISGVEDRFNASLGTYHDLLKIIKDKDFLDNEENEDILEDIVLTLTLFEDREMIEERLKTYAHLFDDKVMKQLKRRRYTGWGRLSRKLINGIRDKQSGKTILDFLKSDGFANRNFMQLIHDDSLTFKEDIQKAQVSGQGDSLHEHIANLAGSPAIKKGILQTVKVVDELVKVMGRHKPENIVIEMARENQTTQKGQKNSRERMKRIEEGIKELGSQILKEHPVENTQLQNEKLYLYYLQNGRDMYVDQELDINRLSDYDVDHIVPQSFLKDDSIDNKVLTRSDKARGKSDNVPSEEVVKKMKNYWRQLLNAKLITQRKFDNLTKAERGGLSELDKAGFIKRQLVETRQITKHVAQILDSRMNTKYDENDKLIREVKVITLKSKLVSDFRKDFQFYKVREINNYHHAHDAYLNAVVGTALIKKYPKLESEFVYGDYKVYDVRKMIAKSEQEIGKATAKYFFYSNIMNFFKTEITLANGEIRKRPLIETNGETGEIVWDKGRDFATVRKVLSMPQVNIVKKTEVQTGGFSKESILPKRNSDKLIARKKDWDPKKYGGFDSPTVAYSVLVVAKVEKGKSKKLKSVKELLGITIMERSSFEKNPIDFLEAKGYKEVKKDLIIKLPKYSLFELENGRKRMLASAGELQKGNELALPSKYVNFLYLASHYEKLKGSPEDNEQKQLFVEQHKHYLDEIIEQISEFSKRVILADANLDKVLSAYNKHRDKPIREQAENIIHLFTLTNLGAPAAFKYFDTTIDRKRYTSTKEVLDATLIHQSITGLYETRIDLSQLGGDGGGGGEAAAKPAPGGTLQLDDEYRLYSPLVKPDQNIQFWLEQFPQAWAETAGMGLAKQVPPQVIQLKASATPVSVRQYPLSKEAQEGIRPHVQRLIQQGILVPVQSPWNTPLLPVRKPGTNDYRPVQDLREVNKRVQDIHPTVPNPYNLLCALPPQRSWYTVLDLKDAFFCLRLHPTSQPLFAFEWRDPGTGRTGQLTWTRLPQGFKNSPTIFNEALHRDLANFRIQHPQVTLLQYVDDLLLAGATKQDCLEGTKALLLELSDLGYRASAKKAQICRREVTYLGYSLRDGQRWLTEARKKTVVQIPAPTTAKQVREFLGTAGFCRLWIPGFATLAAPLYPLTKPKGEFSWAPEHQKAFDAIKKALLSAPALALPDVTKPFTLYVDERKGVARGVLTQTLGPWRRPVAYLSKKLDPVASGWPVCLKAIAAVAILVKDADKLTLGQNITVIAPHALENIVRQPPDRWMTNARMTHYQSLLLTERVTFAPPAALNPATLLPEETDEPVTHDCHQLLIEETGVRKDLTDIPLTGEVLTWFTDGSSYVVEGKRMAGAAVVDGTRTIWASSLPEGTSAQKAELMALTQALRLAEGKSINIYTDSRYAFATAHVHGAIYKQRGWLTSAGREIKNKEEILSLLEALHLPKRLAIIHCPGHQKAKDPISRGNQMADRVAKQAAQGVNLLAGKRTADGSEFEKRTADGSEFESPKKKAKVE

SEQ ID NO: 325 - protein, 2087 aa, synthetic construct; identical to SEQ ID NO: 128

SEQ ID NO: 326 - protein, 2082 aa, synthetic construct
MPAAKRVKLDGGDKKYSIGLDIGTNSVGWAVITDEYKVPSKKFKVLGNTDRHSIKKNLIGALLFDSGETAEATRLKRTARRRYTRRKNRICYLQEIFSNEMAKVDDSFFHRLEESFLVEEDKKHERHPIFGNIVDEVAYHEKYPTIYHLRKKLVDSTDKADLRLIYLALAHMIKFRGHFLIEGDLNPDNSDVDKLFIQLVQTYNQLFEENPINASGVDAKAILSARLSKSRRLENLIAQLPGEKKNGLFGNLIALSLGLTPNFKSNFDLAEDAKLQLSKDTYDDDLDNLLAQIGDQYADLFLAAKNLSDAILLSDILRVNTEITKAPLSASMIKRYDEHHQDLTLLKALVRQQLPEKYKEIFFDQSKNGYAGYIDGGASQEEFYKFIKPILEKMDGTEELLVKLNREDLLRKQRTFDNGSIPHQIHLGELHAILRRQEDFYPFLKDNREKIEKILTFRIPYYVGPLARGNSRFAWMTRKSEETITPWNFEEVVDKGASAQSFIERMTNFDKNLPNEKVLPKHSLLYEYFTVYNELTKVKYVTEGMRKPAFLSGEQKKAIVDLLFKTNRKVTVKQLKEDYFKKIECFDSVEISGVEDRFNASLGTYHDLLKIIKDKDFLDNEENEDILEDIVLTLTLFEDREMIEERLKTYAHLFDDKVMKQLKRRRYTGWGRLSRKLINGIRDKQSGKTILDFLKSDGFANRNFMQLIHDDSLTFKEDIQKAQVSGQGDSLHEHIANLAGSPAIKKGILQTVKVVDELVKVMGRHKPENIVIEMARENQTTQKGQKNSRERMKRIEEGIKELGSQILKEHPVENTQLQNEKLYLYYLQNGRDMYVDQELDINRLSDYDVDHIVPQSFLKDDSIDNKVLTRSDKARGKSDNVPSEEVVKKMKNYWRQLLNAKLITQRKFDNLTKAERGGLSELDKAGFIKRQLVETRQITKHVAQILDSRMNTKYDENDKLIREVKVITLKSKLVSDFRKDFQFYKVREINNYHHAHDAYLNAVVGTALIKKYPKLESEFVYGDYKVYDVRKMIAKSEQEIGKATAKYFFYSNIMNFFKTEITLANGEIRKRPLIETNGETGEIVWDKGRDFATVRKVLSMPQVNIVKKTEVQTGGFSKESILPKRNSDKLIARKKDWDPKKYGGFDSPTVAYSVLVVAKVEKGKSKKLKSVKELLGITIMERSSFEKNPIDFLEAKGYKEVKKDLIIKLPKYSLFELENGRKRMLASAGELQKGNELALPSKYVNFLYLASHYEKLKGSPEDNEQKQLFVEQHKHYLDEIIEQISEFSKRVILADANLDKVLSAYNKHRDKPIREQAENIIHLFTLTNLGAPAAFKYFDTTIDRKRYTSTKEVLDATLIHQSITGLYETRIDLSQLGGDGGGGSGGTLQLDDEYRLYSPLVKPDQNIQFWLEQFPQAWAETAGMGLAKQVPPQVIQLKASATPVSVRQYPLSKEAQEGIRPHVQRLIQQGILVPVQSPWNTPLLPVRKPGTNDYRPVQDLREVNKRVQDIHPTVPNPYNLLCALPPQRSWYTVLDLKDAFFCLRLHPTSQPLFAFEWRDPGTGRTGQLTWTRLPQGFKNSPTIFNEALHRDLANFRIQHPQVTLLQYVDDLLLAGATKQDCLEGTKALLLELSDLGYRASAKKAQICRREVTYLGYSLRDGQRWLTEARKKTVVQIPAPTTAKQVREFLGTAGFCRLWIPGFATLAAPLYPLTKPKGEFSWAPEHQKAFDAIKKALLSAPALALPDVTKPFTLYVDERKGVARGVLTQTLGPWRRPVAYLSKKLDPVASGWPVCLKAIAAVAILVKDADKLTLGQNITVIAPHALENIVRQPPDRWMTNARMTHYQSLLLTERVTFAPPAALNPATLLPEETDEPVTHDCHQLLIEETGVRKDLTDIPLTGEVLTWFTDGSSYVVEGKRMAGAAVVDGTRTIWASSLPEGTSAQKAELMALTQALRLAEGKSINIYTDSRYAFATAHVHGAIYKQRGWLTSAGREIKNKEEILSLLEALHLPKRLAIIHCPGHQKAKDPISRGNQMADRVAKQAAQGVNLLAGKRTADGSEFEKRTADGSEFESPKKKAKVE

SEQ ID NO: 327 - protein, 2090 aa, synthetic construct; identical to SEQ ID NO: 132

SEQ ID NO: 328 - protein, 2095 aa, synthetic construct; identical to SEQ ID NO: 122

SEQ ID NO: 329 - protein, 2085 aa, synthetic construct; identical to SEQ ID NO: 143

SEQ ID NO: 330 - protein, 2090 aa, synthetic construct; identical to SEQ ID NO: 160

SEQ ID NO: 331 - protein, 2090 aa, synthetic construct
MPAAKRVKLDGGDKKYSIGLDIGTNSVGWAVITDEYKVPSKKFKVLGNTDRHSIKKNLIGALLFDSGETAEATRLKRTARRRYTRRKNRICYLQEIFSNEMAKVDDSFFHRLEESFLVEEDKKHERHPIFGNIVDEVAYHEKYPTIYHLRKKLVDSTDKADLRLIYLALAHMIKFRGHFLIEGDLNPDNSDVDKLFIQLVQTYNQLFEENPINASGVDAKAILSARLSKSRRLENLIAQLPGEKKNGLFGNLIALSLGLTPNFKSNFDLAEDAKLQLSKDTYDDDLDNLLAQIGDQYADLFLAAKNLSDAILLSDILRVNTEITKAPLSASMIKRYDEHHQDLTLLKALVRQQLPEKYKEIFFDQSKNGYAGYIDGGASQEEFYKFIKPILEKMDGTEELLVKLNREDLLRKQRTFDNGSIPHQIHLGELHAILRRQEDFYPFLKDNREKIEKILTFRIPYYVGPLARGNSRFAWMTRKSEETITPWNFEEVVDKGASAQSFIERMTNFDKNLPNEKVLPKHSLLYEYFTVYNELTKVKYVTEGMRKPAFLSGEQKKAIVDLLFKTNRKVTVKQLKEDYFKKIECFDSVEISGVEDRFNASLGTYHDLLKIIKDKDFLDNEENEDILEDIVLTLTLFEDREMIEERLKTYAHLFDDKVMKQLKRRRYTGWGRLSRKLINGIRDKQSGKTILDFLKSDGFANRNFMQLIHDDSLTFKEDIQKAQVSGQGDSLHEHIANLAGSPAIKKGILQTVKVVDELVKVMGRHKPENIVIEMARENQTTQKGQKNSRERMKRIEEGIKELGSQILKEHPVENTQLQNEKLYLYYLQNGRDMYVDQELDINRLSDYDVDHIVPQSFLKDDSIDNKVLTRSDKARGKSDNVPSEEVVKKMKNYWRQLLNAKLITQRKFDNLTKAERGGLSELDKAGFIKRQLVETRQITKHVAQILDSRMNTKYDENDKLIREVKVITLKSKLVSDFRKDFQFYKVREINNYHHAHDAYLNAVVGTALIKKYPKLESEFVYGDYKVYDVRKMIAKSEQEIGKATAKYFFYSNIMNFFKTEITLANGEIRKRPLIETNGETGEIVWDKGRDFATVRKVLSMPQVNIVKKTEVQTGGFSKESILPKRNSDKLIARKKDWDPKKYGGFDSPTVAYSVLVVAKVEKGKSKKLKSVKELLGITIMERSSFEKNPIDFLEAKGYKEVKKDLIIKLPKYSLFELENGRKRMLASAGELQKGNELALPSKYVNFLYLASHYEKLKGSPEDNEQKQLFVEQHKHYLDEIIEQISEFSKRVILADANLDKVLSAYNKHRDKPIREQAENIIHLFTLTNLGAPAAFKYFDTTIDRKRYTSTKEVLDATLIHQSITGLYETRIDLSQLGGDGGPAPEAAAKGGSGGTLQLDDEYRLYSPLVKPDQNIQFWLEQFPQAWAETAGMGLAKQVPPQVIQLKASATPVSVRQYPLSKEAQEGIRPHVQRLIQQGILVPVQSPWNTPLLPVRKPGTNDYRPVQDLREVNKRVQDIHPTVPNPYNLLCALPPQRSWYTVLDLKDAFFCLRLHPTSQPLFAFEWRDPGTGRTGQLTWTRLPQGFKNSPTIFNEALHRDLANFRIQHPQVTLLQYVDDLLLAGATKQDCLEGTKALLLELSDLGYRASAKKAQICRREVTYLGYSLRDGQRWLTEARKKTVVQIPAPTTAKQVREFLGTAGFCRLWIPGFATLAAPLYPLTKPKGEFSWAPEHQKAFDAIKKALLSAPALALPDVTKPFTLYVDERKGVARGVLTQTLGPWRRPVAYLSKKLDPVASGWPVCLKAIAAVAILVKDADKLTLGQNITVIAPHALENIVRQPPDRWMTNARMTHYQSLLLTERVTFAPPAALNPATLLPEETDEPVTHDCHQLLIEETGVRKDLTDIPLTGEVLTWFTDGSSYVVEGKRMAGAAVVDGTRTIWASSLPEGTSAQKAELMALTQALRLAEGKSINIYTDSRYAFATAHVHGAIYKQRGWLTSAGREIKNKEEILSLLEALHLPKRLAIIHCPGHQKAKDPISRGNQMADRVAKQAAQGVNLLAGKRTADGSEFEKRTADGSEFESPKKKAKVE

SEQ ID NO: 332 - protein, 2085 aa, synthetic construct
MPAAKRVKLDGGDKKYSIGLDIGTNSVGWAVITDEYKVPSKKFKVLGNTDRHSIKKNLIGALLFDSGETAEATRLKRTARRRYTRRKNRICYLQEIFSNEMAKVDDSFFHRLEESFLVEEDKKHERHPIFGNIVDEVAYHEKYPTIYHLRKKLVDSTDKADLRLIYLALAHMIKFRGHFLIEGDLNPDNSDVDKLFIQLVQTYNQLFEENPINASGVDAKAILSARLSKSRRLENLIAQLPGEKKNGLFGNLIALSLGLTPNFKSNFDLAEDAKLQLSKDTYDDDLDNLLAQIGDQYADLFLAAKNLSDAILLSDILRVNTEITKAPLSASMIKRYDEHHQDLTLLKALVRQQLPEKYKEIFFDQSKNGYAGYIDGGASQEEFYKFIKPILEKMDGTEELLVKLNREDLLRKQRTFDNGSIPHQIHLGELHAILRRQEDFYPFLKDNREKIEKILTFRIPYYVGPLARGNSRFAWMTRKSEETITPWNFEEVVDKGASAQSFIERMTNFDKNLPNEKVLPKHSLLYEYFTVYNELTKVKYVTEGMRKPAFLSGEQKKAIVDLLFKTNRKVTVKQLKEDYFKKIECFDSVEISGVEDRFNASLGTYHDLLKIIKDKDFLDNEENEDILEDIVLTLTLFEDREMIEERLKTYAHLFDDKVMKQLKRRRYTGWGRLSRKLINGIRDKQSGKTILDFLKSDGFANRNFMQLIHDDSLTFKEDIQKAQVSGQGDSLHEHIANLAGSPAIKKGILQTVKVVDELVKVMGRHKPENIVIEMARENQTTQKGQKNSRERMKRIEEGIKELGSQILKEHPVENTQLQNEKLYLYYLQNGRDMYVDQELDINRLSDYDVDHIVPQSFLKDDSIDNKVLTRSDKARGKSDNVPSEEVVKKMKNYWRQLLNAKLITQRKFDNLTKAERGGLSELDKAGFIKRQLVETRQITKHVAQILDSRMNTKYDENDKLIREVKVITLKSKLVSDFRKDFQFYKVREINNYHHAHDAYLNAVVGTALIKKYPKLESEFVYGDYKVYDVRKMIAKSEQEIGKATAKYFFYSNIMNFFKTEITLANGEIRKRPLIETNGETGEIVWDKGRDFATVRKVLSMPQVNIVKKTEVQTGGFSKESILPKRNSDKLIARKKDWDPKKYGGFDSPTVAYSVLVVAKVEKGKSKKLKSVKELLGITIMERSSFEKNPIDFLEAKGYKEVKKDLIIKLPKYSLFELENGRKRMLASAGELQKGNELALPSKYVNFLYLASHYEKLKGSPEDNEQKQLFVEQHKHYLDEIIEQISEFSKRVILADANLDKVLSAYNKHRDKPIREQAENIIHLFTLTNLGAPAAFKYFDTTIDRKRYTSTKEVLDATLIHQSITGLYETRIDLSQLGGDGGPAPGGGGGTLQLDDEYRLYSPLVKPDQNIQFWLEQFPQAWAETAGMGLAKQVPPQVIQLKASATPVSVRQYPLSKEAQEGIRPHVQRLIQQGILVPVQSPWNTPLLPVRKPGTNDYRPVQDLREVNKRVQDIHPTVPNPYNLLCALPPQRSWYTVLDLKDAFFCLRLHPTSQPLFAFEWRDPGTGRTGQLTWTRLPQGFKNSPTIFNEALHRDLANFRIQHPQVTLLQYVDDLLLAGATKQDCLEGTKALLLELSDLGYRASAKKAQICRREVTYLGYSLRDGQRWLTEARKKTVVQIPAPTTAKQVREFLGTAGFCRLWIPGFATLAAPLYPLTKPKGEFSWAPEHQKAFDAIKKALLSAPALALPDVTKPFTLYVDERKGVARGVLTQTLGPWRRPVAYLSKKLDPVASGWPVCLKAIAAVAILVKDADKLTLGQNITVIAPHALENIVRQPPDRWMTNARMTHYQSLLLTERVTFAPPAALNPATLLPEETDEPVTHDCHQLLIEETGVRKDLTDIPLTGEVLTWFTDGSSYVVEGKRMAGAAVVDGTRTIWASSLPEGTSAQKAELMALTQALRLAEGKSINIYTDSRYAFATAHVHGAIYKQRGWLTSAGREIKNKEEILSLLEALHLPKRLAIIHCPGHQKAKDPISRGNQMADRVAKQAAQGVNLLAGKRTADGSEFEKRTADGSEFESPKKKAKVE

SEQ ID NO: 333 - protein, 2083 aa, synthetic construct; identical to SEQ ID NO: 149

SEQ ID NO: 334 - protein, 2090 aa, synthetic construct; identical to SEQ ID NO: 146

SEQ ID NO: 335 - protein, 2087 aa, synthetic construct; identical to SEQ ID NO: 158

SEQ ID NO: 336 - protein, 2088 aa, synthetic construct
MPAAKRVKLDGGDKKYSIGLDIGTNSVGWAVITDEYKVPSKKFKVLGNTDRHSIKKNLIGALLFDSGETAEATRLKRTARRRYTRRKNRICYLQEIFSNEMAKVDDSFFHRLEESFLVEEDKKHERHPIFGNIVDEVAYHEKYPTIYHLRKKLVDSTDKADLRLIYLALAHMIKFRGHFLIEGDLNPDNSDVDKLFIQLVQTYNQLFEENPINASGVDAKAILSARLSKSRRLENLIAQLPGEKKNGLFGNLIALSLGLTPNFKSNFDLAEDAKLQLSKDTYDDDLDNLLAQIGDQYADLFLAAKNLSDAILLSDILRVNTEITKAPLSASMIKRYDEHHQDLTLLKALVRQQLPEKYKEIFFDQSKNGYAGYIDGGASQEEFYKFIKPILEKMDGTEELLVKLNREDLLRKQRTFDNGSIPHQIHLGELHAILRRQEDFYPFLKDNREKIEKILTFRIPYYVGPLARGNSRFAWMTRKSEETITPWNFEEVVDKGASAQSFIERMTNFDKNLPNEKVLPKHSLLYEYFTVYNELTKVKYVTEGMRKPAFLSGEQKKAIVDLLFKTNRKVTVKQLKEDYFKKIECFDSVEISGVEDRFNASLGTYHDLLKIIKDKDFLDNEENEDILEDIVLTLTLFEDREMIEERLKTYAHLFDDKVMKQLKRRRYTGWGRLSRKLINGIRDKQSGKTILDFLKSDGFANRNFMQLIHDDSLTFKEDIQKAQVSGQGDSLHEHIANLAGSPAIKKGILQTVKVVDELVKVMGRHKPENIVIEMARENQTTQKGQKNSRERMKRIEEGIKELGSQILKEHPVENTQLQNEKLYLYYLQNGRDMYVDQELDINRLSDYDVDHIVPQSFLKDDSIDNKVLTRSDKARGKSDNVPSEEVVKKMKNYWRQLLNAKLITQRKFDNLTKAERGGLSELDKAGFIKRQLVETRQITKHVAQILDSRMNTKYDENDKLIREVKVITLKSKLVSDFRKDFQFYKVREINNYHHAHDAYLNAVVGTALIKKYPKLESEFVYGDYKVYDVRKMIAKSEQEIGKATAKYFFYSNIMNFFKTEITLANGEIRKRPLIETNGETGEIVWDKGRDFATVRKVLSMPQVNIVKKTEVQTGGFSKESILPKRNSDKLIARKKDWDPKKYGGFDSPTVAYSVLVVAKVEKGKSKKLKSVKELLGITIMERSSFEKNPIDFLEAKGYKEVKKDLIIKLPKYSLFELENGRKRMLASAGELQKGNELALPSKYVNFLYLASHYEKLKGSPEDNEQKQLFVEQHKHYLDEIIEQISEFSKRVILADANLDKVLSAYNKHRDKPIREQAENIIHLFTLTNLGAPAAFKYFDTTIDRKRYTSTKEVLDATLIHQSITGLYETRIDLSQLGGDGGGGSGGGGSSGGTLQLDDEYRLYSPLVKPDQNIQFWLEQFPQAWAETAGMGLAKQVPPQVIQLKASATPVSVRQYPLSKEAQEGIRPHVQRLIQQGILVPVQSPWNTPLLPVRKPGTNDYRPVQDLREVNKRVQDIHPTVPNPYNLLCALPPQRSWYTVLDLKDAFFCLRLHPTSQPLFAFEWRDPGTGRTGQLTWTRLPQGFKNSPTIFNEALHRDLANFRIQHPQVTLLQYVDDLLLAGATKQDCLEGTKALLLELSDLGYRASAKKAQICRREVTYLGYSLRDGQRWLTEARKKTVVQIPAPTTAKQVREFLGTAGFCRLWIPGFATLAAPLYPLTKPKGEFSWAPEHQKAFDAIKKALLSAPALALPDVTKPFTLYVDERKGVARGVLTQTLGPWRRPVAYLSKKLDPVASGWPVCLKAIAAVAILVKDADKLTLGQNITVIAPHALENIVRQPPDRWMTNARMTHYQSLLLTERVTFAPPAALNPATLLPEETDEPVTHDCHQLLIEETGVRKDLTDIPLTGEVLTWFTDGSSYVVEGKRMAGAAVVDGTRTIWASSLPEGTSAQKAELMALTQALRLAEGKSINIYTDSRYAFATAHVHGAIYKQRGWLTSAGREIKNKEEILSLLEALHLPKRLAIIHCPGHQKAKDPISRGNQMADRVAKQAAQGVNLLAGKRTADGSEFEKRTADGSEFESPKKKAKVE

SEQ ID NO: 337 - protein, 2104 aa, synthetic construct; identical to SEQ ID NO: 150

SEQ ID NO: 338 - protein, 2088 aa, synthetic construct; identical to SEQ ID NO: 169

SEQ ID NO: 339 - protein, 2088 aa, synthetic construct; identical to SEQ ID NO: 162

SEQ ID NO: 340 - protein, 2088 aa, synthetic construct; identical to SEQ ID NO: 173

SEQ ID NO: 341 - protein, 2090 aa, synthetic construct; identical to SEQ ID NO: 141

SEQ ID NO: 342 - protein, 2094 aa, synthetic construct
MPAAKRVKLDGGDKKYSIGLDIGTNSVGWAVITDEYKVPSKKFKVLGNTDRHSIKKNLIGALLFDSGETAEATRLKRTARRRYTRRKNRICYLQEIFSNEMAKVDDSFFHRLEESFLVEEDKKHERHPIFGNIVDEVAYHEKYPTIYHLRKKLVDSTDKADLRLIYLALAHMIKFRGHFLIEGDLNPDNSDVDKLFIQLVQTYNQLFEENPINASGVDAKAILSARLSKSRRLENLIAQLPGEKKNGLFGNLIALSLGLTPNFKSNFDLAEDAKLQLSKDTYDDDLDNLLAQIGDQYADLFLAAKNLSDAILLSDILRVNTEITKAPLSASMIKRYDEHHQDLTLLKALVRQQLPEKYKEIFFDQSKNGYAGYIDGGASQEEFYKFIKPILEKMDGTEELLVKLNREDLLRKQRTFDNGSIPHQIHLGELHAILRRQEDFYPFLKDNREKIEKILTFRIPYYVGPLARGNSRFAWMTRKSEETITPWNFEEVVDKGASAQSFIERMTNFDKNLPNEKVLPKHSLLYEYFTVYNELTKVKYVTEGMRKPAFLSGEQKKAIVDLLFKTNRKVTVKQLKEDYFKKIECFDSVEISGVEDRFNASLGTYHDLLKIIKDKDFLDNEENEDILEDIVLTLTLFEDREMIEERLKTYAHLFDDKVMKQLKRRRYTGWGRLSRKLINGIRDKQSGKTILDFLKSDGFANRNFMQLIHDDSLTFKEDIQKAQVSGQGDSLHEHIANLAGSPAIKKGILQTVKVVDELVKVMGRHKPENIVIEMARENQTTQKGQKNSRERMKRIEEGIKELGSQILKEHPVENTQLQNEKLYLYYLQNGRDMYVDQELDINRLSDYDVDHIVPQSFLKDDSIDNKVLTRSDKARGKSDNVPSEEVVKKMKNYWRQLLNAKLITQRKFDNLTKAERGGLSELDKAGFIKRQLVETRQITKHVAQILDSRMNTKYDENDKLIREVKVITLKSKLVSDFRKDFQFYKVREINNYHHAHDAYLNAVVGTALIKKYPKLESEFVYGDYKVYDVRKMIAKSEQEIGKATAKYFFYSNIMNFFKTEITLANGEIRKRPLIETNGETGEIVWDKGRDFATVRKVLSMPQVNIVKKTEVQTGGFSKESILPKRNSDKLIARKKDWDPKKYGGFDSPTVAYSVLVVAKVEKGKSKKLKSVKELLGITIMERSSFEKNPIDFLEAKGYKEVKKDLIIKLPKYSLFELENGRKRMLASAGELQKGNELALPSKYVNFLYLASHYEKLKGSPEDNEQKQLFVEQHKHYLDEIIEQISEFSKRVILADANLDKVLSAYNKHRDKPIREQAENIIHLFTLTNLGAPAAFKYFDTTIDRKRYTSTKEVLDATLIHQSITGLYETRIDLSQLGGDGGEAAAKGGGGSEAAAKGGTLQLDDEYRLYSPLVKPDQNIQFWLEQFPQAWAETAGMGLAKQVPPQVIQLKASATPVSVRQYPLSKEAQEGIRPHVQRLIQQGILVPVQSPWNTPLLPVRKPGTNDYRPVQDLREVNKRVQDIHPTVPNPYNLLCALPPQRSWYTVLDLKDAFFCLRLHPTSQPLFAFEWRDPGTGRTGQLTWTRLPQGFKNSPTIFNEALHRDLANFRIQHPQVTLLQYVDDLLLAGATKQDCLEGTKALLLELSDLGYRASAKKAQICRREVTYLGYSLRDGQRWLTEARKKTVVQIPAPTTAKQVREFLGTAGFCRLWIPGFATLAAPLYPLTKPKGEFSWAPEHQKAFDAIKKALLSAPALALPDVTKPFTLYVDERKGVARGVLTQTLGPWRRPVAYLSKKLDPVASGWPVCLKAIAAVAILVKDADKLTLGQNITVIAPHALENIVRQPPDRWMTNARMTHYQSLLLTERVTFAPPAALNPATLLPEETDEPVTHDCHQLLIEETGVRKDLTDIPLTGEVLTWFTDGSSYVVEGKRMAGAAVVDGTRTIWASSLPEGTSAQKAELMALTQALRLAEGKSINIYTDSRYAFATAHVHGAIYKQRGWLTSAGREIKNKEEILSLLEALHLPKRLAIIHCPGHQKAKDPISRGNQMADRVAKQAAQGVNLLAGKRTADGSEFEKRTADGSEFESPKKKAKVE

SEQ ID NO: 343 - protein, 2087 aa, synthetic construct
MPAAKRVKLDGGDKKYSIGLDIGTNSVGWAVITDEYKVPSKKFKVLGNTDRHSIKKNLIGALLFDSGETAEATRLKRTARRRYTRRKNRICYLQEIFSNEMAKVDDSFFHRLEESFLVEEDKKHERHPIFGNIVDEVAYHEKYPTIYHLRKKLVDSTDKADLRLIYLALAHMIKFRGHFLIEGDLNPDNSDVDKLFIQLVQTYNQLFEENPINASGVDAKAILSARLSKSRRLENLIAQLPGEKKNGLFGNLIALSLGLTPNFKSNFDLAEDAKLQLSKDTYDDDLDNLLAQIGDQYADLFLAAKNLSDAILLSDILRVNTEITKAPLSASMIKRYDEHHQDLTLLKALVRQQLPEKYKEIFFDQSKNGYAGYIDGGASQEEFYKFIKPILEKMDGTEELLVKLNREDLLRKQRTFDNGSIPHQIHLGELHAILRRQEDFYPFLKDNREKIEKILTFRIPYYVGPLARGNSRFAWMTRKSEETITPWNFEEVVDKGASAQSFIERMTNFDKNLPNEKVLPKHSLLYEYFTVYNELTKVKYVTEGMRKPAFLSGEQKKAIVDLLFKTNRKVTVKQLKEDYFKKIECFDSVEISGVEDRFNASLGTYHDLLKIIKDKDFLDNEENEDILEDIVLTLTLFEDREMIEERLKTYAHLFDDKVMKQLKRRRYTGWGRLSRKLINGIRDKQSGKTILDFLKSDGFANRNFMQLIHDDSLTFKEDIQKAQVSGQGDSLHEHIANLAGSPAIKKGILQTVKVVDELVKVMGRHKPENIVIEMARENQTTQKGQKNSRERMKRIEEGIKELGSQILKEHPVENTQLQNEKLYLYYLQNGRDMYVDQELDINRLSDYDVDHIVPQSFLKDDSIDNKVLTRSDKARGKSDNVPSEEVVKKMKNYWRQLLNAKLITQRKFDNLTKAERGGLSELDKAGFIKRQLVETRQITKHVAQILDSRMNTKYDENDKLIREVKVITLKSKLVSDFRKDFQFYKVREINNYHHAHDAYLNAVVGTALIKKYPKLESEFVYGDYKVYDVRKMIAKSEQEIGKATAKYFFYSNIMNFFKTEITLANGEIRKRPLIETNGETGEIVWDKGRDFATVRKVLSMPQVNIVKKTEVQTGGFSKESILPKRNSDKLIARKKDWDPKKYGGFDSPTVAYSVLVVAKVEKGKSKKLKSVKELLGITIMERSSFEKNPIDFLEAKGYKEVKKDLIIKLPKYSLFELENGRKRMLASAGELQKGNELALPSKYVNFLYLASHYEKLKGSPEDNEQKQLFVEQHKHYLDEIIEQISEFSKRVILADANLDKVLSAYNKHRDKPIREQAENIIHLFTLTNLGAPAAFKYFDTTIDRKRYTSTKEVLDATLIHQSITGLYETRIDLSQLGGDGGEAAAKPAPGGTLQLDDEYRLYSPLVKPDQNIQFWLEQFPQAWAETAGMGLAKQVPPQVIQLKASATPVSVRQYPLSKEAQEGIRPHVQRLIQQGILVPVQSPWNTPLLPVRKPGTNDYRPVQDLREVNKRVQDIHPTVPNPYNLLCALPPQRSWYTVLDLKDAFFCLRLHPTSQPLFAFEWRDPGTGRTGQLTWTRLPQGFKNSPTIFNEALHRDLANFRIQHPQVTLLQYVDDLLLAGATKQDCLEGTKALLLELSDLGYRASAKKAQICRREVTYLGYSLRDGQRWLTEARKKTVVQIPAPTTAKQVREFLGTAGFCRLWIPGFATLAAPLYPLTKPKGEFSWAPEHQKAFDAIKKALLSAPALALPDVTKPFTLYVDERKGVARGVLTQTLGPWRRPVAYLSKKLDPVASGWPVCLKAIAAVAILVKDADKLTLGQNITVIAPHALENIVRQPPDRWMTNARMTHYQSLLLTERVTFAPPAALNPATLLPEETDEPVTHDCHQLLIEETGVRKDLTDIPLTGEVLTWFTDGSSYVVEGKRMAGAAVVDGTRTIWASSLPEGTSAQKAELMALTQALRLAEGKSINIYTDSRYAFATAHVHGAIYKQRGWLTSAGREIKNKEEILSLLEALHLPKRLAIIHCPGHQKAKDPISRGNQMADRVAKQAAQGVNLLAGKRTADGSEFEKRTADGSEFESPKKKAKVE

SEQ ID NO: 344 - protein, 2088 aa, synthetic construct; identical to SEQ ID NO: 131

SEQ ID NO: 345 - protein, 2085 aa, synthetic construct
MPAAKRVKLDGGDKKYSIGLDIGTNSVGWAVITDEYKVPSKKFKVLGNTDRHSIKKNLIGALLFDSGETAEATRLKRTARRRYTRRKNRICYLQEIFSNEMAKVDDSFFHRLEESFLVEEDKKHERHPIFGNIVDEVAYHEKYPTIYHLRKKLVDSTDKADLRLIYLALAHMIKFRGHFLIEGDLNPDNSDVDKLFIQLVQTYNQLFEENPINASGVDAKAILSARLSKSRRLENLIAQLPGEKKNGLFGNLIALSLGLTPNFKSNFDLAEDAKLQLSKDTYDDDLDNLLAQIGDQYADLFLAAKNLSDAILLSDILRVNTEITKAPLSASMIKRYDEHHQDLTLLKALVRQQLPEKYKEIFFDQSKNGYAGYIDGGASQEEFYKFIKPILEKMDGTEELLVKLNREDLLRKQRTFDNGSIPHQIHLGELHAILRRQEDFYPFLKDNREKIEKILTFRIPYYVGPLARGNSRFAWMTRKSEETITPWNFEEVVDKGASAQSFIERMTNFDKNLPNEKVLPKHSLLYEYFTVYNELTKVKYVTEGMRKPAFLSGEQKKAIVDLLFKTNRKVTVKQLKEDYFKKIECFDSVEISGVEDRFNASLGTYHDLLKIIKDKDFLDNEENEDILEDIVLTLTLFEDREMIEERLKTYAHLFDDKVMKQLKRRRYTGWGRLSRKLINGIRDKQSGKTILDFLKSDGFANRNFMQLIHDDSLTFKEDIQKAQVSGQGDSLHEHIANLAGSPAIKKGILQTVKVVDELVKVMGRHKPENIVIEMARENQTTQKGQKNSRERMKRIEEGIKELGSQILKEHPVENTQLQNEKLYLYYLQNGRDMYVDQELDINRLSDYDVDHIVPQSFLKDDSIDNKVLTRSDKARGKSDNVPSEEVVKKMKNYWRQLLNAKLITQRKFDNLTKAERGGLSELDKAGFIKRQLVETRQITKHVAQILDSRMNTKYDENDKLIREVKVITLKSKLVSDFRKDFQFYKVREINNYHHAHDAYLNAVVGTALIKKYPKLESEFVYGDYKVYDVRKMIAKSEQEIGKATAKYFFYSNIMNFFKTEITLANGEIRKRPLIETNGETGEIVWDKGRDFATVRKVLSMPQVNIVKKTEVQTGGFSKESILPKRNSDKLIARKKDWDPKKYGGFDSPTVAYSVLVVAKVEKGKSKKLKSVKELLGITIMERSSFEKNPIDFLEAKGYKEVKKDLIIKLPKYSLFELENGRKRMLASAGELQKGNELALPSKYVNFLYLASHYEKLKGSPEDNEQKQLFVEQHKHYLDEIIEQISEFSKRVILADANLDKVLSAYNKHRDKPIREQAENIIHLFTLTNLGAPAAFKYFDTTIDRKRYTSTKEVLDATLIHQSITGLYETRIDLSQLGGDGGGGSPAPGGTLQLDDEYRLYSPLVKPDQNIQFWLEQFPQAWAETAGMGLAKQVPPQVIQLKASATPVSVRQYPLSKEAQEGIRPHVQRLIQQGILVPVQSPWNTPLLPVRKPGTNDYRPVQDLREVNKRVQDIHPTVPNPYNLLCALPPQRSWYTVLDLKDAFFCLRLHPTSQPLFAFEWRDPGTGRTGQLTWTRLPQGFKNSPTIFNEALHRDLANFRIQHPQVTLLQYVDDLLLAGATKQDCLEGTKALLLELSDLGYRASAKKAQICRREVTYLGYSLRDGQRWLTEARKKTVVQIPAPTTAKQVREFLGTAGFCRLWIPGFATLAAPLYPLTKPKGEFSWAPEHQKAFDAIKKALLSAPALALPDVTKPFTLYVDERKGVARGVLTQTLGPWRRPVAYLSKKLDPVASGWPVCLKAIAAVAILVKDADKLTLGQNITVIAPHALENIVRQPPDRWMTNARMTHYQSLLLTERVTFAPPAALNPATLLPEETDEPVTHDCHQLLIEETGVRKDLTDIPLTGEVLTWFTDGSSYVVEGKRMAGAAVVDGTRTIWASSLPEGTSAQKAELMALTQALRLAEGKSINIYTDSRYAFATAHVHGAIYKQRGWLTSAGREIKNKEEILSLLEALHLPKRLAIIHCPGHQKAKDPISRGNQMADRVAKQAAQGVNLLAGKRTADGSEFEKRTADGSEFESPKKKAKVE

SEQ ID NO: 346 - protein, 2090 aa, synthetic construct
MPAAKRVKLDGGDKKYSIGLDIGTNSVGWAVITDEYKVPSKKFKVLGNTDRHSIKKNLIGALLFDSGETAEATRLKRTARRRYTRRKNRICYLQEIFSNEMAKVDDSFFHRLEESFLVEEDKKHERHPIFGNIVDEVAYHEKYPTIYHLRKKLVDSTDKADLRLIYLALAHMIKFRGHFLIEGDLNPDNSDVDKLFIQLVQTYNQLFEENPINASGVDAKAILSARLSKSRRLENLIAQLPGEKKNGLFGNLIALSLGLTPNFKSNFDLAEDAKLQLSKDTYDDDLDNLLAQIGDQYADLFLAAKNLSDAILLSDILRVNTEITKAPLSASMIKRYDEHHQDLTLLKALVRQQLPEKYKEIFFDQSKNGYAGYIDGGASQEEFYKFIKPILEKMDGTEELLVKLNREDLLRKQRTFDNGSIPHQIHLGELHAILRRQEDFYPFLKDNREKIEKILTFRIPYYVGPLARGNSRFAWMTRKSEETITPWNFEEVVDKGASAQSFIERMTNFDKNLPNEKVLPKHSLLYEYFTVYNELTKVKYVTEGMRKPAFLSGEQKKAIVDLLFKTNRKVTVKQLKEDYFKKIECFDSVEISGVEDRFNASLGTYHDLLKIIKDKDFLDNEENEDILEDIVLTLTLFEDREMIEERLKTYAHLFDDKVMKQLKRRRYTGWGRLSRKLINGIRDKQSGKTILDFLKSDGFANRNFMQLIHDDSLTFKEDIQKAQVSGQGDSLHEHIANLAGSPAIKKGILQTVKVVDELVKVMGRHKPENIVIEMARENQTTQKGQKNSRERMKRIEEGIKELGSQILKEHPVENTQLQNEKLYLYYLQNGRDMYVDQELDINRLSDYDVDHIVPQSFLKDDSIDNKVLTRSDKARGKSDNVPSEEVVKKMKNYWRQLLNAKLITQRKFDNLTKAERGGLSELDKAGFIKRQLVETRQITKHVAQILDSRMNTKYDENDKLIREVKVITLKSKLVSDFRKDFQFYKVREINNYHHAHDAYLNAVVGTALIKKYPKLESEFVYGDYKVYDVRKMIAKSEQEIGKATAKYFFYSNIMNFFKTEITLANGEIRKRPLIETNGETGEIVWDKGRDFATVRKVLSMPQVNIVKKTEVQTGGFSKESILPKRNSDKLIARKKDWDPKKYGGFDSPTVAYSVLVVAKVEKGKSKKLKSVKELLGITIMERSSFEKNPIDFLEAKGYKEVKKDLIIKLPKYSLFELENGRKRMLASAGELQKGNELALPSKYVNFLYLASHYEKLKGSPEDNEQKQLFVEQHKHYLDEIIEQISEFSKRVILADANLDKVLSAYNKHRDKPIREQAENIIHLFTLTNLGAPAAFKYFDTTIDRKRYTSTKEVLDATLIHQSITGLYETRIDLSQLGGDGGGGGPAPEAAAKGGTLQLDDEYRLYSPLVKPDQNIQFWLEQFPQAWAETAGMGLAKQVPPQVIQLKASATPVSVRQYPLSKEAQEGIRPHVQRLIQQGILVPVQSPWNTPLLPVRKPGTNDYRPVQDLREVNKRVQDIHPTVPNPYNLLCALPPQRSWYTVLDLKDAFFCLRLHPTSQPLFAFEWRDPGTGRTGQLTWTRLPQGFKNSPTIFNEALHRDLANFRIQHPQVTLLQYVDDLLLAGATKQDCLEGTKALLLELSDLGYRASAKKAQICRREVTYLGYSLRDGQRWLTEARKKTVVQIPAPTTAKQVREFLGTAGFCRLWIPGFATLAAPLYPLTKPKGEFSWAPEHQKAFDAIKKALLSAPALALPDVTKPFTLYVDERKGVARGVLTQTLGPWRRPVAYLSKKLDPVASGWPVCLKAIAAVAILVKDADKLTLGQNITVIAPHALENIVRQPPDRWMTNARMTHYQSLLLTERVTFAPPAALNPATLLPEETDEPVTHDCHQLLIEETGVRKDLTDIPLTGEVLTWFTDGSSYVVEGKRMAGAAVVDGTRTIWASSLPEGTSAQKAELMALTQALRLAEGKSINIYTDSRYAFATAHVHGAIYKQRGWLTSAGREIKNKEEILSLLEALHLPKRLAIIHCPGHQKAKDPISRGNQMADRVAKQAAQGVNLLAGKRTADGSEFEKRTADGSEFESPKKKAKVE

SEQ ID NO: 347 - protein, 2082 aa, synthetic construct; identical to SEQ ID NO: 177

SEQ ID NO: 348 - protein, 2090 aa, synthetic construct
MPAAKRVKLDGGDKKYSIGLDIGTNSVGWAVITDEYKVPSKKFKVLGNTDRHSIKKNLIGALLFDSGETAEATRLKRTARRRYTRRKNRICYLQEIFSNEMAKVDDSFFHRLEESFLVEEDKKHERHPIFGNIVDEVAYHEKYPTIYHLRKKLVDSTDKADLRLIYLALAHMIKFRGHFLIEGDLNPDNSDVDKLFIQLVQTYNQLFEENPINASGVDAKAILSARLSKSRRLENLIAQLPGEKKNGLFGNLIALSLGLTPNFKSNFDLAEDAKLQLSKDTYDDDLDNLLAQIGDQYADLFLAAKNLSDAILLSDILRVNTEITKAPLSASMIKRYDEHHQDLTLLKALVRQQLPEKYKEIFFDQSKNGYAGYIDGGASQEEFYKFIKPILEKMDGTEELLVKLNREDLLRKQRTFDNGSIPHQIHLGELHAILRRQEDFYPFLKDNREKIEKILTFRIPYYVGPLARGNSRFAWMTRKSEETITPWNFEEVVDKGASAQSFIERMTNFDKNLPNEKVLPKHSLLYEYFTVYNELTKVKYVTEGMRKPAFLSGEQKKAIVDLLFKTNRKVTVKQLKEDYFKKIECFDSVEISGVEDRFNASLGTYHDLLKIIKDKDFLDNEENEDILEDIVLTLTLFEDREMIEERLKTYAHLFDDKVMKQLKRRRYTGWGRLSRKLINGIRDKQSGKTILDFLKSDGFANRNFMQLIHDDSLTFKEDIQKAQVSGQGDSLHEHIANLAGSPAIKKGILQTVKVVDELVKVMGRHKPENIVIEMARENQTTQKGQKNSRERMKRIEEGIKELGSQILKEHPVENTQLQNEKLYLYYLQNGRDMYVDQELDINRLSDYDVDHIVPQSFLKDDSIDNKVLTRSDKARGKSDNVPSEEVVKKMKNYWRQLLNAKLITQRKFDNLTKAERGGLSELDKAGFIKRQLVETRQITKHVAQILDSRMNTKYDENDKLIREVKVITLKSKLVSDFRKDFQFYKVREINNYHHAHDAYLNAVVGTALIKKYPKLESEFVYGDYKVYDVRKMIAKSEQEIGKATAKYFFYSNIMNFFKTEITLANGEIRKRPLIETNGETGEIVWDKGRDFATVRKVLSMPQVNIVKKTEVQTGGFSKESILPKRNSDKLIARKKDWDPKKYGGFDSPTVAYSVLVVAKVEKGKSKKLKSVKELLGITIMERSSFEKNPIDFLEAKGYKEVKKDLIIKLPKYSLFELENGRKRMLASAGELQKGNELALPSKYVNFLYLASHYEKLKGSPEDNEQKQLFVEQHKHYLDEIIEQISEFSKRVILADANLDKVLSAYNKHRDKPIREQAENIIHLFTLTNLGAPAAFKYFDTTIDRKRYTSTKEVLDATLIHQSITGLYETRIDLSQLGGDGGEAAAKGGGPAPGGTLQLDDEYRLYSPLVKPDQNIQFWLEQFPQAWAETAGMGLAKQVPPQVIQLKASATPVSVRQYPLSKEAQEGIRPHVQRLIQQGILVPVQSPWNTPLLPVRKPGTNDYRPVQDLREVNKRVQDIHPTVPNPYNLLCALPPQRSWYTVLDLKDAFFCLRLHPTSQPLFAFEWRDPGTGRTGQLTWTRLPQGFKNSPTIFNEALHRDLANFRIQHPQVTLLQYVDDLLLAGATKQDCLEGTKALLLELSDLGYRASAKKAQICRREVTYLGYSLRDGQRWLTEARKKTVVQIPAPTTAKQVREFLGTAGFCRLWIPGFATLAAPLYPLTKPKGEFSWAPEHQKAFDAIKKALLSAPALALPDVTKPFTLYVDERKGVARGVLTQTLGPWRRPVAYLSKKLDPVASGWPVCLKAIAAVAILVKDADKLTLGQNITVIAPHALENIVRQPPDRWMTNARMTHYQSLLLTERVTFAPPAALNPATLLPEETDEPVTHDCHQLLIEETGVRKDLTDIPLTGEVLTWFTDGSSYVVEGKRMAGAAVVDGTRTIWASSLPEGTSAQKAELMALTQALRLAEGKSINIYTDSRYAFATAHVHGAIYKQRGWLTSAGREIKNKEEILSLLEALHLPKRLAIIHCPGHQKAKDPISRGNQMADRVAKQAAQGVNLLAGKRTADGSEFEKRTADGSEFESPKKKAKVE

SEQ ID NO: 349 - protein, 2090 aa, synthetic construct; identical to SEQ ID NO: 136

SEQ ID NO: 350 - protein, 2090 aa, synthetic construct; identical to SEQ ID NO: 115

SEQ ID NO: 351 - protein, 2099 aa, synthetic construct; identical to SEQ ID NO: 137

SEQ ID NO: 352 - protein, 2090 aa, synthetic construct
MPAAKRVKLDGGDKKYSIGLDIGTNSVGWAVITDEYKVPSKKFKVLGNTDRHSIKKNLIGALLFDSGETAEATRLKRTARRRYTRRKNRICYLQEIFSNEMAKVDDSFFHRLEESFLVEEDKKHERHPIFGNIVDEVAYHEKYPTIYHLRKKLVDSTDKADLRLIYLALAHMIKFRGHFLIEGDLNPDNSDVDKLFIQLVQTYNQLFEENPINASGVDAKAILSARLSKSRRLENLIAQLPGEKKNGLFGNLIALSLGLTPNFKSNFDLAEDAKLQLSKDTYDDDLDNLLAQIGDQYADLFLAAKNLSDAILLSDILRVNTEITKAPLSASMIKRYDEHHQDLTLLKALVRQQLPEKYKEIFFDQSKNGYAGYIDGGASQEEFYKFIKPILEKMDGTEELLVKLNREDLLRKQRTFDNGSIPHQIHLGELHAILRRQEDFYPFLKDNREKIEKILTFRIPYYVGPLARGNSRFAWMTRKSEETITPWNFEEVVDKGASAQSFIERMTNFDKNLPNEKVLPKHSLLYEYFTVYNELTKVKYVTEGMRKPAFLSGEQKKAIVDLLFKTNRKVTVKQLKEDYFKKIECFDSVEISGVEDRFNASLGTYHDLLKIIKDKDFLDNEENEDILEDIVLTLTLFEDREMIEERLKTYAHLFDDKVMKQLKRRRYTGWGRLSRKLINGIRDKQSGKTILDFLKSDGFANRNFMQLIHDDSLTFKEDIQKAQVSGQGDSLHEHIANLAGSPAIKKGILQTVKVVDELVKVMGRHKPENIVIEMARENQTTQKGQKNSRERMKRIEEGIKELGSQILKEHPVENTQLQNEKLYLYYLQNGRDMYVDQELDINRLSDYDVDHIVPQSFLKDDSIDNKVLTRSDKARGKSDNVPSEEVVKKMKNYWRQLLNAKLITQRKFDNLTKAERGGLSELDKAGFIKRQLVETRQITKHVAQILDSRMNTKYDENDKLIREVKVITLKSKLVSDFRKDFQFYKVREINNYHHAHDAYLNAVVGTALIKKYPKLESEFVYGDYKVYDVRKMIAKSEQEIGKATAKYFFYSNIMNFFKTEITLANGEIRKRPLIETNGETGEIVWDKGRDFATVRKVLSMPQVNIVKKTEVQTGGFSKESILPKRNSDKLIARKKDWDPKKYGGFDSPTVAYSVLVVAKVEKGKSKKLKSVKELLGITIMERSSFEKNPIDFLEAKGYKEVKKDLIIKLPKYSLFELENGRKRMLASAGELQKGNELALPSKYVNFLYLASHYEKLKGSPEDNEQKQLFVEQHKHYLDEIIEQISEFSKRVILADANLDKVLSAYNKHRDKPIREQAENIIHLFTLTNLGAPAAFKYFDTTIDRKRYTSTKEVLDATLIHQSITGLYETRIDLSQLGGDGGGGSEAAAKGGGGGTLQLDDEYRLYSPLVKPDQNIQFWLEQFPQAWAETAGMGLAKQVPPQVIQLKASATPVSVRQYPLSKEAQEGIRPHVQRLIQQGILVPVQSPWNTPLLPVRKPGTNDYRPVQDLREVNKRVQDIHPTVPNPYNLLCALPPQRSWYTVLDLKDAFFCLRLHPTSQPLFAFEWRDPGTGRTGQLTWTRLPQGFKNSPTIFNEALHRDLANFRIQHPQVTLLQYVDDLLLAGATKQDCLEGTKALLLELSDLGYRASAKKAQICRREVTYLGYSLRDGQRWLTEARKKTVVQIPAPTTAKQVREFLGTAGFCRLWIPGFATLAAPLYPLTKPKGEFSWAPEHQKAFDAIKKALLSAPALALPDVTKPFTLYVDERKGVARGVLTQTLGPWRRPVAYLSKKLDPVASGWPVCLKAIAAVAILVKDADKLTLGQNITVIAPHALENIVRQPPDRWMTNARMTHYQSLLLTERVTFAPPAALNPATLLPEETDEPVTHDCHQLLIEETGVRKDLTDIPLTGEVLTWFTDGSSYVVEGKRMAGAAVVDGTRTIWASSLPEGTSAQKAELMALTQALRLAEGKSINIYTDSRYAFATAHVHGAIYKQRGWLTSAGREIKNKEEILSLLEALHLPKRLAIIHCPGHQKAKDPISRGNQMADRVAKQAAQGVNLLAGKRTADGSEFEKRTADGSEFESPKKKAKVE

SEQ ID NO: 353 - protein, 2085 aa, synthetic construct; identical to SEQ ID NO: 183

SEQ ID NO: 354 - protein, 2090 aa, synthetic construct
MPAAKRVKLDGGDKKYSIGLDIGTNSVGWAVITDEYKVPSKKFKVLGNTDRHSIKKNLIGALLFDSGETAEATRLKRTARRRYTRRKNRICYLQEIFSNEMAKVDDSFFHRLEESFLVEEDKKHERHPIFGNIVDEVAYHEKYPTIYHLRKKLVDSTDKADLRLIYLALAHMIKFRGHFLIEGDLNPDNSDVDKLFIQLVQTYNQLFEENPINASGVDAKAILSARLSKSRRLENLIAQLPGEKKNGLFGNLIALSLGLTPNFKSNFDLAEDAKLQLSKDTYDDDLDNLLAQIGDQYADLFLAAKNLSDAILLSDILRVNTEITKAPLSASMIKRYDEHHQDLTLLKALVRQQLPEKYKEIFFDQSKNGYAGYIDGGASQEEFYKFIKPILEKMDGTEELLVKLNREDLLRKQRTFDNGSIPHQIHLGELHAILRRQEDFYPFLKDNREKIEKILTFRIPYYVGPLARGNSRFAWMTRKSEETITPWNFEEVVDKGASAQSFIERMTNFDKNLPNEKVLPKHSLLYEYFTVYNELTKVKYVTEGMRKPAFLSGEQKKAIVDLLFKTNRKVTVKQLKEDYFKKIECFDSVEISGVEDRFNASLGTYHDLLKIIKDKDFLDNEENEDILEDIVLTLTLFEDREMIEERLKTYAHLFDDKVMKQLKRRRYTGWGRLSRKLINGIRDKQSGKTILDFLKSDGFANRNFMQLIHDDSLTFKEDIQKAQVSGQGDSLHEHIANLAGSPAIKKGILQTVKVVDELVKVMGRHKPENIVIEMARENQTTQKGQKNSRERMKRIEEGIKELGSQILKEHPVENTQLQNEKLYLYYLQNGRDMYVDQELDINRLSDYDVDHIVPQSFLKDDSIDNKVLTRSDKARGKSDNVPSEEVVKKMKNYWRQLLNAKLITQRKFDNLTKAERGGLSELDKAGFIKRQLVETRQITKHVAQILDSRMNTKYDENDKLIREVKVITLKSKLVSDFRKDFQFYKVREINNYHHAHDAYLNAVVGTALIKKYPKLESEFVYGDYKVYDVRKMIAKSEQEIGKATAKYFFYSNIMNFFKTEITLANGEIRKRPLIETNGETGEIVWDKGRDFATVRKVLSMPQVNIVKKTEVQTGGFSKESILPKRNSDKLIARKKDWDPKKYGGFDSPTVAYSVLVVAKVEKGKSKKLKSVKELLGITIMERSSFEKNPIDFLEAKGYKEVKKDLIIKLPKYSLFELENGRKRMLASAGELQKGNELALPSKYVNFLYLASHYEKLKGSPEDNEQKQLFVEQHKHYLDEIIEQISEFSKRVILADANLDKVLSAYNKHRDKPIREQAENIIHLFTLTNLGAPAAFKYFDTTIDRKRYTSTKEVLDATLIHQSITGLYETRIDLSQLGGDGGEAAAKGGGGGSGGTLQLDDEYRLYSPLVKPDQNIQFWLEQFPQAWAETAGMGLAKQVPPQVIQLKASATPVSVRQYPLSKEAQEGIRPHVQRLIQQGILVPVQSPWNTPLLPVRKPGTNDYRPVQDLREVNKRVQDIHPTVPNPYNLLCALPPQRSWYTVLDLKDAFFCLRLHPTSQPLFAFEWRDPGTGRTGQLTWTRLPQGFKNSPTIFNEALHRDLANFRIQHPQVTLLQYVDDLLLAGATKQDCLEGTKALLLELSDLGYRASAKKAQICRREVTYLGYSLRDGQRWLTEARKKTVVQIPAPTTAKQVREFLGTAGFCRLWIPGFATLAAPLYPLTKPKGEFSWAPEHQKAFDAIKKALLSAPALALPDVTKPFTLYVDERKGVARGVLTQTLGPWRRPVAYLSKKLDPVASGWPVCLKAIAAVAILVKDADKLTLGQNITVIAPHALENIVRQPPDRWMTNARMTHYQSLLLTERVTFAPPAALNPATLLPEETDEPVTHDCHQLLIEETGVRKDLTDIPLTGEVLTWFTDGSSYVVEGKRMAGAAVVDGTRTIWASSLPEGTSAQKAELMALTQALRLAEGKSINIYTDSRYAFATAHVHGAIYKQRGWLTSAGREIKNKEEILSLLEALHLPKRLAIIHCPGHQKAKDPISRGNQMADRVAKQAAQGVNLLAGKRTADGSEFEKRTADGSEFESPKKKAKVE

SEQ ID NO: 355 - protein, 2099 aa, synthetic construct
MPAAKRVKLDGGDKKYSIGLDIGTNSVGWAVITDEYKVPSKKFKVLGNTDRHSIKKNLIGALLFDSGETAEATRLKRTARRRYTRRKNRICYLQEIFSNEMAKVDDSFFHRLEESFLVEEDKKHERHPIFGNIVDEVAYHEKYPTIYHLRKKLVDSTDKADLRLIYLALAHMIKFRGHFLIEGDLNPDNSDVDKLFIQLVQTYNQLFEENPINASGVDAKAILSARLSKSRRLENLIAQLPGEKKNGLFGNLIALSLGLTPNFKSNFDLAEDAKLQLSKDTYDDDLDNLLAQIGDQYADLFLAAKNLSDAILLSDILRVNTEITKAPLSASMIKRYDEHHQDLTLLKALVRQQLPEKYKEIFFDQSKNGYAGYIDGGASQEEFYKFIKPILEKMDGTEELLVKLNREDLLRKQRTFDNGSIPHQIHLGELHAILRRQEDFYPFLKDNREKIEKILTFRIPYYVGPLARGNSRFAWMTRKSEETITPWNFEEVVDKGASAQSFIERMTNFDKNLPNEKVLPKHSLLYEYFTVYNELTKVKYVTEGMRKPAFLSGEQKKAIVDLLFKTNRKVTVKQLKEDYFKKIECFDSVEISGVEDRFNASLGTYHDLLKIIKDKDFLDNEENEDILEDIVLTLTLFEDREMIEERLKTYAHLFDDKVMKQLKRRRYTGWGRLSRKLINGIRDKQSGKTILDFLKSDGFANRNFMQLIHDDSLTFKEDIQKAQVSGQGDSLHEHIANLAGSPAIKKGILQTVKVVDELVKVMGRHKPENIVIEMARENQTTQKGQKNSRERMKRIEEGIKELGSQILKEHPVENTQLQNEKLYLYYLQNGRDMYVDQELDINRLSDYDVDHIVPQSFLKDDSIDNKVLTRSDKARGKSDNVPSEEVVKKMKNYWRQLLNAKLITQRKFDNLTKAERGGLSELDKAGFIKRQLVETRQITKHVAQILDSRMNTKYDENDKLIREVKVITLKSKLVSDFRKDFQFYKVREINNYHHAHDAYLNAVVGTALIKKYPKLESEFVYGDYKVYDVRKMIAKSEQEIGKATAKYFFYSNIMNFFKTEITLANGEIRKRPLIETNGETGEIVWDKGRDFATVRKVLSMPQVNIVKKTEVQTGGFSKESILPKRNSDKLIARKKDWDPKKYGGFDSPTVAYSVLVVAKVEKGKSKKLKSVKELLGITIMERSSFEKNPIDFLEAKGYKEVKKDLIIKLPKYSLFELENGRKRMLASAGELQKGNELALPSKYVNFLYLASHYEKLKGSPEDNEQKQLFVEQHKHYLDEIIEQISEFSKRVILADANLDKVLSAYNKHRDKPIREQAENIIHLFTLTNLGAPAAFKYFDTTIDRKRYTSTKEVLDATLIHQSITGLYETRIDLSQLGGDGGGGGGSGGGGSGGGGSGGGGSGGTLQLDDEYRLYSPLVKPDQNIQFWLEQFPQAWAETAGMGLAKQVPPQVIQLKASATPVSVRQYPLSKEAQEGIRPHVQRLIQQGILVPVQSPWNTPLLPVRKPGTNDYRPVQDLREVNKRVQDIHPTVPNPYNLLCALPPQRSWYTVLDLKDAFFCLRLHPTSQPLFAFEWRDPGTGRTGQLTWTRLPQGFKNSPTIFNEALHRDLANFRIQHPQVTLLQYVDDLLLAGATKQDCLEGTKALLLELSDLGYRASAKKAQICRREVTYLGYSLRDGQRWLTEARKKTVVQIPAPTTAKQVREFLGTAGFCRLWIPGFATLAAPLYPLTKPKGEFSWAPEHQKAFDAIKKALLSAPALALPDVTKPFTLYVDERKGVARGVLTQTLGPWRRPVAYLSKKLDPVASGWPVCLKAIAAVAILVKDADKLTLGQNITVIAPHALENIVRQPPDRWMTNARMTHYQSLLLTERVTFAPPAALNPATLLPEETDEPVTHDCHQLLIEETGVRKDLTDIPLTGEVLTWFTDGSSYVVEGKRMAGAAVVDGTRTIWASSLPEGTSAQKAELMALTQALRLAEGKSINIYTDSRYAFATAHVHGAIYKQRGWLTSAGREIKNKEEILSLLEALHLPKRLAIIHCPGHQKAKDPISRGNQMADRVAKQAAQGVNLLAGKRTADGSEFEKRTADGSEFESPKKKAKVE

SEQ ID NO: 356 - protein, 2085 aa, synthetic construct; identical to SEQ ID NO: 125

SEQ ID NO: 357 - protein, 2091 aa, synthetic construct
MPAAKRVKLDGGDKKYSIGLDIGTNSVGWAVITDEYKVPSKKFKVLGNTDRHSIKKNLIGALLFDSGETAEATRLKRTARRRYTRRKNRICYLQEIFSNEMAKVDDSFFHRLEESFLVEEDKKHERHPIFGNIVDEVAYHEKYPTIYHLRKKLVDSTDKADLRLIYLALAHMIKFRGHFLIEGDLNPDNSDVDKLFIQLVQTYNQLFEENPINASGVDAKAILSARLSKSRRLENLIAQLPGEKKNGLFGNLIALSLGLTPNFKSNFDLAEDAKLQLSKDTYDDDLDNLLAQIGDQYADLFLAAKNLSDAILLSDILRVNTEITKAPLSASMIKRYDEHHQDLTLLKALVRQQLPEKYKEIFFDQSKNGYAGYIDGGASQEEFYKFIKPILEKMDGTEELLVKLNREDLLRKQRTFDNGSIPHQIHLGELHAILRRQEDFYPFLKDNREKIEKILTFRIPYYVGPLARGNSRFAWMTRKSEETITPWNFEEVVDKGASAQSFIERMTNFDKNLPNEKVLPKHSLLYEYFTVYNELTKVKYVTEGMRKPAFLSGEQKKAIVDLLFKTNRKVTVKQLKEDYFKKIECFDSVEISGVEDRFNASLGTYHDLLKIIKDKDFLDNEENEDILEDIVLTLTLFEDREMIEERLKTYAHLFDDKVMKQLKRRRYTGWGRLSRKLINGIRDKQSGKTILDFLKSDGFANRNFMQLIHDDSLTFKEDIQKAQVSGQGDSLHEHIANLAGSPAIKKGILQTVKVVDELVKVMGRHKPENIVIEMARENQTTQKGQKNSRERMKRIEEGIKELGSQILKEHPVENTQLQNEKLYLYYLQNGRDMYVDQELDINRLSDYDVDHIVPQSFLKDDSIDNKVLTRSDKARGKSDNVPSEEVVKKMKNYWRQLLNAKLITQRKFDNLTKAERGGLSELDKAGFIKRQLVETRQITKHVAQILDSRMNTKYDENDKLIREVKVITLKSKLVSDFRKDFQFYKVREINNYHHAHDAYLNAVVGTALIKKYPKLESEFVYGDYKVYDVRKMIAKSEQEIGKATAKYFFYSNIMNFFKTEITLANGEIRKRPLIETNGETGEIVWDKGRDFATVRKVLSMPQVNIVKKTEVQTGGFSKESILPKRNSDKLIARKKDWDPKKYGGFDSPTVAYSVLVVAKVEKGKSKKLKSVKELLGITIMERSSFEKNPIDFLEAKGYKEVKKDLIIKLPKYSLFELENGRKRMLASAGELQKGNELALPSKYVNFLYLASHYEKLKGSPEDNEQKQLFVEQHKHYLDEIIEQISEFSKRVILADANLDKVLSAYNKHRDKPIREQAENIIHLFTLTNLGAPAAFKYFDTTIDRKRYTSTKEVLDATLIHQSITGLYETRIDLSQLGGDGGGSSGSSGSSGSSGGTLQLDDEYRLYSPLVKPDQNIQFWLEQFPQAWAETAGMGLAKQVPPQVIQLKASATPVSVRQYPLSKEAQEGIRPHVQRLIQQGILVPVQSPWNTPLLPVRKPGTNDYRPVQDLREVNKRVQDIHPTVPNPYNLLCALPPQRSWYTVLDLKDAFFCLRLHPTSQPLFAFEWRDPGTGRTGQLTWTRLPQGFKNSPTIFNEALHRDLANFRIQHPQVTLLQYVDDLLLAGATKQDCLEGTKALLLELSDLGYRASAKKAQICRREVTYLGYSLRDGQRWLTEARKKTVVQIPAPTTAKQVREFLGTAGFCRLWIPGFATLAAPLYPLTKPKGEFSWAPEHQKAFDAIKKALLSAPALALPDVTKPFTLYVDERKGVARGVLTQTLGPWRRPVAYLSKKLDPVASGWPVCLKAIAAVAILVKDADKLTLGQNITVIAPHALENIVRQPPDRWMTNARMTHYQSLLLTERVTFAPPAALNPATLLPEETDEPVTHDCHQLLIEETGVRKDLTDIPLTGEVLTWFTDGSSYVVEGKRMAGAAVVDGTRTIWASSLPEGTSAQKAELMALTQALRLAEGKSINIYTDSRYAFATAHVHGAIYKQRGWLTSAGREIKNKEEILSLLEALHLPKRLAIIHCPGHQKAKDPISRGNQMADRVAKQAAQGVNLLAGKRTADGSEFEKRTADGSEFESPKKKAKVE

SEQ ID NO: 358 - protein, 2090 aa, synthetic construct
MPAAKRVKLDGGDKKYSIGLDIGTNSVGWAVITDEYKVPSKKFKVLGNTDRHSIKKNLIGALLFDSGETAEATRLKRTARRRYTRRKNRICYLQEIFSNEMAKVDDSFFHRLEESFLVEEDKKHERHPIFGNIVDEVAYHEKYPTIYHLRKKLVDSTDKADLRLIYLALAHMIKFRGHFLIEGDLNPDNSDVDKLFIQLVQTYNQLFEENPINASGVDAKAILSARLSKSRRLENLIAQLPGEKKNGLFGNLIALSLGLTPNFKSNFDLAEDAKLQLSKDTYDDDLDNLLAQIGDQYADLFLAAKNLSDAILLSDILRVNTEITKAPLSASMIKRYDEHHQDLTLLKALVRQQLPEKYKEIFFDQSKNGYAGYIDGGASQEEFYKFIKPILEKMDGTEELLVKLNREDLLRKQRTFDNGSIPHQIHLGELHAILRRQEDFYPFLKDNREKIEKILTFRIPYYVGPLARGNSRFAWMTRKSEETITPWNFEEVVDKGASAQSFIERMTNFDKNLPNEKVLPKHSLLYEYFTVYNELTKVKYVTEGMRKPAFLSGEQKKAIVDLLFKTNRKVTVKQLKEDYFKKIECFDSVEISGVEDRFNASLGTYHDLLKIIKDKDFLDNEENEDILEDIVLTLTLFEDREMIEERLKTYAHLFDDKVMKQLKRRRYTGWGRLSRKLINGIRDKQSGKTILDFLKSDGFANRNFMQLIHDDSLTFKEDIQKAQVSGQGDSLHEHIANLAGSPAIKKGILQTVKVVDELVKVMGRHKPENIVIEMARENQTTQKGQKNSRERMKRIEEGIKELGSQILKEHPVENTQLQNEKLYLYYLQNGRDMYVDQELDINRLSDYDVDHIVPQSFLKDDSIDNKVLTRSDKARGKSDNVPSEEVVKKMKNYWRQLLNAKLITQRKFDNLTKAERGGLSELDKAGFIKRQLVETRQITKHVAQILDSRMNTKYDENDKLIREVKVITLKSKLVSDFRKDFQFYKVREINNYHHAHDAYLNAVVGTALIKKYPKLESEFVYGDYKVYDVRKMIAKSEQEIGKATAKYFFYSNIMNFFKTEITLANGEIRKRPLIETNGETGEIVWDKGRDFATVRKVLSMPQVNIVKKTEVQTGGFSKESILPKRNSDKLIARKKDWDPKKYGGFDSPTVAYSVLVVAKVEKGKSKKLKSVKELLGITIMERSSFEKNPIDFLEAKGYKEVKKDLIIKLPKYSLFELENGRKRMLASAGELQKGNELALPSKYVNFLYLASHYEKLKGSPEDNEQKQLFVEQHKHYLDEIIEQISEFSKRVILADANLDKVLSAYNKHRDKPIREQAENIIHLFTLTNLGAPAAFKYFDTTIDRKRYTSTKEVLDATLIHQSITGLYETRIDLSQLGGDGGEAAAKPAPGGGGGTLQLDDEYRLYSPLVKPDQNIQFWLEQFPQAWAETAGMGLAKQVPPQVIQLKASATPVSVRQYPLSKEAQEGIRPHVQRLIQQGILVPVQSPWNTPLLPVRKPGTNDYRPVQDLREVNKRVQDIHPTVPNPYNLLCALPPQRSWYTVLDLKDAFFCLRLHPTSQPLFAFEWRDPGTGRTGQLTWTRLPQGFKNSPTIFNEALHRDLANFRIQHPQVTLLQYVDDLLLAGATKQDCLEGTKALLLELSDLGYRASAKKAQICRREVTYLGYSLRDGQRWLTEARKKTVVQIPAPTTAKQVREFLGTAGFCRLWIPGFATLAAPLYPLTKPKGEFSWAPEHQKAFDAIKKALLSAPALALPDVTKPFTLYVDERKGVARGVLTQTLGPWRRPVAYLSKKLDPVASGWPVCLKAIAAVAILVKDADKLTLGQNITVIAPHALENIVRQPPDRWMTNARMTHYQSLLLTERVTFAPPAALNPATLLPEETDEPVTHDCHQLLIEETGVRKDLTDIPLTGEVLTWFTDGSSYVVEGKRMAGAAVVDGTRTIWASSLPEGTSAQKAELMALTQALRLAEGKSINIYTDSRYAFATAHVHGAIYKQRGWLTSAGREIKNKEEILSLLEALHLPKRLAIIHCPGHQKAKDPISRGNQMADRVAKQAAQGVNLLAGKRTADGSEFEKRTADGSEFESPKKKAKVE

SEQ ID NO: 359 - protein, 2088 aa, synthetic construct; identical to SEQ ID NO: 175

SEQ ID NO: 360 - protein, 2087 aa, synthetic construct
MPAAKRVKLDGGDKKYSIGLDIGTNSVGWAVITDEYKVPSKKFKVLGNTDRHSIKKNLIGALLFDSGETAEATRLKRTARRRYTRRKNRICYLQEIFSNEMAKVDDSFFHRLEESFLVEEDKKHERHPIFGNIVDEVAYHEKYPTIYHLRKKLVDSTDKADLRLIYLALAHMIKFRGHFLIEGDLNPDNSDVDKLFIQLVQTYNQLFEENPINASGVDAKAILSARLSKSRRLENLIAQLPGEKKNGLFGNLIALSLGLTPNFKSNFDLAEDAKLQLSKDTYDDDLDNLLAQIGDQYADLFLAAKNLSDAILLSDILRVNTEITKAPLSASMIKRYDEHHQDLTLLKALVRQQLPEKYKEIFFDQSKNGYAGYIDGGASQEEFYKFIKPILEKMDGTEELLVKLNREDLLRKQRTFDNGSIPHQIHLGELHAILRRQEDFYPFLKDNREKIEKILTFRIPYYVGPLARGNSRFAWMTRKSEETITPWNFEEVVDKGASAQSFIERMTNFDKNLPNEKVLPKHSLLYEYFTVYNELTKVKYVTEGMRKPAFLSGEQKKAIVDLLFKTNRKVTVKQLKEDYFKKIECFDSVEISGVEDRFNASLGTYHDLLKIIKDKDFLDNEENEDILEDIVLTLTLFEDREMIEERLKTYAHLFDDKVMKQLKRRRYTGWGRLSRKLINGIRDKQSGKTILDFLKSDGFANRNFMQLIHDDSLTFKEDIQKAQVSGQGDSLHEHIANLAGSPAIKKGILQTVKVVDELVKVMGRHKPENIVIEMARENQTTQKGQKNSRERMKRIEEGIKELGSQILKEHPVENTQLQNEKLYLYYLQNGRDMYVDQELDINRLSDYDVDHIVPQSFLKDDSIDNKVLTRSDKARGKSDNVPSEEVVKKMKNYWRQLLNAKLITQRKFDNLTKAERGGLSELDKAGFIKRQLVETRQITKHVAQILDSRMNTKYDENDKLIREVKVITLKSKLVSDFRKDFQFYKVREINNYHHAHDAYLNAVVGTALIKKYPKLESEFVYGDYKVYDVRKMIAKSEQEIGKATAKYFFYSNIMNFFKTEITLANGEIRKRPLIETNGETGEIVWDKGRDFATVRKVLSMPQVNIVKKTEVQTGGFSKESILPKRNSDKLIARKKDWDPKKYGGFDSPTVAYSVLVVAKVEKGKSKKLKSVKELLGITIMERSSFEKNPIDFLEAKGYKEVKKDLIIKLPKYSLFELENGRKRMLASAGELQKGNELALPSKYVNFLYLASHYEKLKGSPEDNEQKQLFVEQHKHYLDEIIEQISEFSKRVILADANLDKVLSAYNKHRDKPIREQAENIIHLFTLTNLGAPAAFKYFDTTIDRKRYTSTKEVLDATLIHQSITGLYETRIDLSQLGGDGGEAAAKGSSGGTLQLDDEYRLYSPLVKPDQNIQFWLEQFPQAWAETAGMGLAKQVPPQVIQLKASATPVSVRQYPLSKEAQEGIRPHVQRLIQQGILVPVQSPWNTPLLPVRKPGTNDYRPVQDLREVNKRVQDIHPTVPNPYNLLCALPPQRSWYTVLDLKDAFFCLRLHPTSQPLFAFEWRDPGTGRTGQLTWTRLPQGFKNSPTIFNEALHRDLANFRIQHPQVTLLQYVDDLLLAGATKQDCLEGTKALLLELSDLGYRASAKKAQICRREVTYLGYSLRDGQRWLTEARKKTVVQIPAPTTAKQVREFLGTAGFCRLWIPGFATLAAPLYPLTKPKGEFSWAPEHQKAFDAIKKALLSAPALALPDVTKPFTLYVDERKGVARGVLTQTLGPWRRPVAYLSKKLDPVASGWPVCLKAIAAVAILVKDADKLTLGQNITVIAPHALENIVRQPPDRWMTNARMTHYQSLLLTERVTFAPPAALNPATLLPEETDEPVTHDCHQLLIEETGVRKDLTDIPLTGEVLTWFTDGSSYVVEGKRMAGAAVVDGTRTIWASSLPEGTSAQKAELMALTQALRLAEGKSINIYTDSRYAFATAHVHGAIYKQRGWLTSAGREIKNKEEILSLLEALHLPKRLAIIHCPGHQKAKDPISRGNQMADRVAKQAAQGVNLLAGKRTADGSEFEKRTADGSEFESPKKKAKVE

SEQ ID NO: 361 - protein, 2090 aa, synthetic construct
MPAAKRVKLDGGDKKYSIGLDIGTNSVGWAVITDEYKVPSKKFKVLGNTDRHSIKKNLIGALLFDSGETAEATRLKRTARRRYTRRKNRICYLQEIFSNEMAKVDDSFFHRLEESFLVEEDKKHERHPIFGNIVDEVAYHEKYPTIYHLRKKLVDSTDKADLRLIYLALAHMIKFRGHFLIEGDLNPDNSDVDKLFIQLVQTYNQLFEENPINASGVDAKAILSARLSKSRRLENLIAQLPGEKKNGLFGNLIALSLGLTPNFKSNFDLAEDAKLQLSKDTYDDDLDNLLAQIGDQYADLFLAAKNLSDAILLSDILRVNTEITKAPLSASMIKRYDEHHQDLTLLKALVRQQLPEKYKEIFFDQSKNGYAGYIDGGASQEEFYKFIKPILEKMDGTEELLVKLNREDLLRKQRTFDNGSIPHQIHLGELHAILRRQEDFYPFLKDNREKIEKILTFRIPYYVGPLARGNSRFAWMTRKSEETITPWNFEEVVDKGASAQSFIERMTNFDKNLPNEKVLPKHSLLYEYFTVYNELTKVKYVTEGMRKPAFLSGEQKKAIVDLLFKTNRKVTVKQLKEDYFKKIECFDSVEISGVEDRFNASLGTYHDLLKIIKDKDFLDNEENEDILEDIVLTLTLFEDREMIEERLKTYAHLFDDKVMKQLKRRRYTGWGRLSRKLINGIRDKQSGKTILDFLKSDGFANRNFMQLIHDDSLTFKEDIQKAQVSGQGDSLHEHIANLAGSPAIKKGILQTVKVVDELVKVMGRHKPENIVIEMARENQTTQKGQKNSRERMKRIEEGIKELGSQILKEHPVENTQLQNEKLYLYYLQNGRDMYVDQELDINRLSDYDVDHIVPQSFLKDDSIDNKVLTRSDKARGKSDNVPSEEVVKKMKNYWRQLLNAKLITQRKFDNLTKAERGGLSELDKAGFIKRQLVETRQITKHVAQILDSRMNTKYDENDKLIREVKVITLKSKLVSDFRKDFQFYKVREINNYHHAHDAYLNAVVGTALIKKYPKLESEFVYGDYKVYDVRKMIAKSEQEIGKATAKYFFYSNIMNFFKTEITLANGEIRKRPLIETNGETGEIVWDKGRDFATVRKVLSMPQVNIVKKTEVQTGGFSKESILPKRNSDKLIARKKDWDPKKYGGFDSPTVAYSVLVVAKVEKGKSKKLKSVKELLGITIMERSSFEKNPIDFLEAKGYKEVKKDLIIKLPKYSLFELENGRKRMLASAGELQKGNELALPSKYVNFLYLASHYEKLKGSPEDNEQKQLFVEQHKHYLDEIIEQISEFSKRVILADANLDKVLSAYNKHRDKPIREQAENIIHLFTLTNLGAPAAFKYFDTTIDRKRYTSTKEVLDATLIHQSITGLYETRIDLSQLGGDGGGSSEAAAKGGSGGTLQLDDEYRLYSPLVKPDQNIQFWLEQFPQAWAETAGMGLAKQVPPQVIQLKASATPVSVRQYPLSKEAQEGIRPHVQRLIQQGILVPVQSPWNTPLLPVRKPGTNDYRPVQDLREVNKRVQDIHPTVPNPYNLLCALPPQRSWYTVLDLKDAFFCLRLHPTSQPLFAFEWRDPGTGRTGQLTWTRLPQGFKNSPTIFNEALHRDLANFRIQHPQVTLLQYVDDLLLAGATKQDCLEGTKALLLELSDLGYRASAKKAQICRREVTYLGYSLRDGQRWLTEARKKTVVQIPAPTTAKQVREFLGTAGFCRLWIPGFATLAAPLYPLTKPKGEFSWAPEHQKAFDAIKKALLSAPALALPDVTKPFTLYVDERKGVARGVLTQTLGPWRRPVAYLSKKLDPVASGWPVCLKAIAAVAILVKDADKLTLGQNITVIAPHALENIVRQPPDRWMTNARMTHYQSLLLTERVTFAPPAALNPATLLPEETDEPVTHDCHQLLIEETGVRKDLTDIPLTGEVLTWFTDGSSYVVEGKRMAGAAVVDGTRTIWASSLPEGTSAQKAELMALTQALRLAEGKSINIYTDSRYAFATAHVHGAIYKQRGWLTSAGREIKNKEEILSLLEALHLPKRLAIIHCPGHQKAKDPISRGNQMADRVAKQAAQGVNLLAGKRTADGSEFEKRTADGSEFESPKKKAKVE

SEQ ID NO: 362 - protein, 2087 aa, synthetic construct; identical to SEQ ID NO: 114

SEQ ID NO: 363 - protein, 2090 aa, synthetic construct; identical to SEQ ID NO: 139

SEQ ID NO: 364 - protein, 2088 aa, synthetic construct; identical to SEQ ID NO: 181

SEQ ID NO: 365 - protein, 2090 aa, synthetic construct; identical to SEQ ID NO: 133

SEQ ID NO: 366 - protein, 2084 aa, synthetic construct; identical to SEQ ID NO: 163

SEQ ID NO: 367 - protein, 2084 aa, synthetic construct; identical to SEQ ID NO: 166

SEQ ID NO: 368 - protein, 2090 aa, synthetic construct; identical to SEQ ID NO: 170

SEQ ID NO: 369 - protein, 2085 aa, synthetic construct; identical to SEQ ID NO: 165

SEQ ID NO: 370 - protein, 2091 aa, synthetic construct; identical to SEQ ID NO: 153

SEQ ID NO: 371 - protein, 2088 aa, synthetic construct
MPAAKRVKLDGGDKKYSIGLDIGTNSVGWAVITDEYKVPSKKFKVLGNTDRHSIKKNLIGALLFDSGETAEATRLKRTARRRYTRRKNRICYLQEIFSNEMAKVDDSFFHRLEESFLVEEDKKHERHPIFGNIVDEVAYHEKYPTIYHLRKKLVDSTDKADLRLIYLALAHMIKFRGHFLIEGDLNPDNSDVDKLFIQLVQTYNQLFEENPINASGVDAKAILSARLSKSRRLENLIAQLPGEKKNGLFGNLIALSLGLTPNFKSNFDLAEDAKLQLSKDTYDDDLDNLLAQIGDQYADLFLAAKNLSDAILLSDILRVNTEITKAPLSASMIKRYDEHHQDLTLLKALVRQQLPEKYKEIFFDQSKNGYAGYIDGGASQEEFYKFIKPILEKMDGTEELLVKLNREDLLRKQRTFDNGSIPHQIHLGELHAILRRQEDFYPFLKDNREKIEKILTFRIPYYVGPLARGNSRFAWMTRKSEETITPWNFEEVVDKGASAQSFIERMTNFDKNLPNEKVLPKHSLLYEYFTVYNELTKVKYVTEGMRKPAFLSGEQKKAIVDLLFKTNRKVTVKQLKEDYFKKIECFDSVEISGVEDRFNASLGTYHDLLKIIKDKDFLDNEENEDILEDIVLTLTLFEDREMIEERLKTYAHLFDDKVMKQLKRRRYTGWGRLSRKLINGIRDKQSGKTILDFLKSDGFANRNFMQLIHDDSLTFKEDIQKAQVSGQGDSLHEHIANLAGSPAIKKGILQTVKVVDELVKVMGRHKPENIVIEMARENQTTQKGQKNSRERMKRIEEGIKELGSQILKEHPVENTQLQNEKLYLYYLQNGRDMYVDQELDINRLSDYDVDHIVPQSFLKDDSIDNKVLTRSDKARGKSDNVPSEEVVKKMKNYWRQLLNAKLITQRKFDNLTKAERGGLSELDKAGFIKRQLVETRQITKHVAQILDSRMNTKYDENDKLIREVKVITLKSKLVSDFRKDFQFYKVREINNYHHAHDAYLNAVVGTALIKKYPKLESEFVYGDYKVYDVRKMIAKSEQEIGKATAKYFFYSNIMNFFKTEITLANGEIRKRPLIETNGETGEIVWDKGRDFATVRKVLSMPQVNIVKKTEVQTGGFSKESILPKRNSDKLIARKKDWDPKKYGGFDSPTVAYSVLVVAKVEKGKSKKLKSVKELLGITIMERSSFEKNPIDFLEAKGYKEVKKDLIIKLPKYSLFELENGRKRMLASAGELQKGNELALPSKYVNFLYLASHYEKLKGSPEDNEQKQLFVEQHKHYLDEIIEQISEFSKRVILADANLDKVLSAYNKHRDKPIREQAENIIHLFTLTNLGAPAAFKYFDTTIDRKRYTSTKEVLDATLIHQSITGLYETRIDLSQLGGDGGPAPGGGGSSGGTLQLDDEYRLYSPLVKPDQNIQFWLEQFPQAWAETAGMGLAKQVPPQVIQLKASATPVSVRQYPLSKEAQEGIRPHVQRLIQQGILVPVQSPWNTPLLPVRKPGTNDYRPVQDLREVNKRVQDIHPTVPNPYNLLCALPPQRSWYTVLDLKDAFFCLRLHPTSQPLFAFEWRDPGTGRTGQLTWTRLPQGFKNSPTIFNEALHRDLANFRIQHPQVTLLQYVDDLLLAGATKQDCLEGTKALLLELSDLGYRASAKKAQICRREVTYLGYSLRDGQRWLTEARKKTVVQIPAPTTAKQVREFLGTAGFCRLWIPGFATLAAPLYPLTKPKGEFSWAPEHQKAFDAIKKALLSAPALALPDVTKPFTLYVDERKGVARGVLTQTLGPWRRPVAYLSKKLDPVASGWPVCLKAIAAVAILVKDADKLTLGQNITVIAPHALENIVRQPPDRWMTNARMTHYQSLLLTERVTFAPPAALNPATLLPEETDEPVTHDCHQLLIEETGVRKDLTDIPLTGEVLTWFTDGSSYVVEGKRMAGAAVVDGTRTIWASSLPEGTSAQKAELMALTQALRLAEGKSINIYTDSRYAFATAHVHGAIYKQRGWLTSAGREIKNKEEILSLLEALHLPKRLAIIHCPGHQKAKDPISRGNQMADRVAKQAAQGVNLLAGKRTADGSEFEKRTADGSEFESPKKKAKVE

SEQ ID NO: 372 - protein, 2090 aa, synthetic construct; identical to SEQ ID NO: 172

SEQ ID NO: 373 - protein, 2088 aa, synthetic construct
MPAAKRVKLDGGDKKYSIGLDIGTNSVGWAVITDEYKVPSKKFKVLGNTDRHSIKKNLIGALLFDSGETAEATRLKRTARRRYTRRKNRICYLQEIFSNEMAKVDDSFFHRLEESFLVEEDKKHERHPIFGNIVDEVAYHEKYPTIYHLRKKLVDSTDKADLRLIYLALAHMIKFRGHFLIEGDLNPDNSDVDKLFIQLVQTYNQLFEENPINASGVDAKAILSARLSKSRRLENLIAQLPGEKKNGLFGNLIALSLGLTPNFKSNFDLAEDAKLQLSKDTYDDDLDNLLAQIGDQYADLFLAAKNLSDAILLSDILRVNTEITKAPLSASMIKRYDEHHQDLTLLKALVRQQLPEKYKEIFFDQSKNGYAGYIDGGASQEEFYKFIKPILEKMDGTEELLVKLNREDLLRKQRTFDNGSIPHQIHLGELHAILRRQEDFYPFLKDNREKIEKILTFRIPYYVGPLARGNSRFAWMTRKSEETITPWNFEEVVDKGASAQSFIERMTNFDKNLPNEKVLPKHSLLYEYFTVYNELTKVKYVTEGMRKPAFLSGEQKKAIVDLLFKTNRKVTVKQLKEDYFKKIECFDSVEISGVEDRFNASLGTYHDLLKIIKDKDFLDNEENEDILEDIVLTLTLFEDREMIEERLKTYAHLFDDKVMKQLKRRRYTGWGRLSRKLINGIRDKQSGKTILDFLKSDGFANRNFMQLIHDDSLTFKEDIQKAQVSGQGDSLHEHIANLAGSPAIKKGILQTVKVVDELVKVMGRHKPENIVIEMARENQTTQKGQKNSRERMKRIEEGIKELGSQILKEHPVENTQLQNEKLYLYYLQNGRDMYVDQELDINRLSDYDVDHIVPQSFLKDDSIDNKVLTRSDKARGKSDNVPSEEVVKKMKNYWRQLLNAKLITQRKFDNLTKAERGGLSELDKAGFIKRQLVETRQITKHVAQILDSRMNTKYDENDKLIREVKVITLKSKLVSDFRKDFQFYKVREINNYHHAHDAYLNAVVGTALIKKYPKLESEFVYGDYKVYDVRKMIAKSEQEIGKATAKYFFYSNIMNFFKTEITLANGEIRKRPLIETNGETGEIVWDKGRDFATVRKVLSMPQVNIVKKTEVQTGGFSKESILPKRNSDKLIARKKDWDPKKYGGFDSPTVAYSVLVVAKVEKGKSKKLKSVKELLGITIMERSSFEKNPIDFLEAKGYKEVKKDLIIKLPKYSLFELENGRKRMLASAGELQKGNELALPSKYVNFLYLASHYEKLKGSPEDNEQKQLFVEQHKHYLDEIIEQISEFSKRVILADANLDKVLSAYNKHRDKPIREQAENIIHLFTLTNLGAPAAFKYFDTTIDRKRYTSTKEVLDATLIHQSITGLYETRIDLSQLGGDGGGGSGGGPAPGGTLQLDDEYRLYSPLVKPDQNIQFWLEQFPQAWAETAGMGLAKQVPPQVIQLKASATPVSVRQYPLSKEAQEGIRPHVQRLIQQGILVPVQSPWNTPLLPVRKPGTNDYRPVQDLREVNKRVQDIHPTVPNPYNLLCALPPQRSWYTVLDLKDAFFCLRLHPTSQPLFAFEWRDPGTGRTGQLTWTRLPQGFKNSPTIFNEALHRDLANFRIQHPQVTLLQYVDDLLLAGATKQDCLEGTKALLLELSDLGYRASAKKAQICRREVTYLGYSLRDGQRWLTEARKKTVVQIPAPTTAKQVREFLGTAGFCRLWIPGFATLAAPLYPLTKPKGEFSWAPEHQKAFDAIKKALLSAPALALPDVTKPFTLYVDERKGVARGVLTQTLGPWRRPVAYLSKKLDPVASGWPVCLKAIAAVAILVKDADKLTLGQNITVIAPHALENIVRQPPDRWMTNARMTHYQSLLLTERVTFAPPAALNPATLLPEETDEPVTHDCHQLLIEETGVRKDLTDIPLTGEVLTWFTDGSSYVVEGKRMAGAAVVDGTRTIWASSLPEGTSAQKAELMALTQALRLAEGKSINIYTDSRYAFATAHVHGAIYKQRGWLTSAGREIKNKEEILSLLEALHLPKRLAIIHCPGHQKAKDPISRGNQMADRVAKQAAQGVNLLAGKRTADGSEFEKRTADGSEFESPKKKAKVE

SEQ ID NO: 374 - protein, 2094 aa, synthetic construct; identical to SEQ ID NO: 118

SEQ ID NO: 375 - protein, 2087 aa, synthetic construct
MPAAKRVKLDGGDKKYSIGLDIGTNSVGWAVITDEYKVPSKKFKVLGNTDRHSIKKNLIGALLFDSGETAEATRLKRTARRRYTRRKNRICYLQEIFSNEMAKVDDSFFHRLEESFLVEEDKKHERHPIFGNIVDEVAYHEKYPTIYHLRKKLVDSTDKADLRLIYLALAHMIKFRGHFLIEGDLNPDNSDVDKLFIQLVQTYNQLFEENPINASGVDAKAILSARLSKSRRLENLIAQLPGEKKNGLFGNLIALSLGLTPNFKSNFDLAEDAKLQLSKDTYDDDLDNLLAQIGDQYADLFLAAKNLSDAILLSDILRVNTEITKAPLSASMIKRYDEHHQDLTLLKALVRQQLPEKYKEIFFDQSKNGYAGYIDGGASQEEFYKFIKPILEKMDGTEELLVKLNREDLLRKQRTFDNGSIPHQIHLGELHAILRRQEDFYPFLKDNREKIEKILTFRIPYYVGPLARGNSRFAWMTRKSEETITPWNFEEVVDKGASAQSFIERMTNFDKNLPNEKVLPKHSLLYEYFTVYNELTKVKYVTEGMRKPAFLSGEQKKAIVDLLFKTNRKVTVKQLKEDYFKKIECFDSVEISGVEDRFNASLGTYHDLLKIIKDKDFLDNEENEDILEDIVLTLTLFEDREMIEERLKTYAHLFDDKVMKQLKRRRYTGWGRLSRKLINGIRDKQSGKTILDFLKSDGFANRNFMQLIHDDSLTFKEDIQKAQVSGQGDSLHEHIANLAGSPAIKKGILQTVKVVDELVKVMGRHKPENIVIEMARENQTTQKGQKNSRERMKRIEEGIKELGSQILKEHPVENTQLQNEKLYLYYLQNGRDMYVDQELDINRLSDYDVDHIVPQSFLKDDSIDNKVLTRSDKARGKSDNVPSEEVVKKMKNYWRQLLNAKLITQRKFDNLTKAERGGLSELDKAGFIKRQLVETRQITKHVAQILDSRMNTKYDENDKLIREVKVITLKSKLVSDFRKDFQFYKVREINNYHHAHDAYLNAVVGTALIKKYPKLESEFVYGDYKVYDVRKMIAKSEQEIGKATAKYFFYSNIMNFFKTEITLANGEIRKRPLIETNGETGEIVWDKGRDFATVRKVLSMPQVNIVKKTEVQTGGFSKESILPKRNSDKLIARKKDWDPKKYGGFDSPTVAYSVLVVAKVEKGKSKKLKSVKELLGITIMERSSFEKNPIDFLEAKGYKEVKKDLIIKLPKYSLFELENGRKRMLASAGELQKGNELALPSKYVNFLYLASHYEKLKGSPEDNEQKQLFVEQHKHYLDEIIEQISEFSKRVILADANLDKVLSAYNKHRDKPIREQAENIIHLFTLTNLGAPAAFKYFDTTIDRKRYTSTKEVLDATLIHQSITGLYETRIDLSQLGGDGGPAPEAAAKGGTLQLDDEYRLYSPLVKPDQNIQFWLEQFPQAWAETAGMGLAKQVPPQVIQLKASATPVSVRQYPLSKEAQEGIRPHVQRLIQQGILVPVQSPWNTPLLPVRKPGTNDYRPVQDLREVNKRVQDIHPTVPNPYNLLCALPPQRSWYTVLDLKDAFFCLRLHPTSQPLFAFEWRDPGTGRTGQLTWTRLPQGFKNSPTIFNEALHRDLANFRIQHPQVTLLQYVDDLLLAGATKQDCLEGTKALLLELSDLGYRASAKKAQICRREVTYLGYSLRDGQRWLTEARKKTVVQIPAPTTAKQVREFLGTAGFCRLWIPGFATLAAPLYPLTKPKGEFSWAPEHQKAFDAIKKALLSAPALALPDVTKPFTLYVDERKGVARGVLTQTLGPWRRPVAYLSKKLDPVASGWPVCLKAIAAVAILVKDADKLTLGQNITVIAPHALENIVRQPPDRWMTNARMTHYQSLLLTERVTFAPPAALNPATLLPEETDEPVTHDCHQLLIEETGVRKDLTDIPLTGEVLTWFTDGSSYVVEGKRMAGAAVVDGTRTIWASSLPEGTSAQKAELMALTQALRLAEGKSINIYTDSRYAFATAHVHGAIYKQRGWLTSAGREIKNKEEILSLLEALHLPKRLAIIHCPGHQKAKDPISRGNQMADRVAKQAAQGVNLLAGKRTADGSEFEKRTADGSEFESPKKKAKVE

SEQ ID NO: 376 - protein, 2090 aa, synthetic construct; identical to SEQ ID NO: 154

SEQ ID NO: 377 - protein, 2091 aa, synthetic construct; identical to SEQ ID NO: 145

SEQ ID NO: 378 - protein, 2089 aa, synthetic construct
MPAAKRVKLDGGDKKYSIGLDIGTNSVGWAVITDEYKVPSKKFKVLGNTDRHSIKKNLIGALLFDSGETAEATRLKRTARRRYTRRKNRICYLQEIFSNEMAKVDDSFFHRLEESFLVEEDKKHERHPIFGNIVDEVAYHEKYPTIYHLRKKLVDSTDKADLRLIYLALAHMIKFRGHFLIEGDLNPDNSDVDKLFIQLVQTYNQLFEENPINASGVDAKAILSARLSKSRRLENLIAQLPGEKKNGLFGNLIALSLGLTPNFKSNFDLAEDAKLQLSKDTYDDDLDNLLAQIGDQYADLFLAAKNLSDAILLSDILRVNTEITKAPLSASMIKRYDEHHQDLTLLKALVRQQLPEKYKEIFFDQSKNGYAGYIDGGASQEEFYKFIKPILEKMDGTEELLVKLNREDLLRKQRTFDNGSIPHQIHLGELHAILRRQEDFYPFLKDNREKIEKILTFRIPYYVGPLARGNSRFAWMTRKSEETITPWNFEEVVDKGASAQSFIERMTNFDKNLPNEKVLPKHSLLYEYFTVYNELTKVKYVTEGMRKPAFLSGEQKKAIVDLLFKTNRKVTVKQLKEDYFKKIECFDSVEISGVEDRFNASLGTYHDLLKIIKDKDFLDNEENEDILEDIVLTLTLFEDREMIEERLKTYAHLFDDKVMKQLKRRRYTGWGRLSRKLINGIRDKQSGKTILDFLKSDGFANRNFMQLIHDDSLTFKEDIQKAQVSGQGDSLHEHIANLAGSPAIKKGILQTVKVVDELVKVMGRHKPENIVIEMARENQTTQKGQKNSRERMKRIEEGIKELGSQILKEHPVENTQLQNEKLYLYYLQNGRDMYVDQELDINRLSDYDVDHIVPQSFLKDDSIDNKVLTRSDKARGKSDNVPSEEVVKKMKNYWRQLLNAKLITQRKFDNLTKAERGGLSELDKAGFIKRQLVETRQITKHVAQILDSRMNTKYDENDKLIREVKVITLKSKLVSDFRKDFQFYKVREINNYHHAHDAYLNAVVGTALIKKYPKLESEFVYGDYKVYDVRKMIAKSEQEIGKATAKYFFYSNIMNFFKTEITLANGEIRKRPLIETNGETGEIVWDKGRDFATVRKVLSMPQVNIVKKTEVQTGGFSKESILPKRNSDKLIARKKDWDPKKYGGFDSPTVAYSVLVVAKVEKGKSKKLKSVKELLGITIMERSSFEKNPIDFLEAKGYKEVKKDLIIKLPKYSLFELENGRKRMLASAGELQKGNELALPSKYVNFLYLASHYEKLKGSPEDNEQKQLFVEQHKHYLDEIIEQISEFSKRVILADANLDKVLSAYNKHRDKPIREQAENIIHLFTLTNLGAPAAFKYFDTTIDRKRYTSTKEVLDATLIHQSITGLYETRIDLSQLGGDGGGGGGSGGGGSGGTLQLDDEYRLYSPLVKPDQNIQFWLEQFPQAWAETAGMGLAKQVPPQVIQLKASATPVSVRQYPLSKEAQEGIRPHVQRLIQQGILVPVQSPWNTPLLPVRKPGTNDYRPVQDLREVNKRVQDIHPTVPNPYNLLCALPPQRSWYTVLDLKDAFFCLRLHPTSQPLFAFEWRDPGTGRTGQLTWTRLPQGFKNSPTIFNEALHRDLANFRIQHPQVTLLQYVDDLLLAGATKQDCLEGTKALLLELSDLGYRASAKKAQICRREVTYLGYSLRDGQRWLTEARKKTVVQIPAPTTAKQVREFLGTAGFCRLWIPGFATLAAPLYPLTKPKGEFSWAPEHQKAFDAIKKALLSAPALALPDVTKPFTLYVDERKGVARGVLTQTLGPWRRPVAYLSKKLDPVASGWPVCLKAIAAVAILVKDADKLTLGQNITVIAPHALENIVRQPPDRWMTNARMTHYQSLLLTERVTFAPPAALNPATLLPEETDEPVTHDCHQLLIEETGVRKDLTDIPLTGEVLTWFTDGSSYVVEGKRMAGAAVVDGTRTIWASSLPEGTSAQKAELMALTQALRLAEGKSINIYTDSRYAFATAHVHGAIYKQRGWLTSAGREIKNKEEILSLLEALHLPKRLAIIHCPGHQKAKDPISRGNQMADRVAKQAAQGVNLLAGKRTADGSEFEKRTADGSEFESPKKKAKVE

SEQ ID NO: 379 - protein, 2088 aa, synthetic construct
MPAAKRVKLDGGDKKYSIGLDIGTNSVGWAVITDEYKVPSKKFKVLGNTDRHSIKKNLIGALLFDSGETAEATRLKRTARRRYTRRKNRICYLQEIFSNEMAKVDDSFFHRLEESFLVEEDKKHERHPIFGNIVDEVAYHEKYPTIYHLRKKLVDSTDKADLRLIYLALAHMIKFRGHFLIEGDLNPDNSDVDKLFIQLVQTYNQLFEENPINASGVDAKAILSARLSKSRRLENLIAQLPGEKKNGLFGNLIALSLGLTPNFKSNFDLAEDAKLQLSKDTYDDDLDNLLAQIGDQYADLFLAAKNLSDAILLSDILRVNTEITKAPLSASMIKRYDEHHQDLTLLKALVRQQLPEKYKEIFFDQSKNGYAGYIDGGASQEEFYKFIKPILEKMDGTEELLVKLNREDLLRKQRTFDNGSIPHQIHLGELHAILRRQEDFYPFLKDNREKIEKILTFRIPYYVGPLARGNSRFAWMTRKSEETITPWNFEEVVDKGASAQSFIERMTNFDKNLPNEKVLPKHSLLYEYFTVYNELTKVKYVTEGMRKPAFLSGEQKKAIVDLLFKTNRKVTVKQLKEDYFKKIECFDSVEISGVEDRFNASLGTYHDLLKIIKDKDFLDNEENEDILEDIVLTLTLFEDREMIEERLKTYAHLFDDKVMKQLKRRRYTGWGRLSRKLINGIRDKQSGKTILDFLKSDGFANRNFMQLIHDDSLTFKEDIQKAQVSGQGDSLHEHIANLAGSPAIKKGILQTVKVVDELVKVMGRHKPENIVIEMARENQTTQKGQKNSRERMKRIEEGIKELGSQILKEHPVENTQLQNEKLYLYYLQNGRDMYVDQELDINRLSDYDVDHIVPQSFLKDDSIDNKVLTRSDKARGKSDNVPSEEVVKKMKNYWRQLLNAKLITQRKFDNLTKAERGGLSELDKAGFIKRQLVETRQITKHVAQILDSRMNTKYDENDKLIREVKVITLKSKLVSDFRKDFQFYKVREINNYHHAHDAYLNAVVGTALIKKYPKLESEFVYGDYKVYDVRKMIAKSEQEIGKATAKYFFYSNIMNFFKTEITLANGEIRKRPLIETNGETGEIVWDKGRDFATVRKVLSMPQVNIVKKTEVQTGGFSKESILPKRNSDKLIARKKDWDPKKYGGFDSPTVAYSVLVVAKVEKGKSKKLKSVKELLGITIMERSSFEKNPIDFLEAKGYKEVKKDLIIKLPKYSLFELENGRKRMLASAGELQKGNELALPSKYVNFLYLASHYEKLKGSPEDNEQKQLFVEQHKHYLDEIIEQISEFSKRVILADANLDKVLSAYNKHRDKPIREQAENIIHLFTLTNLGAPAAFKYFDTTIDRKRYTSTKEVLDATLIHQSITGLYETRIDLSQLGGDGGGSSPAPGGGGGTLQLDDEYRLYSPLVKPDQNIQFWLEQFPQAWAETAGMGLAKQVPPQVIQLKASATPVSVRQYPLSKEAQEGIRPHVQRLIQQGILVPVQSPWNTPLLPVRKPGTNDYRPVQDLREVNKRVQDIHPTVPNPYNLLCALPPQRSWYTVLDLKDAFFCLRLHPTSQPLFAFEWRDPGTGRTGQLTWTRLPQGFKNSPTIFNEALHRDLANFRIQHPQVTLLQYVDDLLLAGATKQDCLEGTKALLLELSDLGYRASAKKAQICRREVTYLGYSLRDGQRWLTEARKKTVVQIPAPTTAKQVREFLGTAGFCRLWIPGFATLAAPLYPLTKPKGEFSWAPEHQKAFDAIKKALLSAPALALPDVTKPFTLYVDERKGVARGVLTQTLGPWRRPVAYLSKKLDPVASGWPVCLKAIAAVAILVKDADKLTLGQNITVIAPHALENIVRQPPDRWMTNARMTHYQSLLLTERVTFAPPAALNPATLLPEETDEPVTHDCHQLLIEETGVRKDLTDIPLTGEVLTWFTDGSSYVVEGKRMAGAAVVDGTRTIWASSLPEGTSAQKAELMALTQALRLAEGKSINIYTDSRYAFATAHVHGAIYKQRGWLTSAGREIKNKEEILSLLEALHLPKRLAIIHCPGHQKAKDPISRGNQMADRVAKQAAQGVNLLAGKRTADGSEFEKRTADGSEFESPKKKAKVE

SEQ ID NO: 380 - protein, 2087 aa, synthetic construct; identical to SEQ ID NO: 185

SEQ ID NO: 381 - protein, 2086 aa, synthetic construct; identical to SEQ ID NO: 152

SEQ ID NO: 382 - protein, 2088 aa, synthetic construct
MPAAKRVKLDGGDKKYSIGLDIGTNSVGWAVITDEYKVPSKKFKVLGNTDRHSIKKNLIGALLFDSGETAEATRLKRTARRRYTRRKNRICYLQEIFSNEMAKVDDSFFHRLEESFLVEEDKKHERHPIFGNIVDEVAYHEKYPTIYHLRKKLVDSTDKADLRLIYLALAHMIKFRGHFLIEGDLNPDNSDVDKLFIQLVQTYNQLFEENPINASGVDAKAILSARLSKSRRLENLIAQLPGEKKNGLFGNLIALSLGLTPNFKSNFDLAEDAKLQLSKDTYDDDLDNLLAQIGDQYADLFLAAKNLSDAILLSDILRVNTEITKAPLSASMIKRYDEHHQDLTLLKALVRQQLPEKYKEIFFDQSKNGYAGYIDGGASQEEFYKFIKPILEKMDGTEELLVKLNREDLLRKQRTFDNGSIPHQIHLGELHAILRRQEDFYPFLKDNREKIEKILTFRIPYYVGPLARGNSRFAWMTRKSEETITPWNFEEVVDKGASAQSFIERMTNFDKNLPNEKVLPKHSLLYEYFTVYNELTKVKYVTEGMRKPAFLSGEQKKAIVDLLFKTNRKVTVKQLKEDYFKKIECFDSVEISGVEDRFNASLGTYHDLLKIIKDKDFLDNEENEDILEDIVLTLTLFEDREMIEERLKTYAHLFDDKVMKQLKRRRYTGWGRLSRKLINGIRDKQSGKTILDFLKSDGFANRNFMQLIHDDSLTFKEDIQKAQVSGQGDSLHEHIANLAGSPAIKKGILQTVKVVDELVKVMGRHKPENIVIEMARENQTTQKGQKNSRERMKRIEEGIKELGSQILKEHPVENTQLQNEKLYLYYLQNGRDMYVDQELDINRLSDYDVDHIVPQSFLKDDSIDNKVLTRSDKARGKSDNVPSEEVVKKMKNYWRQLLNAKLITQRKFDNLTKAERGGLSELDKAGFIKRQLVETRQITKHVAQILDSRMNTKYDENDKLIREVKVITLKSKLVSDFRKDFQFYKVREINNYHHAHDAYLNAVVGTALIKKYPKLESEFVYGDYKVYDVRKMIAKSEQEIGKATAKYFFYSNIMNFFKTEITLANGEIRKRPLIETNGETGEIVWDKGRDFATVRKVLSMPQVNIVKKTEVQTGGFSKESILPKRNSDKLIARKKDWDPKKYGGFDSPTVAYSVLVVAKVEKGKSKKLKSVKELLGITIMERSSFEKNPIDFLEAKGYKEVKKDLIIKLPKYSLFELENGRKRMLASAGELQKGNELALPSKYVNFLYLASHYEKLKGSPEDNEQKQLFVEQHKHYLDEIIEQISEFSKRVILADANLDKVLSAYNKHRDKPIREQAENIIHLFTLTNLGAPAAFKYFDTTIDRKRYTSTKEVLDATLIHQSITGLYETRIDLSQLGGDGGPAPAPAPAPGGTLQLDDEYRLYSPLVKPDQNIQFWLEQFPQAWAETAGMGLAKQVPPQVIQLKASATPVSVRQYPLSKEAQEGIRPHVQRLIQQGILVPVQSPWNTPLLPVRKPGTNDYRPVQDLREVNKRVQDIHPTVPNPYNLLCALPPQRSWYTVLDLKDAFFCLRLHPTSQPLFAFEWRDPGTGRTGQLTWTRLPQGFKNSPTIFNEALHRDLANFRIQHPQVTLLQYVDDLLLAGATKQDCLEGTKALLLELSDLGYRASAKKAQICRREVTYLGYSLRDGQRWLTEARKKTVVQIPAPTTAKQVREFLGTAGFCRLWIPGFATLAAPLYPLTKPKGEFSWAPEHQKAFDAIKKALLSAPALALPDVTKPFTLYVDERKGVARGVLTQTLGPWRRPVAYLSKKLDPVASGWPVCLKAIAAVAILVKDADKLTLGQNITVIAPHALENIVRQPPDRWMTNARMTHYQSLLLTERVTFAPPAALNPATLLPEETDEPVTHDCHQLLIEETGVRKDLTDIPLTGEVLTWFTDGSSYVVEGKRMAGAAVVDGTRTIWASSLPEGTSAQKAELMALTQALRLAEGKSINIYTDSRYAFATAHVHGAIYKQRGWLTSAGREIKNKEEILSLLEALHLPKRLAIIHCPGHQKAKDPISRGNQMADRVAKQAAQGVNLLAGKRTADGSEFEKRTADGSEFESPKKKAKVE

SEQ ID NO: 383 - protein, 2085 aa, synthetic construct; identical to SEQ ID NO: 178

SEQ ID NO: 384 - protein, 2088 aa, synthetic construct; identical to SEQ ID NO: 144

SEQ ID NO: 385 - protein, 2090 aa, synthetic construct
MPAAKRVKLDGGDKKYSIGLDIGTNSVGWAVITDEYKVPSKKFKVLGNTDRHSIKKNLIGALLFDSGETAEATRLKRTARRRYTRRKNRICYLQEIFSNEMAKVDDSFFHRLEESFLVEEDKKHERHPIFGNIVDEVAYHEKYPTIYHLRKKLVDSTDKADLRLIYLALAHMIKFRGHFLIEGDLNPDNSDVDKLFIQLVQTYNQLFEENPINASGVDAKAILSARLSKSRRLENLIAQLPGEKKNGLFGNLIALSLGLTPNFKSNFDLAEDAKLQLSKDTYDDDLDNLLAQIGDQYADLFLAAKNLSDAILLSDILRVNTEITKAPLSASMIKRYDEHHQDLTLLKALVRQQLPEKYKEIFFDQSKNGYAGYIDGGASQEEFYKFIKPILEKMDGTEELLVKLNREDLLRKQRTFDNGSIPHQIHLGELHAILRRQEDFYPFLKDNREKIEKILTFRIPYYVGPLARGNSRFAWMTRKSEETITPWNFEEVVDKGASAQSFIERMTNFDKNLPNEKVLPKHSLLYEYFTVYNELTKVKYVTEGMRKPAFLSGEQKKAIVDLLFKTNRKVTVKQLKEDYFKKIECFDSVEISGVEDRFNASLGTYHDLLKIIKDKDFLDNEENEDILEDIVLTLTLFEDREMIEERLKTYAHLFDDKVMKQLKRRRYTGWGRLSRKLINGIRDKQSGKTILDFLKSDGFANRNFMQLIHDDSLTFKEDIQKAQVSGQGDSLHEHIANLAGSPAIKKGILQTVKVVDELVKVMGRHKPENIVIEMARENQTTQKGQKNSRERMKRIEEGIKELGSQILKEHPVENTQLQNEKLYLYYLQNGRDMYVDQELDINRLSDYDVDHIVPQSFLKDDSIDNKVLTRSDKARGKSDNVPSEEVVKKMKNYWRQLLNAKLITQRKFDNLTKAERGGLSELDKAGFIKRQLVETRQITKHVAQILDSRMNTKYDENDKLIREVKVITLKSKLVSDFRKDFQFYKVREINNYHHAHDAYLNAVVGTALIKKYPKLESEFVYGDYKVYDVRKMIAKSEQEIGKATAKYFFYSNIMNFFKTEITLANGEIRKRPLIETNGETGEIVWDKGRDFATVRKVLSMPQVNIVKKTEVQTGGFSKESILPKRNSDKLIARKKDWDPKKYGGFDSPTVAYSVLVVAKVEKGKSKKLKSVKELLGITIMERSSFEKNPIDFLEAKGYKEVKKDLIIKLPKYSLFELENGRKRMLASAGELQKGNELALPSKYVNFLYLASHYEKLKGSPEDNEQKQLFVEQHKHYLDEIIEQISEFSKRVILADANLDKVLSAYNKHRDKPIREQAENIIHLFTLTNLGAPAAFKYFDTTIDRKRYTSTKEVLDATLIHQSITGLYETRIDLSQLGGDGGPAPGSSEAAAKGGTLQLDDEYRLYSPLVKPDQNIQFWLEQFPQAWAETAGMGLAKQVPPQVIQLKASATPVSVRQYPLSKEAQEGIRPHVQRLIQQGILVPVQSPWNTPLLPVRKPGTNDYRPVQDLREVNKRVQDIHPTVPNPYNLLCALPPQRSWYTVLDLKDAFFCLRLHPTSQPLFAFEWRDPGTGRTGQLTWTRLPQGFKNSPTIFNEALHRDLANFRIQHPQVTLLQYVDDLLLAGATKQDCLEGTKALLLELSDLGYRASAKKAQICRREVTYLGYSLRDGQRWLTEARKKTVVQIPAPTTAKQVREFLGTAGFCRLWIPGFATLAAPLYPLTKPKGEFSWAPEHQKAFDAIKKALLSAPALALPDVTKPFTLYVDERKGVARGVLTQTLGPWRRPVAYLSKKLDPVASGWPVCLKAIAAVAILVKDADKLTLGQNITVIAPHALENIVRQPPDRWMTNARMTHYQSLLLTERVTFAPPAALNPATLLPEETDEPVTHDCHQLLIEETGVRKDLTDIPLTGEVLTWFTDGSSYVVEGKRMAGAAVVDGTRTIWASSLPEGTSAQKAELMALTQALRLAEGKSINIYTDSRYAFATAHVHGAIYKQRGWLTSAGREIKNKEEILSLLEALHLPKRLAIIHCPGHQKAKDPISRGNQMADRVAKQAAQGVNLLAGKRTADGSEFEKRTADGSEFESPKKKAKVE

SEQ ID NO: 386 - protein, 2085 aa, synthetic construct; identical to SEQ ID NO: 123

SEQ ID NO: 387 - protein, 2088 aa, synthetic construct; identical to SEQ ID NO: 155

SEQ ID NO: 388 - protein, 2088 aa, synthetic construct; identical to SEQ ID NO: 134

SEQ ID NO: 389 - protein, 2088 aa, synthetic construct; identical to SEQ ID NO: 171

SEQ ID NO: 390 - protein, 2090 aa, synthetic construct
MPAAKRVKLDGGDKKYSIGLDIGTNSVGWAVITDEYKVPSKKFKVLGNTDRHSIKKNLIGALLFDSGETAEATRLKRTARRRYTRRKNRICYLQEIFSNEMAKVDDSFFHRLEESFLVEEDKKHERHPIFGNIVDEVAYHEKYPTIYHLRKKLVDSTDKADLRLIYLALAHMIKFRGHFLIEGDLNPDNSDVDKLFIQLVQTYNQLFEENPINASGVDAKAILSARLSKSRRLENLIAQLPGEKKNGLFGNLIALSLGLTPNFKSNFDLAEDAKLQLSKDTYDDDLDNLLAQIGDQYADLFLAAKNLSDAILLSDILRVNTEITKAPLSASMIKRYDEHHQDLTLLKALVRQQLPEKYKEIFFDQSKNGYAGYIDGGASQEEFYKFIKPILEKMDGTEELLVKLNREDLLRKQRTFDNGSIPHQIHLGELHAILRRQEDFYPFLKDNREKIEKILTFRIPYYVGPLARGNSRFAWMTRKSEETITPWNFEEVVDKGASAQSFIERMTNFDKNLPNEKVLPKHSLLYEYFTVYNELTKVKYVTEGMRKPAFLSGEQKKAIVDLLFKTNRKVTVKQLKEDYFKKIECFDSVEISGVEDRFNASLGTYHDLLKIIKDKDFLDNEENEDILEDIVLTLTLFEDREMIEERLKTYAHLFDDKVMKQLKRRRYTGWGRLSRKLINGIRDKQSGKTILDFLKSDGFANRNFMQLIHDDSLTFKEDIQKAQVSGQGDSLHEHIANLAGSPAIKKGILQTVKVVDELVKVMGRHKPENIVIEMARENQTTQKGQKNSRERMKRIEEGIKELGSQILKEHPVENTQLQNEKLYLYYLQNGRDMYVDQELDINRLSDYDVDHIVPQSFLKDDSIDNKVLTRSDKARGKSDNVPSEEVVKKMKNYWRQLLNAKLITQRKFDNLTKAERGGLSELDKAGFIKRQLVETRQITKHVAQILDSRMNTKYDENDKLIREVKVITLKSKLVSDFRKDFQFYKVREINNYHHAHDAYLNAVVGTALIKKYPKLESEFVYGDYKVYDVRKMIAKSEQEIGKATAKYFFYSNIMNFFKTEITLANGEIRKRPLIETNGETGEIVWDKGRDFATVRKVLSMPQVNIVKKTEVQTGGFSKESILPKRNSDKLIARKKDWDPKKYGGFDSPTVAYSVLVVAKVEKGKSKKLKSVKELLGITIMERSSFEKNPIDFLEAKGYKEVKKDLIIKLPKYSLFELENGRKRMLASAGELQKGNELALPSKYVNFLYLASHYEKLKGSPEDNEQKQLFVEQHKHYLDEIIEQISEFSKRVILADANLDKVLSAYNKHRDKPIREQAENIIHLFTLTNLGAPAAFKYFDTTIDRKRYTSTKEVLDATLIHQSITGLYETRIDLSQLGGDGGEAAAKGSSPAPGGTLQLDDEYRLYSPLVKPDQNIQFWLEQFPQAWAETAGMGLAKQVPPQVIQLKASATPVSVRQYPLSKEAQEGIRPHVQRLIQQGILVPVQSPWNTPLLPVRKPGTNDYRPVQDLREVNKRVQDIHPTVPNPYNLLCALPPQRSWYTVLDLKDAFFCLRLHPTSQPLFAFEWRDPGTGRTGQLTWTRLPQGFKNSPTIFNEALHRDLANFRIQHPQVTLLQYVDDLLLAGATKQDCLEGTKALLLELSDLGYRASAKKAQICRREVTYLGYSLRDGQRWLTEARKKTVVQIPAPTTAKQVREFLGTAGFCRLWIPGFATLAAPLYPLTKPKGEFSWAPEHQKAFDAIKKALLSAPALALPDVTKPFTLYVDERKGVARGVLTQTLGPWRRPVAYLSKKLDPVASGWPVCLKAIAAVAILVKDADKLTLGQNITVIAPHALENIVRQPPDRWMTNARMTHYQSLLLTERVTFAPPAALNPATLLPEETDEPVTHDCHQLLIEETGVRKDLTDIPLTGEVLTWFTDGSSYVVEGKRMAGAAVVDGTRTIWASSLPEGTSAQKAELMALTQALRLAEGKSINIYTDSRYAFATAHVHGAIYKQRGWLTSAGREIKNKEEILSLLEALHLPKRLAIIHCPGHQKAKDPISRGNQMADRVAKQAAQGVNLLAGKRTADGSEFEKRTADGSEFESPKKKAKVE

SEQ ID NO: 391 - protein, 2094 aa, synthetic construct; identical to SEQ ID NO: 159

SEQ ID NO: 392 - protein, 2084 aa, synthetic construct; identical to SEQ ID NO: 147

SEQ ID NO: 393 - protein, 2085 aa, synthetic construct; identical to SEQ ID NO: 174

SEQ ID NO: 394 - protein, 2087 aa, synthetic construct
MPAAKRVKLDGGDKKYSIGLDIGTNSVGWAVITDEYKVPSKKFKVLGNTDRHSIKKNLIGALLFDSGETAEATRLKRTARRRYTRRKNRICYLQEIFSNEMAKVDDSFFHRLEESFLVEEDKKHERHPIFGNIVDEVAYHEKYPTIYHLRKKLVDSTDKADLRLIYLALAHMIKFRGHFLIEGDLNPDNSDVDKLFIQLVQTYNQLFEENPINASGVDAKAILSARLSKSRRLENLIAQLPGEKKNGLFGNLIALSLGLTPNFKSNFDLAEDAKLQLSKDTYDDDLDNLLAQIGDQYADLFLAAKNLSDAILLSDILRVNTEITKAPLSASMIKRYDEHHQDLTLLKALVRQQLPEKYKEIFFDQSKNGYAGYIDGGASQEEFYKFIKPILEKMDGTEELLVKLNREDLLRKQRTFDNGSIPHQIHLGELHAILRRQEDFYPFLKDNREKIEKILTFRIPYYVGPLARGNSRFAWMTRKSEETITPWNFEEVVDKGASAQSFIERMTNFDKNLPNEKVLPKHSLLYEYFTVYNELTKVKYVTEGMRKPAFLSGEQKKAIVDLLFKTNRKVTVKQLKEDYFKKIECFDSVEISGVEDRFNASLGTYHDLLKIIKDKDFLDNEENEDILEDIVLTLTLFEDREMIEERLKTYAHLFDDKVMKQLKRRRYTGWGRLSRKLINGIRDKQSGKTILDFLKSDGFANRNFMQLIHDDSLTFKEDIQKAQVSGQGDSLHEHIANLAGSPAIKKGILQTVKVVDELVKVMGRHKPENIVIEMARENQTTQKGQKNSRERMKRIEEGIKELGSQILKEHPVENTQLQNEKLYLYYLQNGRDMYVDQELDINRLSDYDVDHIVPQSFLKDDSIDNKVLTRSDKARGKSDNVPSEEVVKKMKNYWRQLLNAKLITQRKFDNLTKAERGGLSELDKAGFIKRQLVETRQITKHVAQILDSRMNTKYDENDKLIREVKVITLKSKLVSDFRKDFQFYKVREINNYHHAHDAYLNAVVGTALIKKYPKLESEFVYGDYKVYDVRKMIAKSEQEIGKATAKYFFYSNIMNFFKTEITLANGEIRKRPLIETNGETGEIVWDKGRDFATVRKVLSMPQVNIVKKTEVQTGGFSKESILPKRNSDKLIARKKDWDPKKYGGFDSPTVAYSVLVVAKVEKGKSKKLKSVKELLGITIMERSSFEKNPIDFLEAKGYKEVKKDLIIKLPKYSLFELENGRKRMLASAGELQKGNELALPSKYVNFLYLASHYEKLKGSPEDNEQKQLFVEQHKHYLDEIIEQISEFSKRVILADANLDKVLSAYNKHRDKPIREQAENIIHLFTLTNLGAPAAFKYFDTTIDRKRYTSTKEVLDATLIHQSITGLYETRIDLSQLGGDGGGGSEAAAKGGTLQLDDEYRLYSPLVKPDQNIQFWLEQFPQAWAETAGMGLAKQVPPQVIQLKASATPVSVRQYPLSKEAQEGIRPHVQRLIQQGILVPVQSPWNTPLLPVRKPGTNDYRPVQDLREVNKRVQDIHPTVPNPYNLLCALPPQRSWYTVLDLKDAFFCLRLHPTSQPLFAFEWRDPGTGRTGQLTWTRLPQGFKNSPTIFNEALHRDLANFRIQHPQVTLLQYVDDLLLAGATKQDCLEGTKALLLELSDLGYRASAKKAQICRREVTYLGYSLRDGQRWLTEARKKTVVQIPAPTTAKQVREFLGTAGFCRLWIPGFATLAAPLYPLTKPKGEFSWAPEHQKAFDAIKKALLSAPALALPDVTKPFTLYVDERKGVARGVLTQTLGPWRRPVAYLSKKLDPVASGWPVCLKAIAAVAILVKDADKLTLGQNITVIAPHALENIVRQPPDRWMTNARMTHYQSLLLTERVTFAPPAALNPATLLPEETDEPVTHDCHQLLIEETGVRKDLTDIPLTGEVLTWFTDGSSYVVEGKRMAGAAVVDGTRTIWASSLPEGTSAQKAELMALTQALRLAEGKSINIYTDSRYAFATAHVHGAIYKQRGWLTSAGREIKNKEEILSLLEALHLPKRLAIIHCPGHQKAKDPISRGNQMADRVAKQAAQGVNLLAGKRTADGSEFEKRTADGSEFESPKKKAKVE

SEQ ID NO: 395 - protein, 2088 aa, synthetic construct; identical to SEQ ID NO: 180

SEQ ID NO: 396 - protein, 2097 aa, synthetic construct; identical to SEQ ID NO: 113

SEQ ID NO: 397 - protein, 2085 aa, synthetic construct; identical to SEQ ID NO: 184

SEQ ID NO: 398 - protein, 2090 aa, synthetic construct; identical to SEQ ID NO: 119

SEQ ID NO: 399 - protein, 2089 aa, synthetic construct
MPAAKRVKLDGGDKKYSIGLDIGTNSVGWAVITDEYKVPSKKFKVLGNTDRHSIKKNLIGALLFDSGETAEATRLKRTARRRYTRRKNRICYLQEIFSNEMAKVDDSFFHRLEESFLVEEDKKHERHPIFGNIVDEVAYHEKYPTIYHLRKKLVDSTDKADLRLIYLALAHMIKFRGHFLIEGDLNPDNSDVDKLFIQLVQTYNQLFEENPINASGVDAKAILSARLSKSRRLENLIAQLPGEKKNGLFGNLIALSLGLTPNFKSNFDLAEDAKLQLSKDTYDDDLDNLLAQIGDQYADLFLAAKNLSDAILLSDILRVNTEITKAPLSASMIKRYDEHHQDLTLLKALVRQQLPEKYKEIFFDQSKNGYAGYIDGGASQEEFYKFIKPILEKMDGTEELLVKLNREDLLRKQRTFDNGSIPHQIHLGELHAILRRQEDFYPFLKDNREKIEKILTFRIPYYVGPLARGNSRFAWMTRKSEETITPWNFEEVVDKGASAQSFIERMTNFDKNLPNEKVLPKHSLLYEYFTVYNELTKVKYVTEGMRKPAFLSGEQKKAIVDLLFKTNRKVTVKQLKEDYFKKIECFDSVEISGVEDRFNASLGTYHDLLKIIKDKDFLDNEENEDILEDIVLTLTLFEDREMIEERLKTYAHLFDDKVMKQLKRRRYTGWGRLSRKLINGIRDKQSGKTILDFLKSDGFANRNFMQLIHDDSLTFKEDIQKAQVSGQGDSLHEHIANLAGSPAIKKGILQTVKVVDELVKVMGRHKPENIVIEMARENQTTQKGQKNSRERMKRIEEGIKELGSQILKEHPVENTQLQNEKLYLYYLQNGRDMYVDQELDINRLSDYDVDHIVPQSFLKDDSIDNKVLTRSDKARGKSDNVPSEEVVKKMKNYWRQLLNAKLITQRKFDNLTKAERGGLSELDKAGFIKRQLVETRQITKHVAQILDSRMNTKYDENDKLIREVKVITLKSKLVSDFRKDFQFYKVREINNYHHAHDAYLNAVVGTALIKKYPKLESEFVYGDYKVYDVRKMIAKSEQEIGKATAKYFFYSNIMNFFKTEITLANGEIRKRPLIETNGETGEIVWDKGRDFATVRKVLSMPQVNIVKKTEVQTGGFSKESILPKRNSDKLIARKKDWDPKKYGGFDSPTVAYSVLVVAKVEKGKSKKLKSVKELLGITIMERSSFEKNPIDFLEAKGYKEVKKDLIIKLPKYSLFELENGRKRMLASAGELQKGNELALPSKYVNFLYLASHYEKLKGSPEDNEQKQLFVEQHKHYLDEIIEQISEFSKRVILADANLDKVLSAYNKHRDKPIREQAENIIHLFTLTNLGAPAAFKYFDTTIDRKRYTSTKEVLDATLIHQSITGLYETRIDLSQLGGDGGEAAAKEAAAKGGTLQLDDEYRLYSPLVKPDQNIQFWLEQFPQAWAETAGMGLAKQVPPQVIQLKASATPVSVRQYPLSKEAQEGIRPHVQRLIQQGILVPVQSPWNTPLLPVRKPGTNDYRPVQDLREVNKRVQDIHPTVPNPYNLLCALPPQRSWYTVLDLKDAFFCLRLHPTSQPLFAFEWRDPGTGRTGQLTWTRLPQGFKNSPTIFNEALHRDLANFRIQHPQVTLLQYVDDLLLAGATKQDCLEGTKALLLELSDLGYRASAKKAQICRREVTYLGYSLRDGQRWLTEARKKTVVQIPAPTTAKQVREFLGTAGFCRLWIPGFATLAAPLYPLTKPKGEFSWAPEHQKAFDAIKKALLSAPALALPDVTKPFTLYVDERKGVARGVLTQTLGPWRRPVAYLSKKLDPVASGWPVCLKAIAAVAILVKDADKLTLGQNITVIAPHALENIVRQPPDRWMTNARMTHYQSLLLTERVTFAPPAALNPATLLPEETDEPVTHDCHQLLIEETGVRKDLTDIPLTGEVLTWFTDGSSYVVEGKRMAGAAVVDGTRTIWASSLPEGTSAQKAELMALTQALRLAEGKSINIYTDSRYAFATAHVHGAIYKQRGWLTSAGREIKNKEEILSLLEALHLPKRLAIIHCPGHQKAKDPISRGNQMADRVAKQAAQGVNLLAGKRTADGSEFEKRTADGSEFESPKKKAKVE

SEQ ID NO: 400 - protein, 2088 aa, synthetic construct; identical to SEQ ID NO: 129

SEQ ID NO: 401 - protein, 2088 aa, synthetic construct
MPAAKRVKLDGGDKKYSIGLDIGTNSVGWAVITDEYKVPSKKFKVLGNTDRHSIKKNLIGALLFDSGETAEATRLKRTARRRYTRRKNRICYLQEIFSNEMAKVDDSFFHRLEESFLVEEDKKHERHPIFGNIVDEVAYHEKYPTIYHLRKKLVDSTDKADLRLIYLALAHMIKFRGHFLIEGDLNPDNSDVDKLFIQLVQTYNQLFEENPINASGVDAKAILSARLSKSRRLENLIAQLPGEKKNGLFGNLIALSLGLTPNFKSNFDLAEDAKLQLSKDTYDDDLDNLLAQIGDQYADLFLAAKNLSDAILLSDILRVNTEITKAPLSASMIKRYDEHHQDLTLLKALVRQQLPEKYKEIFFDQSKNGYAGYIDGGASQEEFYKFIKPILEKMDGTEELLVKLNREDLLRKQRTFDNGSIPHQIHLGELHAILRRQEDFYPFLKDNREKIEKILTFRIPYYVGPLARGNSRFAWMTRKSEETITPWNFEEVVDKGASAQSFIERMTNFDKNLPNEKVLPKHSLLYEYFTVYNELTKVKYVTEGMRKPAFLSGEQKKAIVDLLFKTNRKVTVKQLKEDYFKKIECFDSVEISGVEDRFNASLGTYHDLLKIIKDKDFLDNEENEDILEDIVLTLTLFEDREMIEERLKTYAHLFDDKVMKQLKRRRYTGWGRLSRKLINGIRDKQSGKTILDFLKSDGFANRNFMQLIHDDSLTFKEDIQKAQVSGQGDSLHEHIANLAGSPAIKKGILQTVKVVDELVKVMGRHKPENIVIEMARENQTTQKGQKNSRERMKRIEEGIKELGSQILKEHPVENTQLQNEKLYLYYLQNGRDMYVDQELDINRLSDYDVDHIVPQSFLKDDSIDNKVLTRSDKARGKSDNVPSEEVVKKMKNYWRQLLNAKLITQRKFDNLTKAERGGLSELDKAGFIKRQLVETRQITKHVAQILDSRMNTKYDENDKLIREVKVITLKSKLVSDFRKDFQFYKVREINNYHHAHDAYLNAVVGTALIKKYPKLESEFVYGDYKVYDVRKMIAKSEQEIGKATAKYFFYSNIMNFFKTEITLANGEIRKRPLIETNGETGEIVWDKGRDFATVRKVLSMPQVNIVKKTEVQTGGFSKESILPKRNSDKLIARKKDWDPKKYGGFDSPTVAYSVLVVAKVEKGKSKKLKSVKELLGITIMERSSFEKNPIDFLEAKGYKEVKKDLIIKLPKYSLFELENGRKRMLASAGELQKGNELALPSKYVNFLYLASHYEKLKGSPEDNEQKQLFVEQHKHYLDEIIEQISEFSKRVILADANLDKVLSAYNKHRDKPIREQAENIIHLFTLTNLGAPAAFKYFDTTIDRKRYTSTKEVLDATLIHQSITGLYETRIDLSQLGGDGGGSSGGSPAPGGTLQLDDEYRLYSPLVKPDQNIQFWLEQFPQAWAETAGMGLAKQVPPQVIQLKASATPVSVRQYPLSKEAQEGIRPHVQRLIQQGILVPVQSPWNTPLLPVRKPGTNDYRPVQDLREVNKRVQDIHPTVPNPYNLLCALPPQRSWYTVLDLKDAFFCLRLHPTSQPLFAFEWRDPGTGRTGQLTWTRLPQGFKNSPTIFNEALHRDLANFRIQHPQVTLLQYVDDLLLAGATKQDCLEGTKALLLELSDLGYRASAKKAQICRREVTYLGYSLRDGQRWLTEARKKTVVQIPAPTTAKQVREFLGTAGFCRLWIPGFATLAAPLYPLTKPKGEFSWAPEHQKAFDAIKKALLSAPALALPDVTKPFTLYVDERKGVARGVLTQTLGPWRRPVAYLSKKLDPVASGWPVCLKAIAAVAILVKDADKLTLGQNITVIAPHALENIVRQPPDRWMTNARMTHYQSLLLTERVTFAPPAALNPATLLPEETDEPVTHDCHQLLIEETGVRKDLTDIPLTGEVLTWFTDGSSYVVEGKRMAGAAVVDGTRTIWASSLPEGTSAQKAELMALTQALRLAEGKSINIYTDSRYAFATAHVHGAIYKQRGWLTSAGREIKNKEEILSLLEALHLPKRLAIIHCPGHQKAKDPISRGNQMADRVAKQAAQGVNLLAGKRTADGSEFEKRTADGSEFESPKKKAKVE

SEQ ID NO: 402 - protein, 2088 aa, synthetic construct
MPAAKRVKLDGGDKKYSIGLDIGTNSVGWAVITDEYKVPSKKFKVLGNTDRHSIKKNLIGALLFDSGETAEATRLKRTARRRYTRRKNRICYLQEIFSNEMAKVDDSFFHRLEESFLVEEDKKHERHPIFGNIVDEVAYHEKYPTIYHLRKKLVDSTDKADLRLIYLALAHMIKFRGHFLIEGDLNPDNSDVDKLFIQLVQTYNQLFEENPINASGVDAKAILSARLSKSRRLENLIAQLPGEKKNGLFGNLIALSLGLTPNFKSNFDLAEDAKLQLSKDTYDDDLDNLLAQIGDQYADLFLAAKNLSDAILLSDILRVNTEITKAPLSASMIKRYDEHHQDLTLLKALVRQQLPEKYKEIFFDQSKNGYAGYIDGGASQEEFYKFIKPILEKMDGTEELLVKLNREDLLRKQRTFDNGSIPHQIHLGELHAILRRQEDFYPFLKDNREKIEKILTFRIPYYVGPLARGNSRFAWMTRKSEETITPWNFEEVVDKGASAQSFIERMTNFDKNLPNEKVLPKHSLLYEYFTVYNELTKVKYVTEGMRKPAFLSGEQKKAIVDLLFKTNRKVTVKQLKEDYFKKIECFDSVEISGVEDRFNASLGTYHDLLKIIKDKDFLDNEENEDILEDIVLTLTLFEDREMIEERLKTYAHLFDDKVMKQLKRRRYTGWGRLSRKLINGIRDKQSGKTILDFLKSDGFANRNFMQLIHDDSLTFKEDIQKAQVSGQGDSLHEHIANLAGSPAIKKGILQTVKVVDELVKVMGRHKPENIVIEMARENQTTQKGQKNSRERMKRIEEGIKELGSQILKEHPVENTQLQNEKLYLYYLQNGRDMYVDQELDINRLSDYDVDHIVPQSFLKDDSIDNKVLTRSDKARGKSDNVPSEEVVKKMKNYWRQLLNAKLITQRKFDNLTKAERGGLSELDKAGFIKRQLVETRQITKHVAQILDSRMNTKYDENDKLIREVKVITLKSKLVSDFRKDFQFYKVREINNYHHAHDAYLNAVVGTALIKKYPKLESEFVYGDYKVYDVRKMIAKSEQEIGKATAKYFFYSNIMNFFKTEITLANGEIRKRPLIETNGETGEIVWDKGRDFATVRKVLSMPQVNIVKKTEVQTGGFSKESILPKRNSDKLIARKKDWDPKKYGGFDSPTVAYSVLVVAKVEKGKSKKLKSVKELLGITIMERSSFEKNPIDFLEAKGYKEVKKDLIIKLPKYSLFELENGRKRMLASAGELQKGNELALPSKYVNFLYLASHYEKLKGSPEDNEQKQLFVEQHKHYLDEIIEQISEFSKRVILADANLDKVLSAYNKHRDKPIREQAENIIHLFTLTNLGAPAAFKYFDTTIDRKRYTSTKEVLDATLIHQSITGLYETRIDLSQLGGDGGGGGGGSPAPGGTLQLDDEYRLYSPLVKPDQNIQFWLEQFPQAWAETAGMGLAKQVPPQVIQLKASATPVSVRQYPLSKEAQEGIRPHVQRLIQQGILVPVQSPWNTPLLPVRKPGTNDYRPVQDLREVNKRVQDIHPTVPNPYNLLCALPPQRSWYTVLDLKDAFFCLRLHPTSQPLFAFEWRDPGTGRTGQLTWTRLPQGFKNSPTIFNEALHRDLANFRIQHPQVTLLQYVDDLLLAGATKQDCLEGTKALLLELSDLGYRASAKKAQICRREVTYLGYSLRDGQRWLTEARKKTVVQIPAPTTAKQVREFLGTAGFCRLWIPGFATLAAPLYPLTKPKGEFSWAPEHQKAFDAIKKALLSAPALALPDVTKPFTLYVDERKGVARGVLTQTLGPWRRPVAYLSKKLDPVASGWPVCLKAIAAVAILVKDADKLTLGQNITVIAPHALENIVRQPPDRWMTNARMTHYQSLLLTERVTFAPPAALNPATLLPEETDEPVTHDCHQLLIEETGVRKDLTDIPLTGEVLTWFTDGSSYVVEGKRMAGAAVVDGTRTIWASSLPEGTSAQKAELMALTQALRLAEGKSINIYTDSRYAFATAHVHGAIYKQRGWLTSAGREIKNKEEILSLLEALHLPKRLAIIHCPGHQKAKDPISRGNQMADRVAKQAAQGVNLLAGKRTADGSEFEKRTADGSEFESPKKKAKVE

SEQ ID NO: 403 - protein, 2088 aa, synthetic construct; identical to SEQ ID NO: 130

SEQ ID NO: 404 - protein, 2094 aa, synthetic construct; identical to SEQ ID NO: 161

SEQ ID NO: 405 - protein, 2085 aa, synthetic construct
MPAAKRVKLDGGDKKYSIGLDIGTNSVGWAVITDEYKVPSKKFKVLGNTDRHSIKKNLIGALLFDSGETAEATRLKRTARRRYTRRKNRICYLQEIFSNEMAKVDDSFFHRLEESFLVEEDKKHERHPIFGNIVDEVAYHEKYPTIYHLRKKLVDSTDKADLRLIYLALAHMIKFRGHFLIEGDLNPDNSDVDKLFIQLVQTYNQLFEENPINASGVDAKAILSARLSKSRRLENLIAQLPGEKKNGLFGNLIALSLGLTPNFKSNFDLAEDAKLQLSKDTYDDDLDNLLAQIGDQYADLFLAAKNLSDAILLSDILRVNTEITKAPLSASMIKRYDEHHQDLTLLKALVRQQLPEKYKEIFFDQSKNGYAGYIDGGASQEEFYKFIKPILEKMDGTEELLVKLNREDLLRKQRTFDNGSIPHQIHLGELHAILRRQEDFYPFLKDNREKIEKILTFRIPYYVGPLARGNSRFAWMTRKSEETITPWNFEEVVDKGASAQSFIERMTNFDKNLPNEKVLPKHSLLYEYFTVYNELTKVKYVTEGMRKPAFLSGEQKKAIVDLLFKTNRKVTVKQLKEDYFKKIECFDSVEISGVEDRFNASLGTYHDLLKIIKDKDFLDNEENEDILEDIVLTLTLFEDREMIEERLKTYAHLFDDKVMKQLKRRRYTGWGRLSRKLINGIRDKQSGKTILDFLKSDGFANRNFMQLIHDDSLTFKEDIQKAQVSGQGDSLHEHIANLAGSPAIKKGILQTVKVVDELVKVMGRHKPENIVIEMARENQTTQKGQKNSRERMKRIEEGIKELGSQILKEHPVENTQLQNEKLYLYYLQNGRDMYVDQELDINRLSDYDVDHIVPQSFLKDDSIDNKVLTRSDKARGKSDNVPSEEVVKKMKNYWRQLLNAKLITQRKFDNLTKAERGGLSELDKAGFIKRQLVETRQITKHVAQILDSRMNTKYDENDKLIREVKVITLKSKLVSDFRKDFQFYKVREINNYHHAHDAYLNAVVGTALIKKYPKLESEFVYGDYKVYDVRKMIAKSEQEIGKATAKYFFYSNIMNFFKTEITLANGEIRKRPLIETNGETGEIVWDKGRDFATVRKVLSMPQVNIVKKTEVQTGGFSKESILPKRNSDKLIARKKDWDPKKYGGFDSPTVAYSVLVVAKVEKGKSKKLKSVKELLGITIMERSSFEKNPIDFLEAKGYKEVKKDLIIKLPKYSLFELENGRKRMLASAGELQKGNELALPSKYVNFLYLASHYEKLKGSPEDNEQKQLFVEQHKHYLDEIIEQISEFSKRVILADANLDKVLSAYNKHRDKPIREQAENIIHLFTLTNLGAPAAFKYFDTTIDRKRYTSTKEVLDATLIHQSITGLYETRIDLSQLGGDGGGGGGSSGGTLQLDDEYRLYSPLVKPDQNIQFWLEQFPQAWAETAGMGLAKQVPPQVIQLKASATPVSVRQYPLSKEAQEGIRPHVQRLIQQGILVPVQSPWNTPLLPVRKPGTNDYRPVQDLREVNKRVQDIHPTVPNPYNLLCALPPQRSWYTVLDLKDAFFCLRLHPTSQPLFAFEWRDPGTGRTGQLTWTRLPQGFKNSPTIFNEALHRDLANFRIQHPQVTLLQYVDDLLLAGATKQDCLEGTKALLLELSDLGYRASAKKAQICRREVTYLGYSLRDGQRWLTEARKKTVVQIPAPTTAKQVREFLGTAGFCRLWIPGFATLAAPLYPLTKPKGEFSWAPEHQKAFDAIKKALLSAPALALPDVTKPFTLYVDERKGVARGVLTQTLGPWRRPVAYLSKKLDPVASGWPVCLKAIAAVAILVKDADKLTLGQNITVIAPHALENIVRQPPDRWMTNARMTHYQSLLLTERVTFAPPAALNPATLLPEETDEPVTHDCHQLLIEETGVRKDLTDIPLTGEVLTWFTDGSSYVVEGKRMAGAAVVDGTRTIWASSLPEGTSAQKAELMALTQALRLAEGKSINIYTDSRYAFATAHVHGAIYKQRGWLTSAGREIKNKEEILSLLEALHLPKRLAIIHCPGHQKAKDPISRGNQMADRVAKQAAQGVNLLAGKRTADGSEFEKRTADGSEFESPKKKAKVE

SEQ ID NO: 406 - protein, 2088 aa, synthetic construct; identical to SEQ ID NO: 182

SEQ ID NO: 407 - protein, 2211 aa, synthetic construct
MPAAKRVKLDGGDKKYSIGLDIGTNSVGWAVITDEYKVPSKKFKVLGNTDRHSIKKNLIGALLFDSGETAEATRLKRTARRRYTRRKNRICYLQEIFSNEMAKVDDSFFHRLEESFLVEEDKKHERHPIFGNIVDEVAYHEKYPTIYHLRKKLVDSTDKADLRLIYLALAHMIKFRGHFLIEGDLNPDNSDVDKLFIQLVQTYNQLFEENPINASGVDAKAILSARLSKSRRLENLIAQLPGEKKNGLFGNLIALSLGLTPNFKSNFDLAEDAKLQLSKDTYDDDLDNLLAQIGDQYADLFLAAKNLSDAILLSDILRVNTEITKAPLSASMIKRYDEHHQDLTLLKALVRQQLPEKYKEIFFDQSKNGYAGYIDGGASQEEFYKFIKPILEKMDGTEELLVKLNREDLLRKQRTFDNGSIPHQIHLGELHAILRRQEDFYPFLKDNREKIEKILTFRIPYYVGPLARGNSRFAWMTRKSEETITPWNFEEVVDKGASAQSFIERMTNFDKNLPNEKVLPKHSLLYEYFTVYNELTKVKYVTEGMRKPAFLSGEQKKAIVDLLFKTNRKVTVKQLKEDYFKKIECFDSVEISGVEDRFNASLGTYHDLLKIIKDKDFLDNEENEDILEDIVLTLTLFEDREMIEERLKTYAHLFDDKVMKQLKRRRYTGWGRLSRKLINGIRDKQSGKTILDFLKSDGFANRNFMQLIHDDSLTFKEDIQKAQVSGQGDSLHEHIANLAGSPAIKKGILQTVKVVDELVKVMGRHKPENIVIEMARENQTTQKGQKNSRERMKRIEEGIKELGSQILKEHPVENTQLQNEKLYLYYLQNGRDMYVDQELDINRLSDYDVDHIVPQSFLKDDSIDNKVLTRSDKARGKSDNVPSEEVVKKMKNYWRQLLNAKLITQRKFDNLTKAERGGLSELDKAGFIKRQLVETRQITKHVAQILDSRMNTKYDENDKLIREVKVITLKSKLVSDFRKDFQFYKVREINNYHHAHDAYLNAVVGTALIKKYPKLESEFVYGDYKVYDVRKMIAKSEQEIGKATAKYFFYSNIMNFFKTEITLANGEIRKRPLIETNGETGEIVWDKGRDFATVRKVLSMPQVNIVKKTEVQTGGFSKESILPKRNSDKLIARKKDWDPKKYGGFDSPTVAYSVLVVAKVEKGKSKKLKSVKELLGITIMERSSFEKNPIDFLEAKGYKEVKKDLIIKLPKYSLFELENGRKRMLASAGELQKGNELALPSKYVNFLYLASHYEKLKGSPEDNEQKQLFVEQHKHYLDEIIEQISEFSKRVILADANLDKVLSAYNKHRDKPIREQAENIIHLFTLTNLGAPAAFKYFDTTIDRKRYTSTKEVLDATLIHQSITGLYETRIDLSQLGGDGGAEAAAKEAAAKEAAAKEAAAKALEAEAAAKEAAAKEAAAKEAAAKAGGMDPLQLLQPLEAEIKGTKLKAHWNSGATITCVPEAFLEDERPIQTMLIKTIHGEKQQDVYYLTFKVQGRKVEAEVLASPYDYILLNPSDVPWLMKKPLQLTVLVPLHEYQERLLQQTALPKEQKELLQKLFLKYDALWQHWENQVGHRRIKPHNIATGTLAPRPQKQYPINPKAKPSIQIVIDDLLKQGVLIQQNSTMNTPVYPVPKPDGKWRMVLDYREVNKTIPLIAAQNQHSAGILSSIYRGKYKTTLDLTNGFWAHPITPESYWLTAFTWQGKQYCWTRLPQGFLNSPALFTADVVDLLKEIPNVQAYVDDIYISHDDPQEHLEQLEKIFSILLNAGYVVSLKKSEIAQREVEFLGFNITKEGRGLTDTFKQKLLNITPPKDLKQLQSILGLLNFARNFIPNYSELVKPLYTIVANANGKFISWTEDNSNQLQHIISVLNQADNLEERNPETRLIIKVNSSPSAGYIRYYNEGSKRPIMYVNYIFSKAEAKFTQTEKLLTTMHKGLIKAMDLAMGQEILVYSPIVSMTKIQRTPLPERKALPVRWITWMTYLEDPRIQFHYDKSLPELQQIPNVTEDVIAKTKHPSEFAMVFYTDGSAIKHPDVNKSHSAGMGIAQVQFIPEYKIVHQWSIPLGDHTAQLAEIAAVEFACKKALKISGPVLIVTDSFYVAESANKELPYWKSNGFLNNKKKPLRHVSKWKSIAECLQLKPDIIIMHEKGHQQPMTTLHTEGNNLADKLATQGSYVVHAGKRTADGSEFEKRTADGSEFESPKKKAKVE

SEQ ID NO: 408 - protein, 2198 aa, synthetic construct
MPAAKRVKLDGGDKKYSIGLDIGTNSVGWAVITDEYKVPSKKFKVLGNTDRHSIKKNLIGALLFDSGETAEATRLKRTARRRYTRRKNRICYLQEIFSNEMAKVDDSFFHRLEESFLVEEDKKHERHPIFGNIVDEVAYHEKYPTIYHLRKKLVDSTDKADLRLIYLALAHMIKFRGHFLIEGDLNPDNSDVDKLFIQLVQTYNQLFEENPINASGVDAKAILSARLSKSRRLENLIAQLPGEKKNGLFGNLIALSLGLTPNFKSNFDLAEDAKLQLSKDTYDDDLDNLLAQIGDQYADLFLAAKNLSDAILLSDILRVNTEITKAPLSASMIKRYDEHHQDLTLLKALVRQQLPEKYKEIFFDQSKNGYAGYIDGGASQEEFYKFIKPILEKMDGTEELLVKLNREDLLRKQRTFDNGSIPHQIHLGELHAILRRQEDFYPFLKDNREKIEKILTFRIPYYVGPLARGNSRFAWMTRKSEETITPWNFEEVVDKGASAQSFIERMTNFDKNLPNEKVLPKHSLLYEYFTVYNELTKVKYVTEGMRKPAFLSGEQKKAIVDLLFKTNRKVTVKQLKEDYFKKIECFDSVEISGVEDRFNASLGTYHDLLKIIKDKDFLDNEENEDILEDIVLTLTLFEDREMIEERLKTYAHLFDDKVMKQLKRRRYTGWGRLSRKLINGIRDKQSGKTILDFLKSDGFANRNFMQLIHDDSLTFKEDIQKAQVSGQGDSLHEHIANLAGSPAIKKGILQTVKVVDELVKVMGRHKPENIVIEMARENQTTQKGQKNSRERMKRIEEGIKELGSQILKEHPVENTQLQNEKLYLYYLQNGRDMYVDQELDINRLSDYDVDHIVPQSFLKDDSIDNKVLTRSDKARGKSDNVPSEEVVKKMKNYWRQLLNAKLITQRKFDNLTKAERGGLSELDKAGFIKRQLVETRQITKHVAQILDSRMNTKYDENDKLIREVKVITLKSKLVSDFRKDFQFYKVREINNYHHAHDAYLNAVVGTALIKKYPKLESEFVYGDYKVYDVRKMIAKSEQEIGKATAKYFFYSNIMNFFKTEITLANGEIRKRPLIETNGETGEIVWDKGRDFATVRKVLSMPQVNIVKKTEVQTGGFSKESILPKRNSDKLIARKKDWDPKKYGGFDSPTVAYSVLVVAKVEKGKSKKLKSVKELLGITIMERSSFEKNPIDFLEAKGYKEVKKDLIIKLPKYSLFELENGRKRMLASAGELQKGNELALPSKYVNFLYLASHYEKLKGSPEDNEQKQLFVEQHKHYLDEIIEQISEFSKRVILADANLDKVLSAYNKHRDKPIREQAENIIHLFTLTNLGAPAAFKYFDTTIDRKRYTSTKEVLDATLIHQSITGLYETRIDLSQLGGDGGSGGSSGGSSGSETPGTSESATPESSGGSSGGSSGGMDPLQLLQPLEAEIKGTKLKAHWNSGATITCVPEAFLEDERPIQTMLIKTIHGEKQQDVYYLTFKVQGRKVEAEVLASPYDYILLNPSDVPWLMKKPLQLTVLVPLHEYQERLLQQTALPKEQKELLQKLFLKYDALWQHWENQVGHRRIKPHNIATGTLAPRPQKQYPINPKAKPSIQIVIDDLLKQGVLIQQNSTMNTPVYPVPKPDGKWRMVLDYREVNKTIPLIAAQNQHSAGILSSIYRGKYKTTLDLTNGFWAHPITPESYWLTAFTWQGKQYCWTRLPQGFLNSPALFTADVVDLLKEIPNVQAYVDDIYISHDDPQEHLEQLEKIFSILLNAGYVVSLKKSEIAQREVEFLGFNITKEGRGLTDTFKQKLLNITPPKDLKQLQSILGLLNFARNFIPNYSELVKPLYTIVANANGKFISWTEDNSNQLQHIISVLNQADNLEERNPETRLIIKVNSSPSAGYIRYYNEGSKRPIMYVNYIFSKAEAKFTQTEKLLTTMHKGLIKAMDLAMGQEILVYSPIVSMTKIQRTPLPERKALPVRWITWMTYLEDPRIQFHYDKSLPELQQIPNVTEDVIAKTKHPSEFAMVFYTDGSAIKHPDVNKSHSAGMGIAQVQFIPEYKIVHQWSIPLGDHTAQLAEIAAVEFACKKALKISGPVLIVTDSFYVAESANKELPYWKSNGFLNNKKKPLRHVSKWKSIAECLQLKPDIIIMHEKGHQQPMTTLHTEGNNLADKLATQGSYVVHAGKRTADGSEFEKRTADGSEFESPKKKAKVE

SEQ ID NO: 409 - protein, 2176 aa, synthetic construct
MPAAKRVKLDGGDKKYSIGLDIGTNSVGWAVITDEYKVPSKKFKVLGNTDRHSIKKNLIGALLFDSGETAEATRLKRTARRRYTRRKNRICYLQEIFSNEMAKVDDSFFHRLEESFLVEEDKKHERHPIFGNIVDEVAYHEKYPTIYHLRKKLVDSTDKADLRLIYLALAHMIKFRGHFLIEGDLNPDNSDVDKLFIQLVQTYNQLFEENPINASGVDAKAILSARLSKSRRLENLIAQLPGEKKNGLFGNLIALSLGLTPNFKSNFDLAEDAKLQLSKDTYDDDLDNLLAQIGDQYADLFLAAKNLSDAILLSDILRVNTEITKAPLSASMIKRYDEHHQDLTLLKALVRQQLPEKYKEIFFDQSKNGYAGYIDGGASQEEFYKFIKPILEKMDGTEELLVKLNREDLLRKQRTFDNGSIPHQIHLGELHAILRRQEDFYPFLKDNREKIEKILTFRIPYYVGPLARGNSRFAWMTRKSEETITPWNFEEVVDKGASAQSFIERMTNFDKNLPNEKVLPKHSLLYEYFTVYNELTKVKYVTEGMRKPAFLSGEQKKAIVDLLFKTNRKVTVKQLKEDYFKKIECFDSVEISGVEDRFNASLGTYHDLLKIIKDKDFLDNEENEDILEDIVLTLTLFEDREMIEERLKTYAHLFDDKVMKQLKRRRYTGWGRLSRKLINGIRDKQSGKTILDFLKSDGFANRNFMQLIHDDSLTFKEDIQKAQVSGQGDSLHEHIANLAGSPAIKKGILQTVKVVDELVKVMGRHKPENIVIEMARENQTTQKGQKNSRERMKRIEEGIKELGSQILKEHPVENTQLQNEKLYLYYLQNGRDMYVDQELDINRLSDYDVDHIVPQSFLKDDSIDNKVLTRSDKARGKSDNVPSEEVVKKMKNYWRQLLNAKLITQRKFDNLTKAERGGLSELDKAGFIKRQLVETRQITKHVAQILDSRMNTKYDENDKLIREVKVITLKSKLVSDFRKDFQFYKVREINNYHHAHDAYLNAVVGTALIKKYPKLESEFVYGDYKVYDVRKMIAKSEQEIGKATAKYFFYSNIMNFFKTEITLANGEIRKRPLIETNGETGEIVWDKGRDFATVRKVLSMPQVNIVKKTEVQTGGFSKESILPKRNSDKLIARKKDWDPKKYGGFDSPTVAYSVLVVAKVEKGKSKKLKSVKELLGITIMERSSFEKNPIDFLEAKGYKEVKKDLIIKLPKYSLFELENGRKRMLASAGELQKGNELALPSKYVNFLYLASHYEKLKGSPEDNEQKQLFVEQHKHYLDEIIEQISEFSKRVILADANLDKVLSAYNKHRDKPIREQAENIIHLFTLTNLGAPAAFKYFDTTIDRKRYTSTKEVLDATLIHQSITGLYETRIDLSQLGGDGGGSSEAAAKPAPGGMDPLQLLQPLEAEIKGTKLKAHWNSGATITCVPEAFLEDERPIQTMLIKTIHGEKQQDVYYLTFKVQGRKVEAEVLASPYDYILLNPSDVPWLMKKPLQLTVLVPLHEYQERLLQQTALPKEQKELLQKLFLKYDALWQHWENQVGHRRIKPHNIATGTLAPRPQKQYPINPKAKPSIQIVIDDLLKQGVLIQQNSTMNTPVYPVPKPDGKWRMVLDYREVNKTIPLIAAQNQHSAGILSSIYRGKYKTTLDLTNGFWAHPITPESYWLTAFTWQGKQYCWTRLPQGFLNSPALFTADVVDLLKEIPNVQAYVDDIYISHDDPQEHLEQLEKIFSILLNAGYVVSLKKSEIAQREVEFLGFNITKEGRGLTDTFKQKLLNITPPKDLKQLQSILGLLNFARNFIPNYSELVKPLYTIVANANGKFISWTEDNSNQLQHIISVLNQADNLEERNPETRLIIKVNSSPSAGYIRYYNEGSKRPIMYVNYIFSKAEAKFTQTEKLLTTMHKGLIKAMDLAMGQEILVYSPIVSMTKIQRTPLPERKALPVRWITWMTYLEDPRIQFHYDKSLPELQQIPNVTEDVIAKTKHPSEFAMVFYTDGSAIKHPDVNKSHSAGMGIAQVQFIPEYKIVHQWSIPLGDHTAQLAEIAAVEFACKKALKISGPVLIVTDSFYVAESANKELPYWKSNGFLNNKKKPLRHVSKWKSIAECLQLKPDIIIMHEKGHQQPMTTLHTEGNNLADKLATQGSYVVHAGKRTADGSEFEKRTADGSEFESPKKKAKVE

SEQ ID NO: 410 - protein, 2181 aa, synthetic construct
MPAAKRVKLDGGDKKYSIGLDIGTNSVGWAVITDEYKVPSKKFKVLGNTDRHSIKKNLIGALLFDSGETAEATRLKRTARRRYTRRKNRICYLQEIFSNEMAKVDDSFFHRLEESFLVEEDKKHERHPIFGNIVDEVAYHEKYPTIYHLRKKLVDSTDKADLRLIYLALAHMIKFRGHFLIEGDLNPDNSDVDKLFIQLVQTYNQLFEENPINASGVDAKAILSARLSKSRRLENLIAQLPGEKKNGLFGNLIALSLGLTPNFKSNFDLAEDAKLQLSKDTYDDDLDNLLAQIGDQYADLFLAAKNLSDAILLSDILRVNTEITKAPLSASMIKRYDEHHQDLTLLKALVRQQLPEKYKEIFFDQSKNGYAGYIDGGASQEEFYKFIKPILEKMDGTEELLVKLNREDLLRKQRTFDNGSIPHQIHLGELHAILRRQEDFYPFLKDNREKIEKILTFRIPYYVGPLARGNSRFAWMTRKSEETITPWNFEEVVDKGASAQSFIERMTNFDKNLPNEKVLPKHSLLYEYFTVYNELTKVKYVTEGMRKPAFLSGEQKKAIVDLLFKTNRKVTVKQLKEDYFKKIECFDSVEISGVEDRFNASLGTYHDLLKIIKDKDFLDNEENEDILEDIVLTLTLFEDREMIEERLKTYAHLFDDKVMKQLKRRRYTGWGRLSRKLINGIRDKQSGKTILDFLKSDGFANRNFMQLIHDDSLTFKEDIQKAQVSGQGDSLHEHIANLAGSPAIKKGILQTVKVVDELVKVMGRHKPENIVIEMARENQTTQKGQKNSRERMKRIEEGIKELGSQILKEHPVENTQLQNEKLYLYYLQNGRDMYVDQELDINRLSDYDVDHIVPQSFLKDDSIDNKVLTRSDKARGKSDNVPSEEVVKKMKNYWRQLLNAKLITQRKFDNLTKAERGGLSELDKAGFIKRQLVETRQITKHVAQILDSRMNTKYDENDKLIREVKVITLKSKLVSDFRKDFQFYKVREINNYHHAHDAYLNAVVGTALIKKYPKLESEFVYGDYKVYDVRKMIAKSEQEIGKATAKYFFYSNIMNFFKTEITLANGEIRKRPLIETNGETGEIVWDKGRDFATVRKVLSMPQVNIVKKTEVQTGGFSKESILPKRNSDKLIARKKDWDPKKYGGFDSPTVAYSVLVVAKVEKGKSKKLKSVKELLGITIMERSSFEKNPIDFLEAKGYKEVKKDLIIKLPKYSLFELENGRKRMLASAGELQKGNELALPSKYVNFLYLASHYEKLKGSPEDNEQKQLFVEQHKHYLDEIIEQISEFSKRVILADANLDKVLSAYNKHRDKPIREQAENIIHLFTLTNLGAPAAFKYFDTTIDRKRYTSTKEVLDATLIHQSITGLYETRIDLSQLGGDGGSGSETPGTSESATPESGGMDPLQLLQPLEAEIKGTKLKAHWNSGATITCVPEAFLEDERPIQTMLIKTIHGEKQQDVYYLTFKVQGRKVEAEVLASPYDYILLNPSDVPWLMKKPLQLTVLVPLHEYQERLLQQTALPKEQKELLQKLFLKYDALWQHWENQVGHRRIKPHNIATGTLAPRPQKQYPINPKAKPSIQIVIDDLLKQGVLIQQNSTMNTPVYPVPKPDGKWRMVLDYREVNKTIPLIAAQNQHSAGILSSIYRGKYKTTLDLTNGFWAHPITPESYWLTAFTWQGKQYCWTRLPQGFLNSPALFTADVVDLLKEIPNVQAYVDDIYISHDDPQEHLEQLEKIFSILLNAGYVVSLKKSEIAQREVEFLGFNITKEGRGLTDTFKQKLLNITPPKDLKQLQSILGLLNFARNFIPNYSELVKPLYTIVANANGKFISWTEDNSNQLQHIISVLNQADNLEERNPETRLIIKVNSSPSAGYIRYYNEGSKRPIMYVNYIFSKAEAKFTQTEKLLTTMHKGLIKAMDLAMGQEILVYSPIVSMTKIQRTPLPERKALPVRWITWMTYLEDPRIQFHYDKSLPELQQIPNVTEDVIAKTKHPSEFAMVFYTDGSAIKHPDVNKSHSAGMGIAQVQFIPEYKIVHQWSIPLGDHTAQLAEIAAVEFACKKALKISGPVLIVTDSFYVAESANKELPYWKSNGFLNNKKKPLRHVSKWKSIAECLQLKPDIIIMHEKGHQQPMTTLHTEGNNLADKLATQGSYVVHAGKRTADGSEFEKRTADGSEFESPKKKAKVE

SEQ ID NO: 411 - protein, 2178 aa, synthetic construct
MPAAKRVKLDGGDKKYSIGLDIGTNSVGWAVITDEYKVPSKKFKVLGNTDRHSIKKNLIGALLFDSGETAEATRLKRTARRRYTRRKNRICYLQEIFSNEMAKVDDSFFHRLEESFLVEEDKKHERHPIFGNIVDEVAYHEKYPTIYHLRKKLVDSTDKADLRLIYLALAHMIKFRGHFLIEGDLNPDNSDVDKLFIQLVQTYNQLFEENPINASGVDAKAILSARLSKSRRLENLIAQLPGEKKNGLFGNLIALSLGLTPNFKSNFDLAEDAKLQLSKDTYDDDLDNLLAQIGDQYADLFLAAKNLSDAILLSDILRVNTEITKAPLSASMIKRYDEHHQDLTLLKALVRQQLPEKYKEIFFDQSKNGYAGYIDGGASQEEFYKFIKPILEKMDGTEELLVKLNREDLLRKQRTFDNGSIPHQIHLGELHAILRRQEDFYPFLKDNREKIEKILTFRIPYYVGPLARGNSRFAWMTRKSEETITPWNFEEVVDKGASAQSFIERMTNFDKNLPNEKVLPKHSLLYEYFTVYNELTKVKYVTEGMRKPAFLSGEQKKAIVDLLFKTNRKVTVKQLKEDYFKKIECFDSVEISGVEDRFNASLGTYHDLLKIIKDKDFLDNEENEDILEDIVLTLTLFEDREMIEERLKTYAHLFDDKVMKQLKRRRYTGWGRLSRKLINGIRDKQSGKTILDFLKSDGFANRNFMQLIHDDSLTFKEDIQKAQVSGQGDSLHEHIANLAGSPAIKKGILQTVKVVDELVKVMGRHKPENIVIEMARENQTTQKGQKNSRERMKRIEEGIKELGSQILKEHPVENTQLQNEKLYLYYLQNGRDMYVDQELDINRLSDYDVDHIVPQSFLKDDSIDNKVLTRSDKARGKSDNVPSEEVVKKMKNYWRQLLNAKLITQRKFDNLTKAERGGLSELDKAGFIKRQLVETRQITKHVAQILDSRMNTKYDENDKLIREVKVITLKSKLVSDFRKDFQFYKVREINNYHHAHDAYLNAVVGTALIKKYPKLESEFVYGDYKVYDVRKMIAKSEQEIGKATAKYFFYSNIMNFFKTEITLANGEIRKRPLIETNGETGEIVWDKGRDFATVRKVLSMPQVNIVKKTEVQTGGFSKESILPKRNSDKLIARKKDWDPKKYGGFDSPTVAYSVLVVAKVEKGKSKKLKSVKELLGITIMERSSFEKNPIDFLEAKGYKEVKKDLIIKLPKYSLFELENGRKRMLASAGELQKGNELALPSKYVNFLYLASHYEKLKGSPEDNEQKQLFVEQHKHYLDEIIEQISEFSKRVILADANLDKVLSAYNKHRDKPIREQAENIIHLFTLTNLGAPAAFKYFDTTIDRKRYTSTKEVLDATLIHQSITGLYETRIDLSQLGGDGGPAPAPAPAPAPAPGGMDPLQLLQPLEAEIKGTKLKAHWNSGATITCVPEAFLEDERPIQTMLIKTIHGEKQQDVYYLTFKVQGRKVEAEVLASPYDYILLNPSDVPWLMKKPLQLTVLVPLHEYQERLLQQTALPKEQKELLQKLFLKYDALWQHWENQVGHRRIKPHNIATGTLAPRPQKQYPINPKAKPSIQIVIDDLLKQGVLIQQNSTMNTPVYPVPKPDGKWRMVLDYREVNKTIPLIAAQNQHSAGILSSIYRGKYKTTLDLTNGFWAHPITPESYWLTAFTWQGKQYCWTRLPQGFLNSPALFTADVVDLLKEIPNVQAYVDDIYISHDDPQEHLEQLEKIFSILLNAGYVVSLKKSEIAQREVEFLGFNITKEGRGLTDTFKQKLLNITPPKDLKQLQSILGLLNFARNFIPNYSELVKPLYTIVANANGKFISWTEDNSNQLQHIISVLNQADNLEERNPETRLIIKVNSSPSAGYIRYYNEGSKRPIMYVNYIFSKAEAKFTQTEKLLTTMHKGLIKAMDLAMGQEILVYSPIVSMTKIQRTPLPERKALPVRWITWMTYLEDPRIQFHYDKSLPELQQIPNVTEDVIAKTKHPSEFAMVFYTDGSAIKHPDVNKSHSAGMGIAQVQFIPEYKIVHQWSIPLGDHTAQLAEIAAVEFACKKALKISGPVLIVTDSFYVAESANKELPYWKSNGFLNNKKKPLRHVSKWKSIAECLQLKPDIIIMHEKGHQQPMTTLHTEGNNLADKLATQGSYVVHAGKRTADGSEFEKRTADGSEFESPKKKAKVE

SEQ ID NO: 412 - protein, 2176 aa, synthetic construct
MPAAKRVKLDGGDKKYSIGLDIGTNSVGWAVITDEYKVPSKKFKVLGNTDRHSIKKNLIGALLFDSGETAEATRLKRTARRRYTRRKNRICYLQEIFSNEMAKVDDSFFHRLEESFLVEEDKKHERHPIFGNIVDEVAYHEKYPTIYHLRKKLVDSTDKADLRLIYLALAHMIKFRGHFLIEGDLNPDNSDVDKLFIQLVQTYNQLFEENPINASGVDAKAILSARLSKSRRLENLIAQLPGEKKNGLFGNLIALSLGLTPNFKSNFDLAEDAKLQLSKDTYDDDLDNLLAQIGDQYADLFLAAKNLSDAILLSDILRVNTEITKAPLSASMIKRYDEHHQDLTLLKALVRQQLPEKYKEIFFDQSKNGYAGYIDGGASQEEFYKFIKPILEKMDGTEELLVKLNREDLLRKQRTFDNGSIPHQIHLGELHAILRRQEDFYPFLKDNREKIEKILTFRIPYYVGPLARGNSRFAWMTRKSEETITPWNFEEVVDKGASAQSFIERMTNFDKNLPNEKVLPKHSLLYEYFTVYNELTKVKYVTEGMRKPAFLSGEQKKAIVDLLFKTNRKVTVKQLKEDYFKKIECFDSVEISGVEDRFNASLGTYHDLLKIIKDKDFLDNEENEDILEDIVLTLTLFEDREMIEERLKTYAHLFDDKVMKQLKRRRYTGWGRLSRKLINGIRDKQSGKTILDFLKSDGFANRNFMQLIHDDSLTFKEDIQKAQVSGQGDSLHEHIANLAGSPAIKKGILQTVKVVDELVKVMGRHKPENIVIEMARENQTTQKGQKNSRERMKRIEEGIKELGSQILKEHPVENTQLQNEKLYLYYLQNGRDMYVDQELDINRLSDYDVDHIVPQSFLKDDSIDNKVLTRSDKARGKSDNVPSEEVVKKMKNYWRQLLNAKLITQRKFDNLTKAERGGLSELDKAGFIKRQLVETRQITKHVAQILDSRMNTKYDENDKLIREVKVITLKSKLVSDFRKDFQFYKVREINNYHHAHDAYLNAVVGTALIKKYPKLESEFVYGDYKVYDVRKMIAKSEQEIGKATAKYFFYSNIMNFFKTEITLANGEIRKRPLIETNGETGEIVWDKGRDFATVRKVLSMPQVNIVKKTEVQTGGFSKESILPKRNSDKLIARKKDWDPKKYGGFDSPTVAYSVLVVAKVEKGKSKKLKSVKELLGITIMERSSFEKNPIDFLEAKGYKEVKKDLIIKLPKYSLFELENGRKRMLASAGELQKGNELALPSKYVNFLYLASHYEKLKGSPEDNEQKQLFVEQHKHYLDEIIEQISEFSKRVILADANLDKVLSAYNKHRDKPIREQAENIIHLFTLTNLGAPAAFKYFDTTIDRKRYTSTKEVLDATLIHQSITGLYETRIDLSQLGGDGGPAPEAAAKGSSGGMDPLQLLQPLEAEIKGTKLKAHWNSGATITCVPEAFLEDERPIQTMLIKTIHGEKQQDVYYLTFKVQGRKVEAEVLASPYDYILLNPSDVPWLMKKPLQLTVLVPLHEYQERLLQQTALPKEQKELLQKLFLKYDALWQHWENQVGHRRIKPHNIATGTLAPRPQKQYPINPKAKPSIQIVIDDLLKQGVLIQQNSTMNTPVYPVPKPDGKWRMVLDYREVNKTIPLIAAQNQHSAGILSSIYRGKYKTTLDLTNGFWAHPITPESYWLTAFTWQGKQYCWTRLPQGFLNSPALFTADVVDLLKEIPNVQAYVDDIYISHDDPQEHLEQLEKIFSILLNAGYVVSLKKSEIAQREVEFLGFNITKEGRGLTDTFKQKLLNITPPKDLKQLQSILGLLNFARNFIPNYSELVKPLYTIVANANGKFISWTEDNSNQLQHIISVLNQADNLEERNPETRLIIKVNSSPSAGYIRYYNEGSKRPIMYVNYIFSKAEAKFTQTEKLLTTMHKGLIKAMDLAMGQEILVYSPIVSMTKIQRTPLPERKALPVRWITWMTYLEDPRIQFHYDKSLPELQQIPNVTEDVIAKTKHPSEFAMVFYTDGSAIKHPDVNKSHSAGMGIAQVQFIPEYKIVHQWSIPLGDHTAQLAEIAAVEFACKKALKISGPVLIVTDSFYVAESANKELPYWKSNGFLNNKKKPLRHVSKWKSIAECLQLKPDIIIMHEKGHQQPMTTLHTEGNNLADKLATQGSYVVHAGKRTADGSEFEKRTADGSEFESPKKKAKVE

SEQ ID NO: 413 - protein, 2180 aa, synthetic construct
MPAAKRVKLDGGDKKYSIGLDIGTNSVGWAVITDEYKVPSKKFKVLGNTDRHSIKKNLIGALLFDSGETAEATRLKRTARRRYTRRKNRICYLQEIFSNEMAKVDDSFFHRLEESFLVEEDKKHERHPIFGNIVDEVAYHEKYPTIYHLRKKLVDSTDKADLRLIYLALAHMIKFRGHFLIEGDLNPDNSDVDKLFIQLVQTYNQLFEENPINASGVDAKAILSARLSKSRRLENLIAQLPGEKKNGLFGNLIALSLGLTPNFKSNFDLAEDAKLQLSKDTYDDDLDNLLAQIGDQYADLFLAAKNLSDAILLSDILRVNTEITKAPLSASMIKRYDEHHQDLTLLKALVRQQLPEKYKEIFFDQSKNGYAGYIDGGASQEEFYKFIKPILEKMDGTEELLVKLNREDLLRKQRTFDNGSIPHQIHLGELHAILRRQEDFYPFLKDNREKIEKILTFRIPYYVGPLARGNSRFAWMTRKSEETITPWNFEEVVDKGASAQSFIERMTNFDKNLPNEKVLPKHSLLYEYFTVYNELTKVKYVTEGMRKPAFLSGEQKKAIVDLLFKTNRKVTVKQLKEDYFKKIECFDSVEISGVEDRFNASLGTYHDLLKIIKDKDFLDNEENEDILEDIVLTLTLFEDREMIEERLKTYAHLFDDKVMKQLKRRRYTGWGRLSRKLINGIRDKQSGKTILDFLKSDGFANRNFMQLIHDDSLTFKEDIQKAQVSGQGDSLHEHIANLAGSPAIKKGILQTVKVVDELVKVMGRHKPENIVIEMARENQTTQKGQKNSRERMKRIEEGIKELGSQILKEHPVENTQLQNEKLYLYYLQNGRDMYVDQELDINRLSDYDVDHIVPQSFLKDDSIDNKVLTRSDKARGKSDNVPSEEVVKKMKNYWRQLLNAKLITQRKFDNLTKAERGGLSELDKAGFIKRQLVETRQITKHVAQILDSRMNTKYDENDKLIREVKVITLKSKLVSDFRKDFQFYKVREINNYHHAHDAYLNAVVGTALIKKYPKLESEFVYGDYKVYDVRKMIAKSEQEIGKATAKYFFYSNIMNFFKTEITLANGEIRKRPLIETNGETGEIVWDKGRDFATVRKVLSMPQVNIVKKTEVQTGGFSKESILPKRNSDKLIARKKDWDPKKYGGFDSPTVAYSVLVVAKVEKGKSKKLKSVKELLGITIMERSSFEKNPIDFLEAKGYKEVKKDLIIKLPKYSLFELENGRKRMLASAGELQKGNELALPSKYVNFLYLASHYEKLKGSPEDNEQKQLFVEQHKHYLDEIIEQISEFSKRVILADANLDKVLSAYNKHRDKPIREQAENIIHLFTLTNLGAPAAFKYFDTTIDRKRYTSTKEVLDATLIHQSITGLYETRIDLSQLGGDGGEAAAKEAAAKEAAAKGGMDPLQLLQPLEAEIKGTKLKAHWNSGATITCVPEAFLEDERPIQTMLIKTIHGEKQQDVYYLTFKVQGRKVEAEVLASPYDYILLNPSDVPWLMKKPLQLTVLVPLHEYQERLLQQTALPKEQKELLQKLFLKYDALWQHWENQVGHRRIKPHNIATGTLAPRPQKQYPINPKAKPSIQIVIDDLLKQGVLIQQNSTMNTPVYPVPKPDGKWRMVLDYREVNKTIPLIAAQNQHSAGILSSIYRGKYKTTLDLTNGFWAHPITPESYWLTAFTWQGKQYCWTRLPQGFLNSPALFTADVVDLLKEIPNVQAYVDDIYISHDDPQEHLEQLEKIFSILLNAGYVVSLKKSEIAQREVEFLGFNITKEGRGLTDTFKQKLLNITPPKDLKQLQSILGLLNFARNFIPNYSELVKPLYTIVANANGKFISWTEDNSNQLQHIISVLNQADNLEERNPETRLIIKVNSSPSAGYIRYYNEGSKRPIMYVNYIFSKAEAKFTQTEKLLTTMHKGLIKAMDLAMGQEILVYSPIVSMTKIQRTPLPERKALPVRWITWMTYLEDPRIQFHYDKSLPELQQIPNVTEDVIAKTKHPSEFAMVFYTDGSAIKHPDVNKSHSAGMGIAQVQFIPEYKIVHQWSIPLGDHTAQLAEIAAVEFACKKALKISGPVLIVTDSFYVAESANKELPYWKSNGFLNNKKKPLRHVSKWKSIAECLQLKPDIIIMHEKGHQQPMTTLHTEGNNLADKLATQGSYVVHAGKRTADGSEFEKRTADGSEFESPKKKAKVE

SEQ ID NO: 414 - protein, 2176 aa, synthetic construct
MPAAKRVKLDGGDKKYSIGLDIGTNSVGWAVITDEYKVPSKKFKVLGNTDRHSIKKNLIGALLFDSGETAEATRLKRTARRRYTRRKNRICYLQEIFSNEMAKVDDSFFHRLEESFLVEEDKKHERHPIFGNIVDEVAYHEKYPTIYHLRKKLVDSTDKADLRLIYLALAHMIKFRGHFLIEGDLNPDNSDVDKLFIQLVQTYNQLFEENPINASGVDAKAILSARLSKSRRLENLIAQLPGEKKNGLFGNLIALSLGLTPNFKSNFDLAEDAKLQLSKDTYDDDLDNLLAQIGDQYADLFLAAKNLSDAILLSDILRVNTEITKAPLSASMIKRYDEHHQDLTLLKALVRQQLPEKYKEIFFDQSKNGYAGYIDGGASQEEFYKFIKPILEKMDGTEELLVKLNREDLLRKQRTFDNGSIPHQIHLGELHAILRRQEDFYPFLKDNREKIEKILTFRIPYYVGPLARGNSRFAWMTRKSEETITPWNFEEVVDKGASAQSFIERMTNFDKNLPNEKVLPKHSLLYEYFTVYNELTKVKYVTEGMRKPAFLSGEQKKAIVDLLFKTNRKVTVKQLKEDYFKKIECFDSVEISGVEDRFNASLGTYHDLLKIIKDKDFLDNEENEDILEDIVLTLTLFEDREMIEERLKTYAHLFDDKVMKQLKRRRYTGWGRLSRKLINGIRDKQSGKTILDFLKSDGFANRNFMQLIHDDSLTFKEDIQKAQVSGQGDSLHEHIANLAGSPAIKKGILQTVKVVDELVKVMGRHKPENIVIEMARENQTTQKGQKNSRERMKRIEEGIKELGSQILKEHPVENTQLQNEKLYLYYLQNGRDMYVDQELDINRLSDYDVDHIVPQSFLKDDSIDNKVLTRSDKARGKSDNVPSEEVVKKMKNYWRQLLNAKLITQRKFDNLTKAERGGLSELDKAGFIKRQLVETRQITKHVAQILDSRMNTKYDENDKLIREVKVITLKSKLVSDFRKDFQFYKVREINNYHHAHDAYLNAVVGTALIKKYPKLESEFVYGDYKVYDVRKMIAKSEQEIGKATAKYFFYSNIMNFFKTEITLANGEIRKRPLIETNGETGEIVWDKGRDFATVRKVLSMPQVNIVKKTEVQTGGFSKESILPKRNSDKLIARKKDWDPKKYGGFDSPTVAYSVLVVAKVEKGKSKKLKSVKELLGITIMERSSFEKNPIDFLEAKGYKEVKKDLIIKLPKYSLFELENGRKRMLASAGELQKGNELALPSKYVNFLYLASHYEKLKGSPEDNEQKQLFVEQHKHYLDEIIEQISEFSKRVILADANLDKVLSAYNKHRDKPIREQAENIIHLFTLTNLGAPAAFKYFDTTIDRKRYTSTKEVLDATLIHQSITGLYETRIDLSQLGGDGGEAAAKGSSPAPGGMDPLQLLQPLEAEIKGTKLKAHWNSGATITCVPEAFLEDERPIQTMLIKTIHGEKQQDVYYLTFKVQGRKVEAEVLASPYDYILLNPSDVPWLMKKPLQLTVLVPLHEYQERLLQQTALPKEQKELLQKLFLKYDALWQHWENQVGHRRIKPHNIATGTLAPRPQKQYPINPKAKPSIQIVIDDLLKQGVLIQQNSTMNTPVYPVPKPDGKWRMVLDYREVNKTIPLIAAQNQHSAGILSSIYRGKYKTTLDLTNGFWAHPITPESYWLTAFTWQGKQYCWTRLPQGFLNSPALFTADVVDLLKEIPNVQAYVDDIYISHDDPQEHLEQLEKIFSILLNAGYVVSLKKSEIAQREVEFLGFNITKEGRGLTDTFKQKLLNITPPKDLKQLQSILGLLNFARNFIPNYSELVKPLYTIVANANGKFISWTEDNSNQLQHIISVLNQADNLEERNPETRLIIKVNSSPSAGYIRYYNEGSKRPIMYVNYIFSKAEAKFTQTEKLLTTMHKGLIKAMDLAMGQEILVYSPIVSMTKIQRTPLPERKALPVRWITWMTYLEDPRIQFHYDKSLPELQQIPNVTEDVIAKTKHPSEFAMVFYTDGSAIKHPDVNKSHSAGMGIAQVQFIPEYKIVHQWSIPLGDHTAQLAEIAAVEFACKKALKISGPVLIVTDSFYVAESANKELPYWKSNGFLNNKKKPLRHVSKWKSIAECLQLKPDIIIMHEKGHQQPMTTLHTEGNNLADKLATQGSYVVHAGKRTADGSEFEKRTADGSEFESPKKKAKVE

SEQ ID NO: 415 - protein, 2174 aa, synthetic construct
MPAAKRVKLDGGDKKYSIGLDIGTNSVGWAVITDEYKVPSKKFKVLGNTDRHSIKKNLIGALLFDSGETAEATRLKRTARRRYTRRKNRICYLQEIFSNEMAKVDDSFFHRLEESFLVEEDKKHERHPIFGNIVDEVAYHEKYPTIYHLRKKLVDSTDKADLRLIYLALAHMIKFRGHFLIEGDLNPDNSDVDKLFIQLVQTYNQLFEENPINASGVDAKAILSARLSKSRRLENLIAQLPGEKKNGLFGNLIALSLGLTPNFKSNFDLAEDAKLQLSKDTYDDDLDNLLAQIGDQYADLFLAAKNLSDAILLSDILRVNTEITKAPLSASMIKRYDEHHQDLTLLKALVRQQLPEKYKEIFFDQSKNGYAGYIDGGASQEEFYKFIKPILEKMDGTEELLVKLNREDLLRKQRTFDNGSIPHQIHLGELHAILRRQEDFYPFLKDNREKIEKILTFRIPYYVGPLARGNSRFAWMTRKSEETITPWNFEEVVDKGASAQSFIERMTNFDKNLPNEKVLPKHSLLYEYFTVYNELTKVKYVTEGMRKPAFLSGEQKKAIVDLLFKTNRKVTVKQLKEDYFKKIECFDSVEISGVEDRFNASLGTYHDLLKIIKDKDFLDNEENEDILEDIVLTLTLFEDREMIEERLKTYAHLFDDKVMKQLKRRRYTGWGRLSRKLINGIRDKQSGKTILDFLKSDGFANRNFMQLIHDDSLTFKEDIQKAQVSGQGDSLHEHIANLAGSPAIKKGILQTVKVVDELVKVMGRHKPENIVIEMARENQTTQKGQKNSRERMKRIEEGIKELGSQILKEHPVENTQLQNEKLYLYYLQNGRDMYVDQELDINRLSDYDVDHIVPQSFLKDDSIDNKVLTRSDKARGKSDNVPSEEVVKKMKNYWRQLLNAKLITQRKFDNLTKAERGGLSELDKAGFIKRQLVETRQITKHVAQILDSRMNTKYDENDKLIREVKVITLKSKLVSDFRKDFQFYKVREINNYHHAHDAYLNAVVGTALIKKYPKLESEFVYGDYKVYDVRKMIAKSEQEIGKATAKYFFYSNIMNFFKTEITLANGEIRKRPLIETNGETGEIVWDKGRDFATVRKVLSMPQVNIVKKTEVQTGGFSKESILPKRNSDKLIARKKDWDPKKYGGFDSPTVAYSVLVVAKVEKGKSKKLKSVKELLGITIMERSSFEKNPIDFLEAKGYKEVKKDLIIKLPKYSLFELENGRKRMLASAGELQKGNELALPSKYVNFLYLASHYEKLKGSPEDNEQKQLFVEQHKHYLDEIIEQISEFSKRVILADANLDKVLSAYNKHRDKPIREQAENIIHLFTLTNLGAPAAFKYFDTTIDRKRYTSTKEVLDATLIHQSITGLYETRIDLSQLGGDGGGGGPAPGSSGGMDPLQLLQPLEAEIKGTKLKAHWNSGATITCVPEAFLEDERPIQTMLIKTIHGEKQQDVYYLTFKVQGRKVEAEVLASPYDYILLNPSDVPWLMKKPLQLTVLVPLHEYQERLLQQTALPKEQKELLQKLFLKYDALWQHWENQVGHRRIKPHNIATGTLAPRPQKQYPINPKAKPSIQIVIDDLLKQGVLIQQNSTMNTPVYPVPKPDGKWRMVLDYREVNKTIPLIAAQNQHSAGILSSIYRGKYKTTLDLTNGFWAHPITPESYWLTAFTWQGKQYCWTRLPQGFLNSPALFTADVVDLLKEIPNVQAYVDDIYISHDDPQEHLEQLEKIFSILLNAGYVVSLKKSEIAQREVEFLGFNITKEGRGLTDTFKQKLLNITPPKDLKQLQSILGLLNFARNFIPNYSELVKPLYTIVANANGKFISWTEDNSNQLQHIISVLNQADNLEERNPETRLIIKVNSSPSAGYIRYYNEGSKRPIMYVNYIFSKAEAKFTQTEKLLTTMHKGLIKAMDLAMGQEILVYSPIVSMTKIQRTPLPERKALPVRWITWMTYLEDPRIQFHYDKSLPELQQIPNVTEDVIAKTKHPSEFAMVFYTDGSAIKHPDVNKSHSAGMGIAQVQFIPEYKIVHQWSIPLGDHTAQLAEIAAVEFACKKALKISGPVLIVTDSFYVAESANKELPYWKSNGFLNNKKKPLRHVSKWKSIAECLQLKPDIIIMHEKGHQQPMTTLHTEGNNLADKLATQGSYVVHAGKRTADGSEFEKRTADGSEFESPKKKAKVE

SEQ ID NO: 416 - protein, 2173 aa, synthetic construct
MPAAKRVKLDGGDKKYSIGLDIGTNSVGWAVITDEYKVPSKKFKVLGNTDRHSIKKNLIGALLFDSGETAEATRLKRTARRRYTRRKNRICYLQEIFSNEMAKVDDSFFHRLEESFLVEEDKKHERHPIFGNIVDEVAYHEKYPTIYHLRKKLVDSTDKADLRLIYLALAHMIKFRGHFLIEGDLNPDNSDVDKLFIQLVQTYNQLFEENPINASGVDAKAILSARLSKSRRLENLIAQLPGEKKNGLFGNLIALSLGLTPNFKSNFDLAEDAKLQLSKDTYDDDLDNLLAQIGDQYADLFLAAKNLSDAILLSDILRVNTEITKAPLSASMIKRYDEHHQDLTLLKALVRQQLPEKYKEIFFDQSKNGYAGYIDGGASQEEFYKFIKPILEKMDGTEELLVKLNREDLLRKQRTFDNGSIPHQIHLGELHAILRRQEDFYPFLKDNREKIEKILTFRIPYYVGPLARGNSRFAWMTRKSEETITPWNFEEVVDKGASAQSFIERMTNFDKNLPNEKVLPKHSLLYEYFTVYNELTKVKYVTEGMRKPAFLSGEQKKAIVDLLFKTNRKVTVKQLKEDYFKKIECFDSVEISGVEDRFNASLGTYHDLLKIIKDKDFLDNEENEDILEDIVLTLTLFEDREMIEERLKTYAHLFDDKVMKQLKRRRYTGWGRLSRKLINGIRDKQSGKTILDFLKSDGFANRNFMQLIHDDSLTFKEDIQKAQVSGQGDSLHEHIANLAGSPAIKKGILQTVKVVDELVKVMGRHKPENIVIEMARENQTTQKGQKNSRERMKRIEEGIKELGSQILKEHPVENTQLQNEKLYLYYLQNGRDMYVDQELDINRLSDYDVDHIVPQSFLKDDSIDNKVLTRSDKARGKSDNVPSEEVVKKMKNYWRQLLNAKLITQRKFDNLTKAERGGLSELDKAGFIKRQLVETRQITKHVAQILDSRMNTKYDENDKLIREVKVITLKSKLVSDFRKDFQFYKVREINNYHHAHDAYLNAVVGTALIKKYPKLESEFVYGDYKVYDVRKMIAKSEQEIGKATAKYFFYSNIMNFFKTEITLANGEIRKRPLIETNGETGEIVWDKGRDFATVRKVLSMPQVNIVKKTEVQTGGFSKESILPKRNSDKLIARKKDWDPKKYGGFDSPTVAYSVLVVAKVEKGKSKKLKSVKELLGITIMERSSFEKNPIDFLEAKGYKEVKKDLIIKLPKYSLFELENGRKRMLASAGELQKGNELALPSKYVNFLYLASHYEKLKGSPEDNEQKQLFVEQHKHYLDEIIEQISEFSKRVILADANLDKVLSAYNKHRDKPIREQAENIIHLFTLTNLGAPAAFKYFDTTIDRKRYTSTKEVLDATLIHQSITGLYETRIDLSQLGGDGGGGGEAAAKGGMDPLQLLQPLEAEIKGTKLKAHWNSGATITCVPEAFLEDERPIQTMLIKTIHGEKQQDVYYLTFKVQGRKVEAEVLASPYDYILLNPSDVPWLMKKPLQLTVLVPLHEYQERLLQQTALPKEQKELLQKLFLKYDALWQHWENQVGHRRIKPHNIATGTLAPRPQKQYPINPKAKPSIQIVIDDLLKQGVLIQQNSTMNTPVYPVPKPDGKWRMVLDYREVNKTIPLIAAQNQHSAGILSSIYRGKYKTTLDLTNGFWAHPITPESYWLTAFTWQGKQYCWTRLPQGFLNSPALFTADVVDLLKEIPNVQAYVDDIYISHDDPQEHLEQLEKIFSILLNAGYVVSLKKSEIAQREVEFLGFNITKEGRGLTDTFKQKLLNITPPKDLKQLQSILGLLNFARNFIPNYSELVKPLYTIVANANGKFISWTEDNSNQLQHIISVLNQADNLEERNPETRLIIKVNSSPSAGYIRYYNEGSKRPIMYVNYIFSKAEAKFTQTEKLLTTMHKGLIKAMDLAMGQEILVYSPIVSMTKIQRTPLPERKALPVRWITWMTYLEDPRIQFHYDKSLPELQQIPNVTEDVIAKTKHPSEFAMVFYTDGSAIKHPDVNKSHSAGMGIAQVQFIPEYKIVHQWSIPLGDHTAQLAEIAAVEFACKKALKISGPVLIVTDSFYVAESANKELPYWKSNGFLNNKKKPLRHVSKWKSIAECLQLKPDIIIMHEKGHQQPMTTLHTEGNNLADKLATQGSYVVHAGKRTADGSEFEKRTADGSEFESPKKKAKVE

SEQ ID NO: 417 - protein, 2176 aa, synthetic construct
MPAAKRVKLDGGDKKYSIGLDIGTNSVGWAVITDEYKVPSKKFKVLGNTDRHSIKKNLIGALLFDSGETAEATRLKRTARRRYTRRKNRICYLQEIFSNEMAKVDDSFFHRLEESFLVEEDKKHERHPIFGNIVDEVAYHEKYPTIYHLRKKLVDSTDKADLRLIYLALAHMIKFRGHFLIEGDLNPDNSDVDKLFIQLVQTYNQLFEENPINASGVDAKAILSARLSKSRRLENLIAQLPGEKKNGLFGNLIALSLGLTPNFKSNFDLAEDAKLQLSKDTYDDDLDNLLAQIGDQYADLFLAAKNLSDAILLSDILRVNTEITKAPLSASMIKRYDEHHQDLTLLKALVRQQLPEKYKEIFFDQSKNGYAGYIDGGASQEEFYKFIKPILEKMDGTEELLVKLNREDLLRKQRTFDNGSIPHQIHLGELHAILRRQEDFYPFLKDNREKIEKILTFRIPYYVGPLARGNSRFAWMTRKSEETITPWNFEEVVDKGASAQSFIERMTNFDKNLPNEKVLPKHSLLYEYFTVYNELTKVKYVTEGMRKPAFLSGEQKKAIVDLLFKTNRKVTVKQLKEDYFKKIECFDSVEISGVEDRFNASLGTYHDLLKIIKDKDFLDNEENEDILEDIVLTLTLFEDREMIEERLKTYAHLFDDKVMKQLKRRRYTGWGRLSRKLINGIRDKQSGKTILDFLKSDGFANRNFMQLIHDDSLTFKEDIQKAQVSGQGDSLHEHIANLAGSPAIKKGILQTVKVVDELVKVMGRHKPENIVIEMARENQTTQKGQKNSRERMKRIEEGIKELGSQILKEHPVENTQLQNEKLYLYYLQNGRDMYVDQELDINRLSDYDVDHIVPQSFLKDDSIDNKVLTRSDKARGKSDNVPSEEVVKKMKNYWRQLLNAKLITQRKFDNLTKAERGGLSELDKAGFIKRQLVETRQITKHVAQILDSRMNTKYDENDKLIREVKVITLKSKLVSDFRKDFQFYKVREINNYHHAHDAYLNAVVGTALIKKYPKLESEFVYGDYKVYDVRKMIAKSEQEIGKATAKYFFYSNIMNFFKTEITLANGEIRKRPLIETNGETGEIVWDKGRDFATVRKVLSMPQVNIVKKTEVQTGGFSKESILPKRNSDKLIARKKDWDPKKYGGFDSPTVAYSVLVVAKVEKGKSKKLKSVKELLGITIMERSSFEKNPIDFLEAKGYKEVKKDLIIKLPKYSLFELENGRKRMLASAGELQKGNELALPSKYVNFLYLASHYEKLKGSPEDNEQKQLFVEQHKHYLDEIIEQISEFSKRVILADANLDKVLSAYNKHRDKPIREQAENIIHLFTLTNLGAPAAFKYFDTTIDRKRYTSTKEVLDATLIHQSITGLYETRIDLSQLGGDGGGGSEAAAKPAPGGMDPLQLLQPLEAEIKGTKLKAHWNSGATITCVPEAFLEDERPIQTMLIKTIHGEKQQDVYYLTFKVQGRKVEAEVLASPYDYILLNPSDVPWLMKKPLQLTVLVPLHEYQERLLQQTALPKEQKELLQKLFLKYDALWQHWENQVGHRRIKPHNIATGTLAPRPQKQYPINPKAKPSIQIVIDDLLKQGVLIQQNSTMNTPVYPVPKPDGKWRMVLDYREVNKTIPLIAAQNQHSAGILSSIYRGKYKTTLDLTNGFWAHPITPESYWLTAFTWQGKQYCWTRLPQGFLNSPALFTADVVDLLKEIPNVQAYVDDIYISHDDPQEHLEQLEKIFSILLNAGYVVSLKKSEIAQREVEFLGFNITKEGRGLTDTFKQKLLNITPPKDLKQLQSILGLLNFARNFIPNYSELVKPLYTIVANANGKFISWTEDNSNQLQHIISVLNQADNLEERNPETRLIIKVNSSPSAGYIRYYNEGSKRPIMYVNYIFSKAEAKFTQTEKLLTTMHKGLIKAMDLAMGQEILVYSPIVSMTKIQRTPLPERKALPVRWITWMTYLEDPRIQFHYDKSLPELQQIPNVTEDVIAKTKHPSEFAMVFYTDGSAIKHPDVNKSHSAGMGIAQVQFIPEYKIVHQWSIPLGDHTAQLAEIAAVEFACKKALKISGPVLIVTDSFYVAESANKELPYWKSNGFLNNKKKPLRHVSKWKSIAECLQLKPDIIIMHEKGHQQPMTTLHTEGNNLADKLATQGSYVVHAGKRTADGSEFEKRTADGSEFESPKKKAKVE

SEQ ID NO: 418 - protein, 2177 aa, synthetic construct
MPAAKRVKLDGGDKKYSIGLDIGTNSVGWAVITDEYKVPSKKFKVLGNTDRHSIKKNLIGALLFDSGETAEATRLKRTARRRYTRRKNRICYLQEIFSNEMAKVDDSFFHRLEESFLVEEDKKHERHPIFGNIVDEVAYHEKYPTIYHLRKKLVDSTDKADLRLIYLALAHMIKFRGHFLIEGDLNPDNSDVDKLFIQLVQTYNQLFEENPINASGVDAKAILSARLSKSRRLENLIAQLPGEKKNGLFGNLIALSLGLTPNFKSNFDLAEDAKLQLSKDTYDDDLDNLLAQIGDQYADLFLAAKNLSDAILLSDILRVNTEITKAPLSASMIKRYDEHHQDLTLLKALVRQQLPEKYKEIFFDQSKNGYAGYIDGGASQEEFYKFIKPILEKMDGTEELLVKLNREDLLRKQRTFDNGSIPHQIHLGELHAILRRQEDFYPFLKDNREKIEKILTFRIPYYVGPLARGNSRFAWMTRKSEETITPWNFEEVVDKGASAQSFIERMTNFDKNLPNEKVLPKHSLLYEYFTVYNELTKVKYVTEGMRKPAFLSGEQKKAIVDLLFKTNRKVTVKQLKEDYFKKIECFDSVEISGVEDRFNASLGTYHDLLKIIKDKDFLDNEENEDILEDIVLTLTLFEDREMIEERLKTYAHLFDDKVMKQLKRRRYTGWGRLSRKLINGIRDKQSGKTILDFLKSDGFANRNFMQLIHDDSLTFKEDIQKAQVSGQGDSLHEHIANLAGSPAIKKGILQTVKVVDELVKVMGRHKPENIVIEMARENQTTQKGQKNSRERMKRIEEGIKELGSQILKEHPVENTQLQNEKLYLYYLQNGRDMYVDQELDINRLSDYDVDHIVPQSFLKDDSIDNKVLTRSDKARGKSDNVPSEEVVKKMKNYWRQLLNAKLITQRKFDNLTKAERGGLSELDKAGFIKRQLVETRQITKHVAQILDSRMNTKYDENDKLIREVKVITLKSKLVSDFRKDFQFYKVREINNYHHAHDAYLNAVVGTALIKKYPKLESEFVYGDYKVYDVRKMIAKSEQEIGKATAKYFFYSNIMNFFKTEITLANGEIRKRPLIETNGETGEIVWDKGRDFATVRKVLSMPQVNIVKKTEVQTGGFSKESILPKRNSDKLIARKKDWDPKKYGGFDSPTVAYSVLVVAKVEKGKSKKLKSVKELLGITIMERSSFEKNPIDFLEAKGYKEVKKDLIIKLPKYSLFELENGRKRMLASAGELQKGNELALPSKYVNFLYLASHYEKLKGSPEDNEQKQLFVEQHKHYLDEIIEQISEFSKRVILADANLDKVLSAYNKHRDKPIREQAENIIHLFTLTNLGAPAAFKYFDTTIDRKRYTSTKEVLDATLIHQSITGLYETRIDLSQLGGDGGGSSGSSGSSGSSGGMDPLQLLQPLEAEIKGTKLKAHWNSGATITCVPEAFLEDERPIQTMLIKTIHGEKQQDVYYLTFKVQGRKVEAEVLASPYDYILLNPSDVPWLMKKPLQLTVLVPLHEYQERLLQQTALPKEQKELLQKLFLKYDALWQHWENQVGHRRIKPHNIATGTLAPRPQKQYPINPKAKPSIQIVIDDLLKQGVLIQQNSTMNTPVYPVPKPDGKWRMVLDYREVNKTIPLIAAQNQHSAGILSSIYRGKYKTTLDLTNGFWAHPITPESYWLTAFTWQGKQYCWTRLPQGFLNSPALFTADVVDLLKEIPNVQAYVDDIYISHDDPQEHLEQLEKIFSILLNAGYVVSLKKSEIAQREVEFLGFNITKEGRGLTDTFKQKLLNITPPKDLKQLQSILGLLNFARNFIPNYSELVKPLYTIVANANGKFISWTEDNSNQLQHIISVLNQADNLEERNPETRLIIKVNSSPSAGYIRYYNEGSKRPIMYVNYIFSKAEAKFTQTEKLLTTMHKGLIKAMDLAMGQEILVYSPIVSMTKIQRTPLPERKALPVRWITWMTYLEDPRIQFHYDKSLPELQQIPNVTEDVIAKTKHPSEFAMVFYTDGSAIKHPDVNKSHSAGMGIAQVQFIPEYKIVHQWSIPLGDHTAQLAEIAAVEFACKKALKISGPVLIVTDSFYVAESANKELPYWKSNGFLNNKKKPLRHVSKWKSIAECLQLKPDIIIMHEKGHQQPMTTLHTEGNNLADKLATQGSYVVHAGKRTADGSEFEKRTADGSEFESPKKKAKVE

SEQ ID NO: 419 - protein, 2174 aa, synthetic construct
MPAAKRVKLDGGDKKYSIGLDIGTNSVGWAVITDEYKVPSKKFKVLGNTDRHSIKKNLIGALLFDSGETAEATRLKRTARRRYTRRKNRICYLQEIFSNEMAKVDDSFFHRLEESFLVEEDKKHERHPIFGNIVDEVAYHEKYPTIYHLRKKLVDSTDKADLRLIYLALAHMIKFRGHFLIEGDLNPDNSDVDKLFIQLVQTYNQLFEENPINASGVDAKAILSARLSKSRRLENLIAQLPGEKKNGLFGNLIALSLGLTPNFKSNFDLAEDAKLQLSKDTYDDDLDNLLAQIGDQYADLFLAAKNLSDAILLSDILRVNTEITKAPLSASMIKRYDEHHQDLTLLKALVRQQLPEKYKEIFFDQSKNGYAGYIDGGASQEEFYKFIKPILEKMDGTEELLVKLNREDLLRKQRTFDNGSIPHQIHLGELHAILRRQEDFYPFLKDNREKIEKILTFRIPYYVGPLARGNSRFAWMTRKSEETITPWNFEEVVDKGASAQSFIERMTNFDKNLPNEKVLPKHSLLYEYFTVYNELTKVKYVTEGMRKPAFLSGEQKKAIVDLLFKTNRKVTVKQLKEDYFKKIECFDSVEISGVEDRFNASLGTYHDLLKIIKDKDFLDNEENEDILEDIVLTLTLFEDREMIEERLKTYAHLFDDKVMKQLKRRRYTGWGRLSRKLINGIRDKQSGKTILDFLKSDGFANRNFMQLIHDDSLTFKEDIQKAQVSGQGDSLHEHIANLAGSPAIKKGILQTVKVVDELVKVMGRHKPENIVIEMARENQTTQKGQKNSRERMKRIEEGIKELGSQILKEHPVENTQLQNEKLYLYYLQNGRDMYVDQELDINRLSDYDVDHIVPQSFLKDDSIDNKVLTRSDKARGKSDNVPSEEVVKKMKNYWRQLLNAKLITQRKFDNLTKAERGGLSELDKAGFIKRQLVETRQITKHVAQILDSRMNTKYDENDKLIREVKVITLKSKLVSDFRKDFQFYKVREINNYHHAHDAYLNAVVGTALIKKYPKLESEFVYGDYKVYDVRKMIAKSEQEIGKATAKYFFYSNIMNFFKTEITLANGEIRKRPLIETNGETGEIVWDKGRDFATVRKVLSMPQVNIVKKTEVQTGGFSKESILPKRNSDKLIARKKDWDPKKYGGFDSPTVAYSVLVVAKVEKGKSKKLKSVKELLGITIMERSSFEKNPIDFLEAKGYKEVKKDLIIKLPKYSLFELENGRKRMLASAGELQKGNELALPSKYVNFLYLASHYEKLKGSPEDNEQKQLFVEQHKHYLDEIIEQISEFSKRVILADANLDKVLSAYNKHRDKPIREQAENIIHLFTLTNLGAPAAFKYFDTTIDRKRYTSTKEVLDATLIHQSITGLYETRIDLSQLGGDGGGGGGSSPAPGGMDPLQLLQPLEAEIKGTKLKAHWNSGATITCVPEAFLEDERPIQTMLIKTIHGEKQQDVYYLTFKVQGRKVEAEVLASPYDYILLNPSDVPWLMKKPLQLTVLVPLHEYQERLLQQTALPKEQKELLQKLFLKYDALWQHWENQVGHRRIKPHNIATGTLAPRPQKQYPINPKAKPSIQIVIDDLLKQGVLIQQNSTMNTPVYPVPKPDGKWRMVLDYREVNKTIPLIAAQNQHSAGILSSIYRGKYKTTLDLTNGFWAHPITPESYWLTAFTWQGKQYCWTRLPQGFLNSPALFTADVVDLLKEIPNVQAYVDDIYISHDDPQEHLEQLEKIFSILLNAGYVVSLKKSEIAQREVEFLGFNITKEGRGLTDTFKQKLLNITPPKDLKQLQSILGLLNFARNFIPNYSELVKPLYTIVANANGKFISWTEDNSNQLQHIISVLNQADNLEERNPETRLIIKVNSSPSAGYIRYYNEGSKRPIMYVNYIFSKAEAKFTQTEKLLTTMHKGLIKAMDLAMGQEILVYSPIVSMTKIQRTPLPERKALPVRWITWMTYLEDPRIQFHYDKSLPELQQIPNVTEDVIAKTKHPSEFAMVFYTDGSAIKHPDVNKSHSAGMGIAQVQFIPEYKIVHQWSIPLGDHTAQLAEIAAVEFACKKALKISGPVLIVTDSFYVAESANKELPYWKSNGFLNNKKKPLRHVSKWKSIAECLQLKPDIIIMHEKGHQQPMTTLHTEGNNLADKLATQGSYVVHAGKRTADGSEFEKRTADGSEFESPKKKAKVE

SEQ ID NO: 420 - protein, 2176 aa, synthetic construct
MPAAKRVKLDGGDKKYSIGLDIGTNSVGWAVITDEYKVPSKKFKVLGNTDRHSIKKNLIGALLFDSGETAEATRLKRTARRRYTRRKNRICYLQEIFSNEMAKVDDSFFHRLEESFLVEEDKKHERHPIFGNIVDEVAYHEKYPTIYHLRKKLVDSTDKADLRLIYLALAHMIKFRGHFLIEGDLNPDNSDVDKLFIQLVQTYNQLFEENPINASGVDAKAILSARLSKSRRLENLIAQLPGEKKNGLFGNLIALSLGLTPNFKSNFDLAEDAKLQLSKDTYDDDLDNLLAQIGDQYADLFLAAKNLSDAILLSDILRVNTEITKAPLSASMIKRYDEHHQDLTLLKALVRQQLPEKYKEIFFDQSKNGYAGYIDGGASQEEFYKFIKPILEKMDGTEELLVKLNREDLLRKQRTFDNGSIPHQIHLGELHAILRRQEDFYPFLKDNREKIEKILTFRIPYYVGPLARGNSRFAWMTRKSEETITPWNFEEVVDKGASAQSFIERMTNFDKNLPNEKVLPKHSLLYEYFTVYNELTKVKYVTEGMRKPAFLSGEQKKAIVDLLFKTNRKVTVKQLKEDYFKKIECFDSVEISGVEDRFNASLGTYHDLLKIIKDKDFLDNEENEDILEDIVLTLTLFEDREMIEERLKTYAHLFDDKVMKQLKRRRYTGWGRLSRKLINGIRDKQSGKTILDFLKSDGFANRNFMQLIHDDSLTFKEDIQKAQVSGQGDSLHEHIANLAGSPAIKKGILQTVKVVDELVKVMGRHKPENIVIEMARENQTTQKGQKNSRERMKRIEEGIKELGSQILKEHPVENTQLQNEKLYLYYLQNGRDMYVDQELDINRLSDYDVDHIVPQSFLKDDSIDNKVLTRSDKARGKSDNVPSEEVVKKMKNYWRQLLNAKLITQRKFDNLTKAERGGLSELDKAGFIKRQLVETRQITKHVAQILDSRMNTKYDENDKLIREVKVITLKSKLVSDFRKDFQFYKVREINNYHHAHDAYLNAVVGTALIKKYPKLESEFVYGDYKVYDVRKMIAKSEQEIGKATAKYFFYSNIMNFFKTEITLANGEIRKRPLIETNGETGEIVWDKGRDFATVRKVLSMPQVNIVKKTEVQTGGFSKESILPKRNSDKLIARKKDWDPKKYGGFDSPTVAYSVLVVAKVEKGKSKKLKSVKELLGITIMERSSFEKNPIDFLEAKGYKEVKKDLIIKLPKYSLFELENGRKRMLASAGELQKGNELALPSKYVNFLYLASHYEKLKGSPEDNEQKQLFVEQHKHYLDEIIEQISEFSKRVILADANLDKVLSAYNKHRDKPIREQAENIIHLFTLTNLGAPAAFKYFDTTIDRKRYTSTKEVLDATLIHQSITGLYETRIDLSQLGGDGGGGGGSSEAAAKGGMDPLQLLQPLEAEIKGTKLKAHWNSGATITCVPEAFLEDERPIQTMLIKTIHGEKQQDVYYLTFKVQGRKVEAEVLASPYDYILLNPSDVPWLMKKPLQLTVLVPLHEYQERLLQQTALPKEQKELLQKLFLKYDALWQHWENQVGHRRIKPHNIATGTLAPRPQKQYPINPKAKPSIQIVIDDLLKQGVLIQQNSTMNTPVYPVPKPDGKWRMVLDYREVNKTIPLIAAQNQHSAGILSSIYRGKYKTTLDLTNGFWAHPITPESYWLTAFTWQGKQYCWTRLPQGFLNSPALFTADVVDLLKEIPNVQAYVDDIYISHDDPQEHLEQLEKIFSILLNAGYVVSLKKSEIAQREVEFLGFNITKEGRGLTDTFKQKLLNITPPKDLKQLQSILGLLNFARNFIPNYSELVKPLYTIVANANGKFISWTEDNSNQLQHIISVLNQADNLEERNPETRLIIKVNSSPSAGYIRYYNEGSKRPIMYVNYIFSKAEAKFTQTEKLLTTMHKGLIKAMDLAMGQEILVYSPIVSMTKIQRTPLPERKALPVRWITWMTYLEDPRIQFHYDKSLPELQQIPNVTEDVIAKTKHPSEFAMVFYTDGSAIKHPDVNKSHSAGMGIAQVQFIPEYKIVHQWSIPLGDHTAQLAEIAAVEFACKKALKISGPVLIVTDSFYVAESANKELPYWKSNGFLNNKKKPLRHVSKWKSIAECLQLKPDIIIMHEKGHQQPMTTLHTEGNNLADKLATQGSYVVHAGKRTADGSEFEKRTADGSEFESPKKKAKVE

SEQ ID NO: 421 - protein, 2180 aa, synthetic construct
MPAAKRVKLDGGDKKYSIGLDIGTNSVGWAVITDEYKVPSKKFKVLGNTDRHSIKKNLIGALLFDSGETAEATRLKRTARRRYTRRKNRICYLQEIFSNEMAKVDDSFFHRLEESFLVEEDKKHERHPIFGNIVDEVAYHEKYPTIYHLRKKLVDSTDKADLRLIYLALAHMIKFRGHFLIEGDLNPDNSDVDKLFIQLVQTYNQLFEENPINASGVDAKAILSARLSKSRRLENLIAQLPGEKKNGLFGNLIALSLGLTPNFKSNFDLAEDAKLQLSKDTYDDDLDNLLAQIGDQYADLFLAAKNLSDAILLSDILRVNTEITKAPLSASMIKRYDEHHQDLTLLKALVRQQLPEKYKEIFFDQSKNGYAGYIDGGASQEEFYKFIKPILEKMDGTEELLVKLNREDLLRKQRTFDNGSIPHQIHLGELHAILRRQEDFYPFLKDNREKIEKILTFRIPYYVGPLARGNSRFAWMTRKSEETITPWNFEEVVDKGASAQSFIERMTNFDKNLPNEKVLPKHSLLYEYFTVYNELTKVKYVTEGMRKPAFLSGEQKKAIVDLLFKTNRKVTVKQLKEDYFKKIECFDSVEISGVEDRFNASLGTYHDLLKIIKDKDFLDNEENEDILEDIVLTLTLFEDREMIEERLKTYAHLFDDKVMKQLKRRRYTGWGRLSRKLINGIRDKQSGKTILDFLKSDGFANRNFMQLIHDDSLTFKEDIQKAQVSGQGDSLHEHIANLAGSPAIKKGILQTVKVVDELVKVMGRHKPENIVIEMARENQTTQKGQKNSRERMKRIEEGIKELGSQILKEHPVENTQLQNEKLYLYYLQNGRDMYVDQELDINRLSDYDVDHIVPQSFLKDDSIDNKVLTRSDKARGKSDNVPSEEVVKKMKNYWRQLLNAKLITQRKFDNLTKAERGGLSELDKAGFIKRQLVETRQITKHVAQILDSRMNTKYDENDKLIREVKVITLKSKLVSDFRKDFQFYKVREINNYHHAHDAYLNAVVGTALIKKYPKLESEFVYGDYKVYDVRKMIAKSEQEIGKATAKYFFYSNIMNFFKTEITLANGEIRKRPLIETNGETGEIVWDKGRDFATVRKVLSMPQVNIVKKTEVQTGGFSKESILPKRNSDKLIARKKDWDPKKYGGFDSPTVAYSVLVVAKVEKGKSKKLKSVKELLGITIMERSSFEKNPIDFLEAKGYKEVKKDLIIKLPKYSLFELENGRKRMLASAGELQKGNELALPSKYVNFLYLASHYEKLKGSPEDNEQKQLFVEQHKHYLDEIIEQISEFSKRVILADANLDKVLSAYNKHRDKPIREQAENIIHLFTLTNLGAPAAFKYFDTTIDRKRYTSTKEVLDATLIHQSITGLYETRIDLSQLGGDGGGGGGSEAAAKGGGGSGGMDPLQLLQPLEAEIKGTKLKAHWNSGATITCVPEAFLEDERPIQTMLIKTIHGEKQQDVYYLTFKVQGRKVEAEVLASPYDYILLNPSDVPWLMKKPLQLTVLVPLHEYQERLLQQTALPKEQKELLQKLFLKYDALWQHWENQVGHRRIKPHNIATGTLAPRPQKQYPINPKAKPSIQIVIDDLLKQGVLIQQNSTMNTPVYPVPKPDGKWRMVLDYREVNKTIPLIAAQNQHSAGILSSIYRGKYKTTLDLTNGFWAHPITPESYWLTAFTWQGKQYCWTRLPQGFLNSPALFTADVVDLLKEIPNVQAYVDDIYISHDDPQEHLEQLEKIFSILLNAGYVVSLKKSEIAQREVEFLGFNITKEGRGLTDTFKQKLLNITPPKDLKQLQSILGLLNFARNFIPNYSELVKPLYTIVANANGKFISWTEDNSNQLQHIISVLNQADNLEERNPETRLIIKVNSSPSAGYIRYYNEGSKRPIMYVNYIFSKAEAKFTQTEKLLTTMHKGLIKAMDLAMGQEILVYSPIVSMTKIQRTPLPERKALPVRWITWMTYLEDPRIQFHYDKSLPELQQIPNVTEDVIAKTKHPSEFAMVFYTDGSAIKHPDVNKSHSAGMGIAQVQFIPEYKIVHQWSIPLGDHTAQLAEIAAVEFACKKALKISGPVLIVTDSFYVAESANKELPYWKSNGFLNNKKKPLRHVSKWKSIAECLQLKPDIIIMHEKGHQQPMTTLHTEGNNLADKLATQGSYVVHAGKRTADGSEFEKRTADGSEFESPKKKAKVE

SEQ ID NO: 422 - protein, 2176 aa, synthetic construct
MPAAKRVKLDGGDKKYSIGLDIGTNSVGWAVITDEYKVPSKKFKVLGNTDRHSIKKNLIGALLFDSGETAEATRLKRTARRRYTRRKNRICYLQEIFSNEMAKVDDSFFHRLEESFLVEEDKKHERHPIFGNIVDEVAYHEKYPTIYHLRKKLVDSTDKADLRLIYLALAHMIKFRGHFLIEGDLNPDNSDVDKLFIQLVQTYNQLFEENPINASGVDAKAILSARLSKSRRLENLIAQLPGEKKNGLFGNLIALSLGLTPNFKSNFDLAEDAKLQLSKDTYDDDLDNLLAQIGDQYADLFLAAKNLSDAILLSDILRVNTEITKAPLSASMIKRYDEHHQDLTLLKALVRQQLPEKYKEIFFDQSKNGYAGYIDGGASQEEFYKFIKPILEKMDGTEELLVKLNREDLLRKQRTFDNGSIPHQIHLGELHAILRRQEDFYPFLKDNREKIEKILTFRIPYYVGPLARGNSRFAWMTRKSEETITPWNFEEVVDKGASAQSFIERMTNFDKNLPNEKVLPKHSLLYEYFTVYNELTKVKYVTEGMRKPAFLSGEQKKAIVDLLFKTNRKVTVKQLKEDYFKKIECFDSVEISGVEDRFNASLGTYHDLLKIIKDKDFLDNEENEDILEDIVLTLTLFEDREMIEERLKTYAHLFDDKVMKQLKRRRYTGWGRLSRKLINGIRDKQSGKTILDFLKSDGFANRNFMQLIHDDSLTFKEDIQKAQVSGQGDSLHEHIANLAGSPAIKKGILQTVKVVDELVKVMGRHKPENIVIEMARENQTTQKGQKNSRERMKRIEEGIKELGSQILKEHPVENTQLQNEKLYLYYLQNGRDMYVDQELDINRLSDYDVDHIVPQSFLKDDSIDNKVLTRSDKARGKSDNVPSEEVVKKMKNYWRQLLNAKLITQRKFDNLTKAERGGLSELDKAGFIKRQLVETRQITKHVAQILDSRMNTKYDENDKLIREVKVITLKSKLVSDFRKDFQFYKVREINNYHHAHDAYLNAVVGTALIKKYPKLESEFVYGDYKVYDVRKMIAKSEQEIGKATAKYFFYSNIMNFFKTEITLANGEIRKRPLIETNGETGEIVWDKGRDFATVRKVLSMPQVNIVKKTEVQTGGFSKESILPKRNSDKLIARKKDWDPKKYGGFDSPTVAYSVLVVAKVEKGKSKKLKSVKELLGITIMERSSFEKNPIDFLEAKGYKEVKKDLIIKLPKYSLFELENGRKRMLASAGELQKGNELALPSKYVNFLYLASHYEKLKGSPEDNEQKQLFVEQHKHYLDEIIEQISEFSKRVILADANLDKVLSAYNKHRDKPIREQAENIIHLFTLTNLGAPAAFKYFDTTIDRKRYTSTKEVLDATLIHQSITGLYETRIDLSQLGGDGGGGGEAAAKGGSGGMDPLQLLQPLEAEIKGTKLKAHWNSGATITCVPEAFLEDERPIQTMLIKTIHGEKQQDVYYLTFKVQGRKVEAEVLASPYDYILLNPSDVPWLMKKPLQLTVLVPLHEYQERLLQQTALPKEQKELLQKLFLKYDALWQHWENQVGHRRIKPHNIATGTLAPRPQKQYPINPKAKPSIQIVIDDLLKQGVLIQQNSTMNTPVYPVPKPDGKWRMVLDYREVNKTIPLIAAQNQHSAGILSSIYRGKYKTTLDLTNGFWAHPITPESYWLTAFTWQGKQYCWTRLPQGFLNSPALFTADVVDLLKEIPNVQAYVDDIYISHDDPQEHLEQLEKIFSILLNAGYVVSLKKSEIAQREVEFLGFNITKEGRGLTDTFKQKLLNITPPKDLKQLQSILGLLNFARNFIPNYSELVKPLYTIVANANGKFISWTEDNSNQLQHIISVLNQADNLEERNPETRLIIKVNSSPSAGYIRYYNEGSKRPIMYVNYIFSKAEAKFTQTEKLLTTMHKGLIKAMDLAMGQEILVYSPIVSMTKIQRTPLPERKALPVRWITWMTYLEDPRIQFHYDKSLPELQQIPNVTEDVIAKTKHPSEFAMVFYTDGSAIKHPDVNKSHSAGMGIAQVQFIPEYKIVHQWSIPLGDHTAQLAEIAAVEFACKKALKISGPVLIVTDSFYVAESANKELPYWKSNGFLNNKKKPLRHVSKWKSIAECLQLKPDIIIMHEKGHQQPMTTLHTEGNNLADKLATQGSYVVHAGKRTADGSEFEKRTADGSEFESPKKKAKVE

SEQ ID NO: 423 - protein, 2171 aa, synthetic construct
MPAAKRVKLDGGDKKYSIGLDIGTNSVGWAVITDEYKVPSKKFKVLGNTDRHSIKKNLIGALLFDSGETAEATRLKRTARRRYTRRKNRICYLQEIFSNEMAKVDDSFFHRLEESFLVEEDKKHERHPIFGNIVDEVAYHEKYPTIYHLRKKLVDSTDKADLRLIYLALAHMIKFRGHFLIEGDLNPDNSDVDKLFIQLVQTYNQLFEENPINASGVDAKAILSARLSKSRRLENLIAQLPGEKKNGLFGNLIALSLGLTPNFKSNFDLAEDAKLQLSKDTYDDDLDNLLAQIGDQYADLFLAAKNLSDAILLSDILRVNTEITKAPLSASMIKRYDEHHQDLTLLKALVRQQLPEKYKEIFFDQSKNGYAGYIDGGASQEEFYKFIKPILEKMDGTEELLVKLNREDLLRKQRTFDNGSIPHQIHLGELHAILRRQEDFYPFLKDNREKIEKILTFRIPYYVGPLARGNSRFAWMTRKSEETITPWNFEEVVDKGASAQSFIERMTNFDKNLPNEKVLPKHSLLYEYFTVYNELTKVKYVTEGMRKPAFLSGEQKKAIVDLLFKTNRKVTVKQLKEDYFKKIECFDSVEISGVEDRFNASLGTYHDLLKIIKDKDFLDNEENEDILEDIVLTLTLFEDREMIEERLKTYAHLFDDKVMKQLKRRRYTGWGRLSRKLINGIRDKQSGKTILDFLKSDGFANRNFMQLIHDDSLTFKEDIQKAQVSGQGDSLHEHIANLAGSPAIKKGILQTVKVVDELVKVMGRHKPENIVIEMARENQTTQKGQKNSRERMKRIEEGIKELGSQILKEHPVENTQLQNEKLYLYYLQNGRDMYVDQELDINRLSDYDVDHIVPQSFLKDDSIDNKVLTRSDKARGKSDNVPSEEVVKKMKNYWRQLLNAKLITQRKFDNLTKAERGGLSELDKAGFIKRQLVETRQITKHVAQILDSRMNTKYDENDKLIREVKVITLKSKLVSDFRKDFQFYKVREINNYHHAHDAYLNAVVGTALIKKYPKLESEFVYGDYKVYDVRKMIAKSEQEIGKATAKYFFYSNIMNFFKTEITLANGEIRKRPLIETNGETGEIVWDKGRDFATVRKVLSMPQVNIVKKTEVQTGGFSKESILPKRNSDKLIARKKDWDPKKYGGFDSPTVAYSVLVVAKVEKGKSKKLKSVKELLGITIMERSSFEKNPIDFLEAKGYKEVKKDLIIKLPKYSLFELENGRKRMLASAGELQKGNELALPSKYVNFLYLASHYEKLKGSPEDNEQKQLFVEQHKHYLDEIIEQISEFSKRVILADANLDKVLSAYNKHRDKPIREQAENIIHLFTLTNLGAPAAFKYFDTTIDRKRYTSTKEVLDATLIHQSITGLYETRIDLSQLGGDGGGSSGSSGGMDPLQLLQPLEAEIKGTKLKAHWNSGATITCVPEAFLEDERPIQTMLIKTIHGEKQQDVYYLTFKVQGRKVEAEVLASPYDYILLNPSDVPWLMKKPLQLTVLVPLHEYQERLLQQTALPKEQKELLQKLFLKYDALWQHWENQVGHRRIKPHNIATGTLAPRPQKQYPINPKAKPSIQIVIDDLLKQGVLIQQNSTMNTPVYPVPKPDGKWRMVLDYREVNKTIPLIAAQNQHSAGILSSIYRGKYKTTLDLTNGFWAHPITPESYWLTAFTWQGKQYCWTRLPQGFLNSPALFTADVVDLLKEIPNVQAYVDDIYISHDDPQEHLEQLEKIFSILLNAGYVVSLKKSEIAQREVEFLGFNITKEGRGLTDTFKQKLLNITPPKDLKQLQSILGLLNFARNFIPNYSELVKPLYTIVANANGKFISWTEDNSNQLQHIISVLNQADNLEERNPETRLIIKVNSSPSAGYIRYYNEGSKRPIMYVNYIFSKAEAKFTQTEKLLTTMHKGLIKAMDLAMGQEILVYSPIVSMTKIQRTPLPERKALPVRWITWMTYLEDPRIQFHYDKSLPELQQIPNVTEDVIAKTKHPSEFAMVFYTDGSAIKHPDVNKSHSAGMGIAQVQFIPEYKIVHQWSIPLGDHTAQLAEIAAVEFACKKALKISGPVLIVTDSFYVAESANKELPYWKSNGFLNNKKKPLRHVSKWKSIAECLQLKPDIIIMHEKGHQQPMTTLHTEGNNLADKLATQGSYVVHAGKRTADGSEFEKRTADGSEFESPKKKAKVE

SEQ ID NO: 424 - protein, 2176 aa, synthetic construct
MPAAKRVKLDGGDKKYSIGLDIGTNSVGWAVITDEYKVPSKKFKVLGNTDRHSIKKNLIGALLFDSGETAEATRLKRTARRRYTRRKNRICYLQEIFSNEMAKVDDSFFHRLEESFLVEEDKKHERHPIFGNIVDEVAYHEKYPTIYHLRKKLVDSTDKADLRLIYLALAHMIKFRGHFLIEGDLNPDNSDVDKLFIQLVQTYNQLFEENPINASGVDAKAILSARLSKSRRLENLIAQLPGEKKNGLFGNLIALSLGLTPNFKSNFDLAEDAKLQLSKDTYDDDLDNLLAQIGDQYADLFLAAKNLSDAILLSDILRVNTEITKAPLSASMIKRYDEHHQDLTLLKALVRQQLPEKYKEIFFDQSKNGYAGYIDGGASQEEFYKFIKPILEKMDGTEELLVKLNREDLLRKQRTFDNGSIPHQIHLGELHAILRRQEDFYPFLKDNREKIEKILTFRIPYYVGPLARGNSRFAWMTRKSEETITPWNFEEVVDKGASAQSFIERMTNFDKNLPNEKVLPKHSLLYEYFTVYNELTKVKYVTEGMRKPAFLSGEQKKAIVDLLFKTNRKVTVKQLKEDYFKKIECFDSVEISGVEDRFNASLGTYHDLLKIIKDKDFLDNEENEDILEDIVLTLTLFEDREMIEERLKTYAHLFDDKVMKQLKRRRYTGWGRLSRKLINGIRDKQSGKTILDFLKSDGFANRNFMQLIHDDSLTFKEDIQKAQVSGQGDSLHEHIANLAGSPAIKKGILQTVKVVDELVKVMGRHKPENIVIEMARENQTTQKGQKNSRERMKRIEEGIKELGSQILKEHPVENTQLQNEKLYLYYLQNGRDMYVDQELDINRLSDYDVDHIVPQSFLKDDSIDNKVLTRSDKARGKSDNVPSEEVVKKMKNYWRQLLNAKLITQRKFDNLTKAERGGLSELDKAGFIKRQLVETRQITKHVAQILDSRMNTKYDENDKLIREVKVITLKSKLVSDFRKDFQFYKVREINNYHHAHDAYLNAVVGTALIKKYPKLESEFVYGDYKVYDVRKMIAKSEQEIGKATAKYFFYSNIMNFFKTEITLANGEIRKRPLIETNGETGEIVWDKGRDFATVRKVLSMPQVNIVKKTEVQTGGFSKESILPKRNSDKLIARKKDWDPKKYGGFDSPTVAYSVLVVAKVEKGKSKKLKSVKELLGITIMERSSFEKNPIDFLEAKGYKEVKKDLIIKLPKYSLFELENGRKRMLASAGELQKGNELALPSKYVNFLYLASHYEKLKGSPEDNEQKQLFVEQHKHYLDEIIEQISEFSKRVILADANLDKVLSAYNKHRDKPIREQAENIIHLFTLTNLGAPAAFKYFDTTIDRKRYTSTKEVLDATLIHQSITGLYETRIDLSQLGGDGGPAPGGGEAAAKGGMDPLQLLQPLEAEIKGTKLKAHWNSGATITCVPEAFLEDERPIQTMLIKTIHGEKQQDVYYLTFKVQGRKVEAEVLASPYDYILLNPSDVPWLMKKPLQLTVLVPLHEYQERLLQQTALPKEQKELLQKLFLKYDALWQHWENQVGHRRIKPHNIATGTLAPRPQKQYPINPKAKPSIQIVIDDLLKQGVLIQQNSTMNTPVYPVPKPDGKWRMVLDYREVNKTIPLIAAQNQHSAGILSSIYRGKYKTTLDLTNGFWAHPITPESYWLTAFTWQGKQYCWTRLPQGFLNSPALFTADVVDLLKEIPNVQAYVDDIYISHDDPQEHLEQLEKIFSILLNAGYVVSLKKSEIAQREVEFLGFNITKEGRGLTDTFKQKLLNITPPKDLKQLQSILGLLNFARNFIPNYSELVKPLYTIVANANGKFISWTEDNSNQLQHIISVLNQADNLEERNPETRLIIKVNSSPSAGYIRYYNEGSKRPIMYVNYIFSKAEAKFTQTEKLLTTMHKGLIKAMDLAMGQEILVYSPIVSMTKIQRTPLPERKALPVRWITWMTYLEDPRIQFHYDKSLPELQQIPNVTEDVIAKTKHPSEFAMVFYTDGSAIKHPDVNKSHSAGMGIAQVQFIPEYKIVHQWSIPLGDHTAQLAEIAAVEFACKKALKISGPVLIVTDSFYVAESANKELPYWKSNGFLNNKKKPLRHVSKWKSIAECLQLKPDIIIMHEKGHQQPMTTLHTEGNNLADKLATQGSYVVHAGKRTADGSEFEKRTADGSEFESPKKKAKVE

SEQ ID NO: 425 - protein, 2174 aa, synthetic construct
MPAAKRVKLDGGDKKYSIGLDIGTNSVGWAVITDEYKVPSKKFKVLGNTDRHSIKKNLIGALLFDSGETAEATRLKRTARRRYTRRKNRICYLQEIFSNEMAKVDDSFFHRLEESFLVEEDKKHERHPIFGNIVDEVAYHEKYPTIYHLRKKLVDSTDKADLRLIYLALAHMIKFRGHFLIEGDLNPDNSDVDKLFIQLVQTYNQLFEENPINASGVDAKAILSARLSKSRRLENLIAQLPGEKKNGLFGNLIALSLGLTPNFKSNFDLAEDAKLQLSKDTYDDDLDNLLAQIGDQYADLFLAAKNLSDAILLSDILRVNTEITKAPLSASMIKRYDEHHQDLTLLKALVRQQLPEKYKEIFFDQSKNGYAGYIDGGASQEEFYKFIKPILEKMDGTEELLVKLNREDLLRKQRTFDNGSIPHQIHLGELHAILRRQEDFYPFLKDNREKIEKILTFRIPYYVGPLARGNSRFAWMTRKSEETITPWNFEEVVDKGASAQSFIERMTNFDKNLPNEKVLPKHSLLYEYFTVYNELTKVKYVTEGMRKPAFLSGEQKKAIVDLLFKTNRKVTVKQLKEDYFKKIECFDSVEISGVEDRFNASLGTYHDLLKIIKDKDFLDNEENEDILEDIVLTLTLFEDREMIEERLKTYAHLFDDKVMKQLKRRRYTGWGRLSRKLINGIRDKQSGKTILDFLKSDGFANRNFMQLIHDDSLTFKEDIQKAQVSGQGDSLHEHIANLAGSPAIKKGILQTVKVVDELVKVMGRHKPENIVIEMARENQTTQKGQKNSRERMKRIEEGIKELGSQILKEHPVENTQLQNEKLYLYYLQNGRDMYVDQELDINRLSDYDVDHIVPQSFLKDDSIDNKVLTRSDKARGKSDNVPSEEVVKKMKNYWRQLLNAKLITQRKFDNLTKAERGGLSELDKAGFIKRQLVETRQITKHVAQILDSRMNTKYDENDKLIREVKVITLKSKLVSDFRKDFQFYKVREINNYHHAHDAYLNAVVGTALIKKYPKLESEFVYGDYKVYDVRKMIAKSEQEIGKATAKYFFYSNIMNFFKTEITLANGEIRKRPLIETNGETGEIVWDKGRDFATVRKVLSMPQVNIVKKTEVQTGGFSKESILPKRNSDKLIARKKDWDPKKYGGFDSPTVAYSVLVVAKVEKGKSKKLKSVKELLGITIMERSSFEKNPIDFLEAKGYKEVKKDLIIKLPKYSLFELENGRKRMLASAGELQKGNELALPSKYVNFLYLASHYEKLKGSPEDNEQKQLFVEQHKHYLDEIIEQISEFSKRVILADANLDKVLSAYNKHRDKPIREQAENIIHLFTLTNLGAPAAFKYFDTTIDRKRYTSTKEVLDATLIHQSITGLYETRIDLSQLGGDGGGGSGGSGGSGGMDPLQLLQPLEAEIKGTKLKAHWNSGATITCVPEAFLEDERPIQTMLIKTIHGEKQQDVYYLTFKVQGRKVEAEVLASPYDYILLNPSDVPWLMKKPLQLTVLVPLHEYQERLLQQTALPKEQKELLQKLFLKYDALWQHWENQVGHRRIKPHNIATGTLAPRPQKQYPINPKAKPSIQIVIDDLLKQGVLIQQNSTMNTPVYPVPKPDGKWRMVLDYREVNKTIPLIAAQNQHSAGILSSIYRGKYKTTLDLTNGFWAHPITPESYWLTAFTWQGKQYCWTRLPQGFLNSPALFTADVVDLLKEIPNVQAYVDDIYISHDDPQEHLEQLEKIFSILLNAGYVVSLKKSEIAQREVEFLGFNITKEGRGLTDTFKQKLLNITPPKDLKQLQSILGLLNFARNFIPNYSELVKPLYTIVANANGKFISWTEDNSNQLQHIISVLNQADNLEERNPETRLIIKVNSSPSAGYIRYYNEGSKRPIMYVNYIFSKAEAKFTQTEKLLTTMHKGLIKAMDLAMGQEILVYSPIVSMTKIQRTPLPERKALPVRWITWMTYLEDPRIQFHYDKSLPELQQIPNVTEDVIAKTKHPSEFAMVFYTDGSAIKHPDVNKSHSAGMGIAQVQFIPEYKIVHQWSIPLGDHTAQLAEIAAVEFACKKALKISGPVLIVTDSFYVAESANKELPYWKSNGFLNNKKKPLRHVSKWKSIAECLQLKPDIIIMHEKGHQQPMTTLHTEGNNLADKLATQGSYVVHAGKRTADGSEFEKRTADGSEFESPKKKAKVE

SEQ ID NO: 426 - protein, 2094 aa, synthetic construct
MPAAKRVKLDGGDKKYSIGLDIGTNSVGWAVITDEYKVPSKKFKVLGNTDRHSIKKNLIGALLFDSGETAEATRLKRTARRRYTRRKNRICYLQEIFSNEMAKVDDSFFHRLEESFLVEEDKKHERHPIFGNIVDEVAYHEKYPTIYHLRKKLVDSTDKADLRLIYLALAHMIKFRGHFLIEGDLNPDNSDVDKLFIQLVQTYNQLFEENPINASGVDAKAILSARLSKSRRLENLIAQLPGEKKNGLFGNLIALSLGLTPNFKSNFDLAEDAKLQLSKDTYDDDLDNLLAQIGDQYADLFLAAKNLSDAILLSDILRVNTEITKAPLSASMIKRYDEHHQDLTLLKALVRQQLPEKYKEIFFDQSKNGYAGYIDGGASQEEFYKFIKPILEKMDGTEELLVKLNREDLLRKQRTFDNGSIPHQIHLGELHAILRRQEDFYPFLKDNREKIEKILTFRIPYYVGPLARGNSRFAWMTRKSEETITPWNFEEVVDKGASAQSFIERMTNFDKNLPNEKVLPKHSLLYEYFTVYNELTKVKYVTEGMRKPAFLSGEQKKAIVDLLFKTNRKVTVKQLKEDYFKKIECFDSVEISGVEDRFNASLGTYHDLLKIIKDKDFLDNEENEDILEDIVLTLTLFEDREMIEERLKTYAHLFDDKVMKQLKRRRYTGWGRLSRKLINGIRDKQSGKTILDFLKSDGFANRNFMQLIHDDSLTFKEDIQKAQVSGQGDSLHEHIANLAGSPAIKKGILQTVKVVDELVKVMGRHKPENIVIEMARENQTTQKGQKNSRERMKRIEEGIKELGSQILKEHPVENTQLQNEKLYLYYLQNGRDMYVDQELDINRLSDYDVDHIVPQSFLKDDSIDNKVLTRSDKARGKSDNVPSEEVVKKMKNYWRQLLNAKLITQRKFDNLTKAERGGLSELDKAGFIKRQLVETRQITKHVAQILDSRMNTKYDENDKLIREVKVITLKSKLVSDFRKDFQFYKVREINNYHHAHDAYLNAVVGTALIKKYPKLESEFVYGDYKVYDVRKMIAKSEQEIGKATAKYFFYSNIMNFFKTEITLANGEIRKRPLIETNGETGEIVWDKGRDFATVRKVLSMPQVNIVKKTEVQTGGFSKESILPKRNSDKLIARKKDWDPKKYGGFDSPTVAYSVLVVAKVEKGKSKKLKSVKELLGITIMERSSFEKNPIDFLEAKGYKEVKKDLIIKLPKYSLFELENGRKRMLASAGELQKGNELALPSKYVNFLYLASHYEKLKGSPEDNEQKQLFVEQHKHYLDEIIEQISEFSKRVILADANLDKVLSAYNKHRDKPIREQAENIIHLFTLTNLGAPAAFKYFDTTIDRKRYTSTKEVLDATLIHQSITGLYETRIDLSQLGGDGGGSSGSSGSSGSSGSSGSSGGVPWLMKKPLQLTVLVPLHEYQERLLQQTALPKEQKELLQKLFLKYDALWQHWENQVGHRRIKPHNIATGTLAPRPQKQYPINPKAKPSIQIVIDDLLKQGVLIQQNSTMNTPVYPVPKPDGKWRMVLDYREVNKTIPLIAAQNQHSAGILSSIYRGKYKTTLDLTNGFWAHPITPESYWLTAFTWQGKQYCWTRLPQGFLNSPALFTADVVDLLKEIPNVQAYVDDIYISHDDPQEHLEQLEKIFSILLNAGYVVSLKKSEIAQREVEFLGFNITKEGRGLTDTFKQKLLNITPPKDLKQLQSILGLLNFARNFIPNYSELVKPLYTIVANANGKFISWTEDNSNQLQHIISVLNQADNLEERNPETRLIIKVNSSPSAGYIRYYNEGSKRPIMYVNYIFSKAEAKFTQTEKLLTTMHKGLIKAMDLAMGQEILVYSPIVSMTKIQRTPLPERKALPVRWITWMTYLEDPRIQFHYDKSLPELQQIPNVTEDVIAKTKHPSEFAMVFYTDGSAIKHPDVNKSHSAGMGIAQVQFIPEYKIVHQWSIPLGDHTAQLAEIAAVEFACKKALKISGPVLIVTDSFYVAESANKELPYWKSNGFLNNKKKPLRHVSKWKSIAECLQLKPDIIIMHEKGHQQPMTTLHTEGNNLADKLATQGSYVVHAGKRTADGSEFEKRTADGSEFESPKKKAKVE

SEQ ID NO: 427 - protein, 2087 aa, synthetic construct
MPAAKRVKLDGGDKKYSIGLDIGTNSVGWAVITDEYKVPSKKFKVLGNTDRHSIKKNLIGALLFDSGETAEATRLKRTARRRYTRRKNRICYLQEIFSNEMAKVDDSFFHRLEESFLVEEDKKHERHPIFGNIVDEVAYHEKYPTIYHLRKKLVDSTDKADLRLIYLALAHMIKFRGHFLIEGDLNPDNSDVDKLFIQLVQTYNQLFEENPINASGVDAKAILSARLSKSRRLENLIAQLPGEKKNGLFGNLIALSLGLTPNFKSNFDLAEDAKLQLSKDTYDDDLDNLLAQIGDQYADLFLAAKNLSDAILLSDILRVNTEITKAPLSASMIKRYDEHHQDLTLLKALVRQQLPEKYKEIFFDQSKNGYAGYIDGGASQEEFYKFIKPILEKMDGTEELLVKLNREDLLRKQRTFDNGSIPHQIHLGELHAILRRQEDFYPFLKDNREKIEKILTFRIPYYVGPLARGNSRFAWMTRKSEETITPWNFEEVVDKGASAQSFIERMTNFDKNLPNEKVLPKHSLLYEYFTVYNELTKVKYVTEGMRKPAFLSGEQKKAIVDLLFKTNRKVTVKQLKEDYFKKIECFDSVEISGVEDRFNASLGTYHDLLKIIKDKDFLDNEENEDILEDIVLTLTLFEDREMIEERLKTYAHLFDDKVMKQLKRRRYTGWGRLSRKLINGIRDKQSGKTILDFLKSDGFANRNFMQLIHDDSLTFKEDIQKAQVSGQGDSLHEHIANLAGSPAIKKGILQTVKVVDELVKVMGRHKPENIVIEMARENQTTQKGQKNSRERMKRIEEGIKELGSQILKEHPVENTQLQNEKLYLYYLQNGRDMYVDQELDINRLSDYDVDHIVPQSFLKDDSIDNKVLTRSDKARGKSDNVPSEEVVKKMKNYWRQLLNAKLITQRKFDNLTKAERGGLSELDKAGFIKRQLVETRQITKHVAQILDSRMNTKYDENDKLIREVKVITLKSKLVSDFRKDFQFYKVREINNYHHAHDAYLNAVVGTALIKKYPKLESEFVYGDYKVYDVRKMIAKSEQEIGKATAKYFFYSNIMNFFKTEITLANGEIRKRPLIETNGETGEIVWDKGRDFATVRKVLSMPQVNIVKKTEVQTGGFSKESILPKRNSDKLIARKKDWDPKKYGGFDSPTVAYSVLVVAKVEKGKSKKLKSVKELLGITIMERSSFEKNPIDFLEAKGYKEVKKDLIIKLPKYSLFELENGRKRMLASAGELQKGNELALPSKYVNFLYLASHYEKLKGSPEDNEQKQLFVEQHKHYLDEIIEQISEFSKRVILADANLDKVLSAYNKHRDKPIREQAENIIHLFTLTNLGAPAAFKYFDTTIDRKRYTSTKEVLDATLIHQSITGLYETRIDLSQLGGDGGPAPEAAAKGSSGGVPWLMKKPLQLTVLVPLHEYQERLLQQTALPKEQKELLQKLFLKYDALWQHWENQVGHRRIKPHNIATGTLAPRPQKQYPINPKAKPSIQIVIDDLLKQGVLIQQNSTMNTPVYPVPKPDGKWRMVLDYREVNKTIPLIAAQNQHSAGILSSIYRGKYKTTLDLTNGFWAHPITPESYWLTAFTWQGKQYCWTRLPQGFLNSPALFTADVVDLLKEIPNVQAYVDDIYISHDDPQEHLEQLEKIFSILLNAGYVVSLKKSEIAQREVEFLGFNITKEGRGLTDTFKQKLLNITPPKDLKQLQSILGLLNFARNFIPNYSELVKPLYTIVANANGKFISWTEDNSNQLQHIISVLNQADNLEERNPETRLIIKVNSSPSAGYIRYYNEGSKRPIMYVNYIFSKAEAKFTQTEKLLTTMHKGLIKAMDLAMGQEILVYSPIVSMTKIQRTPLPERKALPVRWITWMTYLEDPRIQFHYDKSLPELQQIPNVTEDVIAKTKHPSEFAMVFYTDGSAIKHPDVNKSHSAGMGIAQVQFIPEYKIVHQWSIPLGDHTAQLAEIAAVEFACKKALKISGPVLIVTDSFYVAESANKELPYWKSNGFLNNKKKPLRHVSKWKSIAECLQLKPDIIIMHEKGHQQPMTTLHTEGNNLADKLATQGSYVVHAGKRTADGSEFEKRTADGSEFESPKKKAKVE

SEQ ID NO: 428 - protein, 2091 aa, synthetic construct
MPAAKRVKLDGGDKKYSIGLDIGTNSVGWAVITDEYKVPSKKFKVLGNTDRHSIKKNLIGALLFDSGETAEATRLKRTARRRYTRRKNRICYLQEIFSNEMAKVDDSFFHRLEESFLVEEDKKHERHPIFGNIVDEVAYHEKYPTIYHLRKKLVDSTDKADLRLIYLALAHMIKFRGHFLIEGDLNPDNSDVDKLFIQLVQTYNQLFEENPINASGVDAKAILSARLSKSRRLENLIAQLPGEKKNGLFGNLIALSLGLTPNFKSNFDLAEDAKLQLSKDTYDDDLDNLLAQIGDQYADLFLAAKNLSDAILLSDILRVNTEITKAPLSASMIKRYDEHHQDLTLLKALVRQQLPEKYKEIFFDQSKNGYAGYIDGGASQEEFYKFIKPILEKMDGTEELLVKLNREDLLRKQRTFDNGSIPHQIHLGELHAILRRQEDFYPFLKDNREKIEKILTFRIPYYVGPLARGNSRFAWMTRKSEETITPWNFEEVVDKGASAQSFIERMTNFDKNLPNEKVLPKHSLLYEYFTVYNELTKVKYVTEGMRKPAFLSGEQKKAIVDLLFKTNRKVTVKQLKEDYFKKIECFDSVEISGVEDRFNASLGTYHDLLKIIKDKDFLDNEENEDILEDIVLTLTLFEDREMIEERLKTYAHLFDDKVMKQLKRRRYTGWGRLSRKLINGIRDKQSGKTILDFLKSDGFANRNFMQLIHDDSLTFKEDIQKAQVSGQGDSLHEHIANLAGSPAIKKGILQTVKVVDELVKVMGRHKPENIVIEMARENQTTQKGQKNSRERMKRIEEGIKELGSQILKEHPVENTQLQNEKLYLYYLQNGRDMYVDQELDINRLSDYDVDHIVPQSFLKDDSIDNKVLTRSDKARGKSDNVPSEEVVKKMKNYWRQLLNAKLITQRKFDNLTKAERGGLSELDKAGFIKRQLVETRQITKHVAQILDSRMNTKYDENDKLIREVKVITLKSKLVSDFRKDFQFYKVREINNYHHAHDAYLNAVVGTALIKKYPKLESEFVYGDYKVYDVRKMIAKSEQEIGKATAKYFFYSNIMNFFKTEITLANGEIRKRPLIETNGETGEIVWDKGRDFATVRKVLSMPQVNIVKKTEVQTGGFSKESILPKRNSDKLIARKKDWDPKKYGGFDSPTVAYSVLVVAKVEKGKSKKLKSVKELLGITIMERSSFEKNPIDFLEAKGYKEVKKDLIIKLPKYSLFELENGRKRMLASAGELQKGNELALPSKYVNFLYLASHYEKLKGSPEDNEQKQLFVEQHKHYLDEIIEQISEFSKRVILADANLDKVLSAYNKHRDKPIREQAENIIHLFTLTNLGAPAAFKYFDTTIDRKRYTSTKEVLDATLIHQSITGLYETRIDLSQLGGDGGGSSGSSGSSGSSGSSGGVPWLMKKPLQLTVLVPLHEYQERLLQQTALPKEQKELLQKLFLKYDALWQHWENQVGHRRIKPHNIATGTLAPRPQKQYPINPKAKPSIQIVIDDLLKQGVLIQQNSTMNTPVYPVPKPDGKWRMVLDYREVNKTIPLIAAQNQHSAGILSSIYRGKYKTTLDLTNGFWAHPITPESYWLTAFTWQGKQYCWTRLPQGFLNSPALFTADVVDLLKEIPNVQAYVDDIYISHDDPQEHLEQLEKIFSILLNAGYVVSLKKSEIAQREVEFLGFNITKEGRGLTDTFKQKLLNITPPKDLKQLQSILGLLNFARNFIPNYSELVKPLYTIVANANGKFISWTEDNSNQLQHIISVLNQADNLEERNPETRLIIKVNSSPSAGYIRYYNEGSKRPIMYVNYIFSKAEAKFTQTEKLLTTMHKGLIKAMDLAMGQEILVYSPIVSMTKIQRTPLPERKALPVRWITWMTYLEDPRIQFHYDKSLPELQQIPNVTEDVIAKTKHPSEFAMVFYTDGSAIKHPDVNKSHSAGMGIAQVQFIPEYKIVHQWSIPLGDHTAQLAEIAAVEFACKKALKISGPVLIVTDSFYVAESANKELPYWKSNGFLNNKKKPLRHVSKWKSIAECLQLKPDIIIMHEKGHQQPMTTLHTEGNNLADKLATQGSYVVHAGKRTADGSEFEKRTADGSEFESPKKKAKVE

SEQ ID NO: 429 - protein, 2084 aa, synthetic construct
MPAAKRVKLDGGDKKYSIGLDIGTNSVGWAVITDEYKVPSKKFKVLGNTDRHSIKKNLIGALLFDSGETAEATRLKRTARRRYTRRKNRICYLQEIFSNEMAKVDDSFFHRLEESFLVEEDKKHERHPIFGNIVDEVAYHEKYPTIYHLRKKLVDSTDKADLRLIYLALAHMIKFRGHFLIEGDLNPDNSDVDKLFIQLVQTYNQLFEENPINASGVDAKAILSARLSKSRRLENLIAQLPGEKKNGLFGNLIALSLGLTPNFKSNFDLAEDAKLQLSKDTYDDDLDNLLAQIGDQYADLFLAAKNLSDAILLSDILRVNTEITKAPLSASMIKRYDEHHQDLTLLKALVRQQLPEKYKEIFFDQSKNGYAGYIDGGASQEEFYKFIKPILEKMDGTEELLVKLNREDLLRKQRTFDNGSIPHQIHLGELHAILRRQEDFYPFLKDNREKIEKILTFRIPYYVGPLARGNSRFAWMTRKSEETITPWNFEEVVDKGASAQSFIERMTNFDKNLPNEKVLPKHSLLYEYFTVYNELTKVKYVTEGMRKPAFLSGEQKKAIVDLLFKTNRKVTVKQLKEDYFKKIECFDSVEISGVEDRFNASLGTYHDLLKIIKDKDFLDNEENEDILEDIVLTLTLFEDREMIEERLKTYAHLFDDKVMKQLKRRRYTGWGRLSRKLINGIRDKQSGKTILDFLKSDGFANRNFMQLIHDDSLTFKEDIQKAQVSGQGDSLHEHIANLAGSPAIKKGILQTVKVVDELVKVMGRHKPENIVIEMARENQTTQKGQKNSRERMKRIEEGIKELGSQILKEHPVENTQLQNEKLYLYYLQNGRDMYVDQELDINRLSDYDVDHIVPQSFLKDDSIDNKVLTRSDKARGKSDNVPSEEVVKKMKNYWRQLLNAKLITQRKFDNLTKAERGGLSELDKAGFIKRQLVETRQITKHVAQILDSRMNTKYDENDKLIREVKVITLKSKLVSDFRKDFQFYKVREINNYHHAHDAYLNAVVGTALIKKYPKLESEFVYGDYKVYDVRKMIAKSEQEIGKATAKYFFYSNIMNFFKTEITLANGEIRKRPLIETNGETGEIVWDKGRDFATVRKVLSMPQVNIVKKTEVQTGGFSKESILPKRNSDKLIARKKDWDPKKYGGFDSPTVAYSVLVVAKVEKGKSKKLKSVKELLGITIMERSSFEKNPIDFLEAKGYKEVKKDLIIKLPKYSLFELENGRKRMLASAGELQKGNELALPSKYVNFLYLASHYEKLKGSPEDNEQKQLFVEQHKHYLDEIIEQISEFSKRVILADANLDKVLSAYNKHRDKPIREQAENIIHLFTLTNLGAPAAFKYFDTTIDRKRYTSTKEVLDATLIHQSITGLYETRIDLSQLGGDGGGGGGGGGGGGVPWLMKKPLQLTVLVPLHEYQERLLQQTALPKEQKELLQKLFLKYDALWQHWENQVGHRRIKPHNIATGTLAPRPQKQYPINPKAKPSIQIVIDDLLKQGVLIQQNSTMNTPVYPVPKPDGKWRMVLDYREVNKTIPLIAAQNQHSAGILSSIYRGKYKTTLDLTNGFWAHPITPESYWLTAFTWQGKQYCWTRLPQGFLNSPALFTADVVDLLKEIPNVQAYVDDIYISHDDPQEHLEQLEKIFSILLNAGYVVSLKKSEIAQREVEFLGFNITKEGRGLTDTFKQKLLNITPPKDLKQLQSILGLLNFARNFIPNYSELVKPLYTIVANANGKFISWTEDNSNQLQHIISVLNQADNLEERNPETRLIIKVNSSPSAGYIRYYNEGSKRPIMYVNYIFSKAEAKFTQTEKLLTTMHKGLIKAMDLAMGQEILVYSPIVSMTKIQRTPLPERKALPVRWITWMTYLEDPRIQFHYDKSLPELQQIPNVTEDVIAKTKHPSEFAMVFYTDGSAIKHPDVNKSHSAGMGIAQVQFIPEYKIVHQWSIPLGDHTAQLAEIAAVEFACKKALKISGPVLIVTDSFYVAESANKELPYWKSNGFLNNKKKPLRHVSKWKSIAECLQLKPDIIIMHEKGHQQPMTTLHTEGNNLADKLATQGSYVVHAGKRTADGSEFEKRTADGSEFESPKKKAKVE

SEQ ID NO: 430 - protein, 2084 aa, synthetic construct
MPAAKRVKLDGGDKKYSIGLDIGTNSVGWAVITDEYKVPSKKFKVLGNTDRHSIKKNLIGALLFDSGETAEATRLKRTARRRYTRRKNRICYLQEIFSNEMAKVDDSFFHRLEESFLVEEDKKHERHPIFGNIVDEVAYHEKYPTIYHLRKKLVDSTDKADLRLIYLALAHMIKFRGHFLIEGDLNPDNSDVDKLFIQLVQTYNQLFEENPINASGVDAKAILSARLSKSRRLENLIAQLPGEKKNGLFGNLIALSLGLTPNFKSNFDLAEDAKLQLSKDTYDDDLDNLLAQIGDQYADLFLAAKNLSDAILLSDILRVNTEITKAPLSASMIKRYDEHHQDLTLLKALVRQQLPEKYKEIFFDQSKNGYAGYIDGGASQEEFYKFIKPILEKMDGTEELLVKLNREDLLRKQRTFDNGSIPHQIHLGELHAILRRQEDFYPFLKDNREKIEKILTFRIPYYVGPLARGNSRFAWMTRKSEETITPWNFEEVVDKGASAQSFIERMTNFDKNLPNEKVLPKHSLLYEYFTVYNELTKVKYVTEGMRKPAFLSGEQKKAIVDLLFKTNRKVTVKQLKEDYFKKIECFDSVEISGVEDRFNASLGTYHDLLKIIKDKDFLDNEENEDILEDIVLTLTLFEDREMIEERLKTYAHLFDDKVMKQLKRRRYTGWGRLSRKLINGIRDKQSGKTILDFLKSDGFANRNFMQLIHDDSLTFKEDIQKAQVSGQGDSLHEHIANLAGSPAIKKGILQTVKVVDELVKVMGRHKPENIVIEMARENQTTQKGQKNSRERMKRIEEGIKELGSQILKEHPVENTQLQNEKLYLYYLQNGRDMYVDQELDINRLSDYDVDHIVPQSFLKDDSIDNKVLTRSDKARGKSDNVPSEEVVKKMKNYWRQLLNAKLITQRKFDNLTKAERGGLSELDKAGFIKRQLVETRQITKHVAQILDSRMNTKYDENDKLIREVKVITLKSKLVSDFRKDFQFYKVREINNYHHAHDAYLNAVVGTALIKKYPKLESEFVYGDYKVYDVRKMIAKSEQEIGKATAKYFFYSNIMNFFKTEITLANGEIRKRPLIETNGETGEIVWDKGRDFATVRKVLSMPQVNIVKKTEVQTGGFSKESILPKRNSDKLIARKKDWDPKKYGGFDSPTVAYSVLVVAKVEKGKSKKLKSVKELLGITIMERSSFEKNPIDFLEAKGYKEVKKDLIIKLPKYSLFELENGRKRMLASAGELQKGNELALPSKYVNFLYLASHYEKLKGSPEDNEQKQLFVEQHKHYLDEIIEQISEFSKRVILADANLDKVLSAYNKHRDKPIREQAENIIHLFTLTNLGAPAAFKYFDTTIDRKRYTSTKEVLDATLIHQSITGLYETRIDLSQLGGDGGPAPEAAAKGGVPWLMKKPLQLTVLVPLHEYQERLLQQTALPKEQKELLQKLFLKYDALWQHWENQVGHRRIKPHNIATGTLAPRPQKQYPINPKAKPSIQIVIDDLLKQGVLIQQNSTMNTPVYPVPKPDGKWRMVLDYREVNKTIPLIAAQNQHSAGILSSIYRGKYKTTLDLTNGFWAHPITPESYWLTAFTWQGKQYCWTRLPQGFLNSPALFTADVVDLLKEIPNVQAYVDDIYISHDDPQEHLEQLEKIFSILLNAGYVVSLKKSEIAQREVEFLGFNITKEGRGLTDTFKQKLLNITPPKDLKQLQSILGLLNFARNFIPNYSELVKPLYTIVANANGKFISWTEDNSNQLQHIISVLNQADNLEERNPETRLIIKVNSSPSAGYIRYYNEGSKRPIMYVNYIFSKAEAKFTQTEKLLTTMHKGLIKAMDLAMGQEILVYSPIVSMTKIQRTPLPERKALPVRWITWMTYLEDPRIQFHYDKSLPELQQIPNVTEDVIAKTKHPSEFAMVFYTDGSAIKHPDVNKSHSAGMGIAQVQFIPEYKIVHQWSIPLGDHTAQLAEIAAVEFACKKALKISGPVLIVTDSFYVAESANKELPYWKSNGFLNNKKKPLRHVSKWKSIAECLQLKPDIIIMHEKGHQQPMTTLHTEGNNLADKLATQGSYVVHAGKRTADGSEFEKRTADGSEFESPKKKAKVE

SEQ ID NO: 431 - protein, 2082 aa, synthetic construct
MPAAKRVKLDGGDKKYSIGLDIGTNSVGWAVITDEYKVPSKKFKVLGNTDRHSIKKNLIGALLFDSGETAEATRLKRTARRRYTRRKNRICYLQEIFSNEMAKVDDSFFHRLEESFLVEEDKKHERHPIFGNIVDEVAYHEKYPTIYHLRKKLVDSTDKADLRLIYLALAHMIKFRGHFLIEGDLNPDNSDVDKLFIQLVQTYNQLFEENPINASGVDAKAILSARLSKSRRLENLIAQLPGEKKNGLFGNLIALSLGLTPNFKSNFDLAEDAKLQLSKDTYDDDLDNLLAQIGDQYADLFLAAKNLSDAILLSDILRVNTEITKAPLSASMIKRYDEHHQDLTLLKALVRQQLPEKYKEIFFDQSKNGYAGYIDGGASQEEFYKFIKPILEKMDGTEELLVKLNREDLLRKQRTFDNGSIPHQIHLGELHAILRRQEDFYPFLKDNREKIEKILTFRIPYYVGPLARGNSRFAWMTRKSEETITPWNFEEVVDKGASAQSFIERMTNFDKNLPNEKVLPKHSLLYEYFTVYNELTKVKYVTEGMRKPAFLSGEQKKAIVDLLFKTNRKVTVKQLKEDYFKKIECFDSVEISGVEDRFNASLGTYHDLLKIIKDKDFLDNEENEDILEDIVLTLTLFEDREMIEERLKTYAHLFDDKVMKQLKRRRYTGWGRLSRKLINGIRDKQSGKTILDFLKSDGFANRNFMQLIHDDSLTFKEDIQKAQVSGQGDSLHEHIANLAGSPAIKKGILQTVKVVDELVKVMGRHKPENIVIEMARENQTTQKGQKNSRERMKRIEEGIKELGSQILKEHPVENTQLQNEKLYLYYLQNGRDMYVDQELDINRLSDYDVDHIVPQSFLKDDSIDNKVLTRSDKARGKSDNVPSEEVVKKMKNYWRQLLNAKLITQRKFDNLTKAERGGLSELDKAGFIKRQLVETRQITKHVAQILDSRMNTKYDENDKLIREVKVITLKSKLVSDFRKDFQFYKVREINNYHHAHDAYLNAVVGTALIKKYPKLESEFVYGDYKVYDVRKMIAKSEQEIGKATAKYFFYSNIMNFFKTEITLANGEIRKRPLIETNGETGEIVWDKGRDFATVRKVLSMPQVNIVKKTEVQTGGFSKESILPKRNSDKLIARKKDWDPKKYGGFDSPTVAYSVLVVAKVEKGKSKKLKSVKELLGITIMERSSFEKNPIDFLEAKGYKEVKKDLIIKLPKYSLFELENGRKRMLASAGELQKGNELALPSKYVNFLYLASHYEKLKGSPEDNEQKQLFVEQHKHYLDEIIEQISEFSKRVILADANLDKVLSAYNKHRDKPIREQAENIIHLFTLTNLGAPAAFKYFDTTIDRKRYTSTKEVLDATLIHQSITGLYETRIDLSQLGGDGGGGGGGGGGVPWLMKKPLQLTVLVPLHEYQERLLQQTALPKEQKELLQKLFLKYDALWQHWENQVGHRRIKPHNIATGTLAPRPQKQYPINPKAKPSIQIVIDDLLKQGVLIQQNSTMNTPVYPVPKPDGKWRMVLDYREVNKTIPLIAAQNQHSAGILSSIYRGKYKTTLDLTNGFWAHPITPESYWLTAFTWQGKQYCWTRLPQGFLNSPALFTADVVDLLKEIPNVQAYVDDIYISHDDPQEHLEQLEKIFSILLNAGYVVSLKKSEIAQREVEFLGFNITKEGRGLTDTFKQKLLNITPPKDLKQLQSILGLLNFARNFIPNYSELVKPLYTIVANANGKFISWTEDNSNQLQHIISVLNQADNLEERNPETRLIIKVNSSPSAGYIRYYNEGSKRPIMYVNYIFSKAEAKFTQTEKLLTTMHKGLIKAMDLAMGQEILVYSPIVSMTKIQRTPLPERKALPVRWITWMTYLEDPRIQFHYDKSLPELQQIPNVTEDVIAKTKHPSEFAMVFYTDGSAIKHPDVNKSHSAGMGIAQVQFIPEYKIVHQWSIPLGDHTAQLAEIAAVEFACKKALKISGPVLIVTDSFYVAESANKELPYWKSNGFLNNKKKPLRHVSKWKSIAECLQLKPDIIIMHEKGHQQPMTTLHTEGNNLADKLATQGSYVVHAGKRTADGSEFEKRTADGSEFESPKKKAKVE

SEQ ID NO: 432 - protein, 2087 aa, synthetic construct
MPAAKRVKLDGGDKKYSIGLDIGTNSVGWAVITDEYKVPSKKFKVLGNTDRHSIKKNLIGALLFDSGETAEATRLKRTARRRYTRRKNRICYLQEIFSNEMAKVDDSFFHRLEESFLVEEDKKHERHPIFGNIVDEVAYHEKYPTIYHLRKKLVDSTDKADLRLIYLALAHMIKFRGHFLIEGDLNPDNSDVDKLFIQLVQTYNQLFEENPINASGVDAKAILSARLSKSRRLENLIAQLPGEKKNGLFGNLIALSLGLTPNFKSNFDLAEDAKLQLSKDTYDDDLDNLLAQIGDQYADLFLAAKNLSDAILLSDILRVNTEITKAPLSASMIKRYDEHHQDLTLLKALVRQQLPEKYKEIFFDQSKNGYAGYIDGGASQEEFYKFIKPILEKMDGTEELLVKLNREDLLRKQRTFDNGSIPHQIHLGELHAILRRQEDFYPFLKDNREKIEKILTFRIPYYVGPLARGNSRFAWMTRKSEETITPWNFEEVVDKGASAQSFIERMTNFDKNLPNEKVLPKHSLLYEYFTVYNELTKVKYVTEGMRKPAFLSGEQKKAIVDLLFKTNRKVTVKQLKEDYFKKIECFDSVEISGVEDRFNASLGTYHDLLKIIKDKDFLDNEENEDILEDIVLTLTLFEDREMIEERLKTYAHLFDDKVMKQLKRRRYTGWGRLSRKLINGIRDKQSGKTILDFLKSDGFANRNFMQLIHDDSLTFKEDIQKAQVSGQGDSLHEHIANLAGSPAIKKGILQTVKVVDELVKVMGRHKPENIVIEMARENQTTQKGQKNSRERMKRIEEGIKELGSQILKEHPVENTQLQNEKLYLYYLQNGRDMYVDQELDINRLSDYDVDHIVPQSFLKDDSIDNKVLTRSDKARGKSDNVPSEEVVKKMKNYWRQLLNAKLITQRKFDNLTKAERGGLSELDKAGFIKRQLVETRQITKHVAQILDSRMNTKYDENDKLIREVKVITLKSKLVSDFRKDFQFYKVREINNYHHAHDAYLNAVVGTALIKKYPKLESEFVYGDYKVYDVRKMIAKSEQEIGKATAKYFFYSNIMNFFKTEITLANGEIRKRPLIETNGETGEIVWDKGRDFATVRKVLSMPQVNIVKKTEVQTGGFSKESILPKRNSDKLIARKKDWDPKKYGGFDSPTVAYSVLVVAKVEKGKSKKLKSVKELLGITIMERSSFEKNPIDFLEAKGYKEVKKDLIIKLPKYSLFELENGRKRMLASAGELQKGNELALPSKYVNFLYLASHYEKLKGSPEDNEQKQLFVEQHKHYLDEIIEQISEFSKRVILADANLDKVLSAYNKHRDKPIREQAENIIHLFTLTNLGAPAAFKYFDTTIDRKRYTSTKEVLDATLIHQSITGLYETRIDLSQLGGDGGGGSEAAAKPAPGGVPWLMKKPLQLTVLVPLHEYQERLLQQTALPKEQKELLQKLFLKYDALWQHWENQVGHRRIKPHNIATGTLAPRPQKQYPINPKAKPSIQIVIDDLLKQGVLIQQNSTMNTPVYPVPKPDGKWRMVLDYREVNKTIPLIAAQNQHSAGILSSIYRGKYKTTLDLTNGFWAHPITPESYWLTAFTWQGKQYCWTRLPQGFLNSPALFTADVVDLLKEIPNVQAYVDDIYISHDDPQEHLEQLEKIFSILLNAGYVVSLKKSEIAQREVEFLGFNITKEGRGLTDTFKQKLLNITPPKDLKQLQSILGLLNFARNFIPNYSELVKPLYTIVANANGKFISWTEDNSNQLQHIISVLNQADNLEERNPETRLIIKVNSSPSAGYIRYYNEGSKRPIMYVNYIFSKAEAKFTQTEKLLTTMHKGLIKAMDLAMGQEILVYSPIVSMTKIQRTPLPERKALPVRWITWMTYLEDPRIQFHYDKSLPELQQIPNVTEDVIAKTKHPSEFAMVFYTDGSAIKHPDVNKSHSAGMGIAQVQFIPEYKIVHQWSIPLGDHTAQLAEIAAVEFACKKALKISGPVLIVTDSFYVAESANKELPYWKSNGFLNNKKKPLRHVSKWKSIAECLQLKPDIIIMHEKGHQQPMTTLHTEGNNLADKLATQGSYVVHAGKRTADGSEFEKRTADGSEFESPKKKAKVE

SEQ ID NO: 433 - protein, 2087 aa, synthetic construct
MPAAKRVKLDGGDKKYSIGLDIGTNSVGWAVITDEYKVPSKKFKVLGNTDRHSIKKNLIGALLFDSGETAEATRLKRTARRRYTRRKNRICYLQEIFSNEMAKVDDSFFHRLEESFLVEEDKKHERHPIFGNIVDEVAYHEKYPTIYHLRKKLVDSTDKADLRLIYLALAHMIKFRGHFLIEGDLNPDNSDVDKLFIQLVQTYNQLFEENPINASGVDAKAILSARLSKSRRLENLIAQLPGEKKNGLFGNLIALSLGLTPNFKSNFDLAEDAKLQLSKDTYDDDLDNLLAQIGDQYADLFLAAKNLSDAILLSDILRVNTEITKAPLSASMIKRYDEHHQDLTLLKALVRQQLPEKYKEIFFDQSKNGYAGYIDGGASQEEFYKFIKPILEKMDGTEELLVKLNREDLLRKQRTFDNGSIPHQIHLGELHAILRRQEDFYPFLKDNREKIEKILTFRIPYYVGPLARGNSRFAWMTRKSEETITPWNFEEVVDKGASAQSFIERMTNFDKNLPNEKVLPKHSLLYEYFTVYNELTKVKYVTEGMRKPAFLSGEQKKAIVDLLFKTNRKVTVKQLKEDYFKKIECFDSVEISGVEDRFNASLGTYHDLLKIIKDKDFLDNEENEDILEDIVLTLTLFEDREMIEERLKTYAHLFDDKVMKQLKRRRYTGWGRLSRKLINGIRDKQSGKTILDFLKSDGFANRNFMQLIHDDSLTFKEDIQKAQVSGQGDSLHEHIANLAGSPAIKKGILQTVKVVDELVKVMGRHKPENIVIEMARENQTTQKGQKNSRERMKRIEEGIKELGSQILKEHPVENTQLQNEKLYLYYLQNGRDMYVDQELDINRLSDYDVDHIVPQSFLKDDSIDNKVLTRSDKARGKSDNVPSEEVVKKMKNYWRQLLNAKLITQRKFDNLTKAERGGLSELDKAGFIKRQLVETRQITKHVAQILDSRMNTKYDENDKLIREVKVITLKSKLVSDFRKDFQFYKVREINNYHHAHDAYLNAVVGTALIKKYPKLESEFVYGDYKVYDVRKMIAKSEQEIGKATAKYFFYSNIMNFFKTEITLANGEIRKRPLIETNGETGEIVWDKGRDFATVRKVLSMPQVNIVKKTEVQTGGFSKESILPKRNSDKLIARKKDWDPKKYGGFDSPTVAYSVLVVAKVEKGKSKKLKSVKELLGITIMERSSFEKNPIDFLEAKGYKEVKKDLIIKLPKYSLFELENGRKRMLASAGELQKGNELALPSKYVNFLYLASHYEKLKGSPEDNEQKQLFVEQHKHYLDEIIEQISEFSKRVILADANLDKVLSAYNKHRDKPIREQAENIIHLFTLTNLGAPAAFKYFDTTIDRKRYTSTKEVLDATLIHQSITGLYETRIDLSQLGGDGGGGGEAAAKGSSGGVPWLMKKPLQLTVLVPLHEYQERLLQQTALPKEQKELLQKLFLKYDALWQHWENQVGHRRIKPHNIATGTLAPRPQKQYPINPKAKPSIQIVIDDLLKQGVLIQQNSTMNTPVYPVPKPDGKWRMVLDYREVNKTIPLIAAQNQHSAGILSSIYRGKYKTTLDLTNGFWAHPITPESYWLTAFTWQGKQYCWTRLPQGFLNSPALFTADVVDLLKEIPNVQAYVDDIYISHDDPQEHLEQLEKIFSILLNAGYVVSLKKSEIAQREVEFLGFNITKEGRGLTDTFKQKLLNITPPKDLKQLQSILGLLNFARNFIPNYSELVKPLYTIVANANGKFISWTEDNSNQLQHIISVLNQADNLEERNPETRLIIKVNSSPSAGYIRYYNEGSKRPIMYVNYIFSKAEAKFTQTEKLLTTMHKGLIKAMDLAMGQEILVYSPIVSMTKIQRTPLPERKALPVRWITWMTYLEDPRIQFHYDKSLPELQQIPNVTEDVIAKTKHPSEFAMVFYTDGSAIKHPDVNKSHSAGMGIAQVQFIPEYKIVHQWSIPLGDHTAQLAEIAAVEFACKKALKISGPVLIVTDSFYVAESANKELPYWKSNGFLNNKKKPLRHVSKWKSIAECLQLKPDIIIMHEKGHQQPMTTLHTEGNNLADKLATQGSYVVHAGKRTADGSEFEKRTADGSEFESPKKKAKVE

SEQ ID NO: 434 - protein, 2082 aa, synthetic construct
MPAAKRVKLDGGDKKYSIGLDIGTNSVGWAVITDEYKVPSKKFKVLGNTDRHSIKKNLIGALLFDSGETAEATRLKRTARRRYTRRKNRICYLQEIFSNEMAKVDDSFFHRLEESFLVEEDKKHERHPIFGNIVDEVAYHEKYPTIYHLRKKLVDSTDKADLRLIYLALAHMIKFRGHFLIEGDLNPDNSDVDKLFIQLVQTYNQLFEENPINASGVDAKAILSARLSKSRRLENLIAQLPGEKKNGLFGNLIALSLGLTPNFKSNFDLAEDAKLQLSKDTYDDDLDNLLAQIGDQYADLFLAAKNLSDAILLSDILRVNTEITKAPLSASMIKRYDEHHQDLTLLKALVRQQLPEKYKEIFFDQSKNGYAGYIDGGASQEEFYKFIKPILEKMDGTEELLVKLNREDLLRKQRTFDNGSIPHQIHLGELHAILRRQEDFYPFLKDNREKIEKILTFRIPYYVGPLARGNSRFAWMTRKSEETITPWNFEEVVDKGASAQSFIERMTNFDKNLPNEKVLPKHSLLYEYFTVYNELTKVKYVTEGMRKPAFLSGEQKKAIVDLLFKTNRKVTVKQLKEDYFKKIECFDSVEISGVEDRFNASLGTYHDLLKIIKDKDFLDNEENEDILEDIVLTLTLFEDREMIEERLKTYAHLFDDKVMKQLKRRRYTGWGRLSRKLINGIRDKQSGKTILDFLKSDGFANRNFMQLIHDDSLTFKEDIQKAQVSGQGDSLHEHIANLAGSPAIKKGILQTVKVVDELVKVMGRHKPENIVIEMARENQTTQKGQKNSRERMKRIEEGIKELGSQILKEHPVENTQLQNEKLYLYYLQNGRDMYVDQELDINRLSDYDVDHIVPQSFLKDDSIDNKVLTRSDKARGKSDNVPSEEVVKKMKNYWRQLLNAKLITQRKFDNLTKAERGGLSELDKAGFIKRQLVETRQITKHVAQILDSRMNTKYDENDKLIREVKVITLKSKLVSDFRKDFQFYKVREINNYHHAHDAYLNAVVGTALIKKYPKLESEFVYGDYKVYDVRKMIAKSEQEIGKATAKYFFYSNIMNFFKTEITLANGEIRKRPLIETNGETGEIVWDKGRDFATVRKVLSMPQVNIVKKTEVQTGGFSKESILPKRNSDKLIARKKDWDPKKYGGFDSPTVAYSVLVVAKVEKGKSKKLKSVKELLGITIMERSSFEKNPIDFLEAKGYKEVKKDLIIKLPKYSLFELENGRKRMLASAGELQKGNELALPSKYVNFLYLASHYEKLKGSPEDNEQKQLFVEQHKHYLDEIIEQISEFSKRVILADANLDKVLSAYNKHRDKPIREQAENIIHLFTLTNLGAPAAFKYFDTTIDRKRYTSTKEVLDATLIHQSITGLYETRIDLSQLGGDGGGSSGSSGGVPWLMKKPLQLTVLVPLHEYQERLLQQTALPKEQKELLQKLFLKYDALWQHWENQVGHRRIKPHNIATGTLAPRPQKQYPINPKAKPSIQIVIDDLLKQGVLIQQNSTMNTPVYPVPKPDGKWRMVLDYREVNKTIPLIAAQNQHSAGILSSIYRGKYKTTLDLTNGFWAHPITPESYWLTAFTWQGKQYCWTRLPQGFLNSPALFTADVVDLLKEIPNVQAYVDDIYISHDDPQEHLEQLEKIFSILLNAGYVVSLKKSEIAQREVEFLGFNITKEGRGLTDTFKQKLLNITPPKDLKQLQSILGLLNFARNFIPNYSELVKPLYTIVANANGKFISWTEDNSNQLQHIISVLNQADNLEERNPETRLIIKVNSSPSAGYIRYYNEGSKRPIMYVNYIFSKAEAKFTQTEKLLTTMHKGLIKAMDLAMGQEILVYSPIVSMTKIQRTPLPERKALPVRWITWMTYLEDPRIQFHYDKSLPELQQIPNVTEDVIAKTKHPSEFAMVFYTDGSAIKHPDVNKSHSAGMGIAQVQFIPEYKIVHQWSIPLGDHTAQLAEIAAVEFACKKALKISGPVLIVTDSFYVAESANKELPYWKSNGFLNNKKKPLRHVSKWKSIAECLQLKPDIIIMHEKGHQQPMTTLHTEGNNLADKLATQGSYVVHAGKRTADGSEFEKRTADGSEFESPKKKAKVE

SEQ ID NO: 435 - protein, 2084 aa, synthetic construct
MPAAKRVKLDGGDKKYSIGLDIGTNSVGWAVITDEYKVPSKKFKVLGNTDRHSIKKNLIGALLFDSGETAEATRLKRTARRRYTRRKNRICYLQEIFSNEMAKVDDSFFHRLEESFLVEEDKKHERHPIFGNIVDEVAYHEKYPTIYHLRKKLVDSTDKADLRLIYLALAHMIKFRGHFLIEGDLNPDNSDVDKLFIQLVQTYNQLFEENPINASGVDAKAILSARLSKSRRLENLIAQLPGEKKNGLFGNLIALSLGLTPNFKSNFDLAEDAKLQLSKDTYDDDLDNLLAQIGDQYADLFLAAKNLSDAILLSDILRVNTEITKAPLSASMIKRYDEHHQDLTLLKALVRQQLPEKYKEIFFDQSKNGYAGYIDGGASQEEFYKFIKPILEKMDGTEELLVKLNREDLLRKQRTFDNGSIPHQIHLGELHAILRRQEDFYPFLKDNREKIEKILTFRIPYYVGPLARGNSRFAWMTRKSEETITPWNFEEVVDKGASAQSFIERMTNFDKNLPNEKVLPKHSLLYEYFTVYNELTKVKYVTEGMRKPAFLSGEQKKAIVDLLFKTNRKVTVKQLKEDYFKKIECFDSVEISGVEDRFNASLGTYHDLLKIIKDKDFLDNEENEDILEDIVLTLTLFEDREMIEERLKTYAHLFDDKVMKQLKRRRYTGWGRLSRKLINGIRDKQSGKTILDFLKSDGFANRNFMQLIHDDSLTFKEDIQKAQVSGQGDSLHEHIANLAGSPAIKKGILQTVKVVDELVKVMGRHKPENIVIEMARENQTTQKGQKNSRERMKRIEEGIKELGSQILKEHPVENTQLQNEKLYLYYLQNGRDMYVDQELDINRLSDYDVDHIVPQSFLKDDSIDNKVLTRSDKARGKSDNVPSEEVVKKMKNYWRQLLNAKLITQRKFDNLTKAERGGLSELDKAGFIKRQLVETRQITKHVAQILDSRMNTKYDENDKLIREVKVITLKSKLVSDFRKDFQFYKVREINNYHHAHDAYLNAVVGTALIKKYPKLESEFVYGDYKVYDVRKMIAKSEQEIGKATAKYFFYSNIMNFFKTEITLANGEIRKRPLIETNGETGEIVWDKGRDFATVRKVLSMPQVNIVKKTEVQTGGFSKESILPKRNSDKLIARKKDWDPKKYGGFDSPTVAYSVLVVAKVEKGKSKKLKSVKELLGITIMERSSFEKNPIDFLEAKGYKEVKKDLIIKLPKYSLFELENGRKRMLASAGELQKGNELALPSKYVNFLYLASHYEKLKGSPEDNEQKQLFVEQHKHYLDEIIEQISEFSKRVILADANLDKVLSAYNKHRDKPIREQAENIIHLFTLTNLGAPAAFKYFDTTIDRKRYTSTKEVLDATLIHQSITGLYETRIDLSQLGGDGGGGGEAAAKGGVPWLMKKPLQLTVLVPLHEYQERLLQQTALPKEQKELLQKLFLKYDALWQHWENQVGHRRIKPHNIATGTLAPRPQKQYPINPKAKPSIQIVIDDLLKQGVLIQQNSTMNTPVYPVPKPDGKWRMVLDYREVNKTIPLIAAQNQHSAGILSSIYRGKYKTTLDLTNGFWAHPITPESYWLTAFTWQGKQYCWTRLPQGFLNSPALFTADVVDLLKEIPNVQAYVDDIYISHDDPQEHLEQLEKIFSILLNAGYVVSLKKSEIAQREVEFLGFNITKEGRGLTDTFKQKLLNITPPKDLKQLQSILGLLNFARNFIPNYSELVKPLYTIVANANGKFISWTEDNSNQLQHIISVLNQADNLEERNPETRLIIKVNSSPSAGYIRYYNEGSKRPIMYVNYIFSKAEAKFTQTEKLLTTMHKGLIKAMDLAMGQEILVYSPIVSMTKIQRTPLPERKALPVRWITWMTYLEDPRIQFHYDKSLPELQQIPNVTEDVIAKTKHPSEFAMVFYTDGSAIKHPDVNKSHSAGMGIAQVQFIPEYKIVHQWSIPLGDHTAQLAEIAAVEFACKKALKISGPVLIVTDSFYVAESANKELPYWKSNGFLNNKKKPLRHVSKWKSIAECLQLKPDIIIMHEKGHQQPMTTLHTEGNNLADKLATQGSYVVHAGKRTADGSEFEKRTADGSEFESPKKKAKVE

SEQ ID NO: 436 - protein, 2087 aa, synthetic construct
MPAAKRVKLDGGDKKYSIGLDIGTNSVGWAVITDEYKVPSKKFKVLGNTDRHSIKKNLIGALLFDSGETAEATRLKRTARRRYTRRKNRICYLQEIFSNEMAKVDDSFFHRLEESFLVEEDKKHERHPIFGNIVDEVAYHEKYPTIYHLRKKLVDSTDKADLRLIYLALAHMIKFRGHFLIEGDLNPDNSDVDKLFIQLVQTYNQLFEENPINASGVDAKAILSARLSKSRRLENLIAQLPGEKKNGLFGNLIALSLGLTPNFKSNFDLAEDAKLQLSKDTYDDDLDNLLAQIGDQYADLFLAAKNLSDAILLSDILRVNTEITKAPLSASMIKRYDEHHQDLTLLKALVRQQLPEKYKEIFFDQSKNGYAGYIDGGASQEEFYKFIKPILEKMDGTEELLVKLNREDLLRKQRTFDNGSIPHQIHLGELHAILRRQEDFYPFLKDNREKIEKILTFRIPYYVGPLARGNSRFAWMTRKSEETITPWNFEEVVDKGASAQSFIERMTNFDKNLPNEKVLPKHSLLYEYFTVYNELTKVKYVTEGMRKPAFLSGEQKKAIVDLLFKTNRKVTVKQLKEDYFKKIECFDSVEISGVEDRFNASLGTYHDLLKIIKDKDFLDNEENEDILEDIVLTLTLFEDREMIEERLKTYAHLFDDKVMKQLKRRRYTGWGRLSRKLINGIRDKQSGKTILDFLKSDGFANRNFMQLIHDDSLTFKEDIQKAQVSGQGDSLHEHIANLAGSPAIKKGILQTVKVVDELVKVMGRHKPENIVIEMARENQTTQKGQKNSRERMKRIEEGIKELGSQILKEHPVENTQLQNEKLYLYYLQNGRDMYVDQELDINRLSDYDVDHIVPQSFLKDDSIDNKVLTRSDKARGKSDNVPSEEVVKKMKNYWRQLLNAKLITQRKFDNLTKAERGGLSELDKAGFIKRQLVETRQITKHVAQILDSRMNTKYDENDKLIREVKVITLKSKLVSDFRKDFQFYKVREINNYHHAHDAYLNAVVGTALIKKYPKLESEFVYGDYKVYDVRKMIAKSEQEIGKATAKYFFYSNIMNFFKTEITLANGEIRKRPLIETNGETGEIVWDKGRDFATVRKVLSMPQVNIVKKTEVQTGGFSKESILPKRNSDKLIARKKDWDPKKYGGFDSPTVAYSVLVVAKVEKGKSKKLKSVKELLGITIMERSSFEKNPIDFLEAKGYKEVKKDLIIKLPKYSLFELENGRKRMLASAGELQKGNELALPSKYVNFLYLASHYEKLKGSPEDNEQKQLFVEQHKHYLDEIIEQISEFSKRVILADANLDKVLSAYNKHRDKPIREQAENIIHLFTLTNLGAPAAFKYFDTTIDRKRYTSTKEVLDATLIHQSITGLYETRIDLSQLGGDGGPAPGGGEAAAKGGVPWLMKKPLQLTVLVPLHEYQERLLQQTALPKEQKELLQKLFLKYDALWQHWENQVGHRRIKPHNIATGTLAPRPQKQYPINPKAKPSIQIVIDDLLKQGVLIQQNSTMNTPVYPVPKPDGKWRMVLDYREVNKTIPLIAAQNQHSAGILSSIYRGKYKTTLDLTNGFWAHPITPESYWLTAFTWQGKQYCWTRLPQGFLNSPALFTADVVDLLKEIPNVQAYVDDIYISHDDPQEHLEQLEKIFSILLNAGYVVSLKKSEIAQREVEFLGFNITKEGRGLTDTFKQKLLNITPPKDLKQLQSILGLLNFARNFIPNYSELVKPLYTIVANANGKFISWTEDNSNQLQHIISVLNQADNLEERNPETRLIIKVNSSPSAGYIRYYNEGSKRPIMYVNYIFSKAEAKFTQTEKLLTTMHKGLIKAMDLAMGQEILVYSPIVSMTKIQRTPLPERKALPVRWITWMTYLEDPRIQFHYDKSLPELQQIPNVTEDVIAKTKHPSEFAMVFYTDGSAIKHPDVNKSHSAGMGIAQVQFIPEYKIVHQWSIPLGDHTAQLAEIAAVEFACKKALKISGPVLIVTDSFYVAESANKELPYWKSNGFLNNKKKPLRHVSKWKSIAECLQLKPDIIIMHEKGHQQPMTTLHTEGNNLADKLATQGSYVVHAGKRTADGSEFEKRTADGSEFESPKKKAKVE

SEQ ID NO: 437 - protein, 2094 aa, synthetic construct
MPAAKRVKLDGGDKKYSIGLDIGTNSVGWAVITDEYKVPSKKFKVLGNTDRHSIKKNLIGALLFDSGETAEATRLKRTARRRYTRRKNRICYLQEIFSNEMAKVDDSFFHRLEESFLVEEDKKHERHPIFGNIVDEVAYHEKYPTIYHLRKKLVDSTDKADLRLIYLALAHMIKFRGHFLIEGDLNPDNSDVDKLFIQLVQTYNQLFEENPINASGVDAKAILSARLSKSRRLENLIAQLPGEKKNGLFGNLIALSLGLTPNFKSNFDLAEDAKLQLSKDTYDDDLDNLLAQIGDQYADLFLAAKNLSDAILLSDILRVNTEITKAPLSASMIKRYDEHHQDLTLLKALVRQQLPEKYKEIFFDQSKNGYAGYIDGGASQEEFYKFIKPILEKMDGTEELLVKLNREDLLRKQRTFDNGSIPHQIHLGELHAILRRQEDFYPFLKDNREKIEKILTFRIPYYVGPLARGNSRFAWMTRKSEETITPWNFEEVVDKGASAQSFIERMTNFDKNLPNEKVLPKHSLLYEYFTVYNELTKVKYVTEGMRKPAFLSGEQKKAIVDLLFKTNRKVTVKQLKEDYFKKIECFDSVEISGVEDRFNASLGTYHDLLKIIKDKDFLDNEENEDILEDIVLTLTLFEDREMIEERLKTYAHLFDDKVMKQLKRRRYTGWGRLSRKLINGIRDKQSGKTILDFLKSDGFANRNFMQLIHDDSLTFKEDIQKAQVSGQGDSLHEHIANLAGSPAIKKGILQTVKVVDELVKVMGRHKPENIVIEMARENQTTQKGQKNSRERMKRIEEGIKELGSQILKEHPVENTQLQNEKLYLYYLQNGRDMYVDQELDINRLSDYDVDHIVPQSFLKDDSIDNKVLTRSDKARGKSDNVPSEEVVKKMKNYWRQLLNAKLITQRKFDNLTKAERGGLSELDKAGFIKRQLVETRQITKHVAQILDSRMNTKYDENDKLIREVKVITLKSKLVSDFRKDFQFYKVREINNYHHAHDAYLNAVVGTALIKKYPKLESEFVYGDYKVYDVRKMIAKSEQEIGKATAKYFFYSNIMNFFKTEITLANGEIRKRPLIETNGETGEIVWDKGRDFATVRKVLSMPQVNIVKKTEVQTGGFSKESILPKRNSDKLIARKKDWDPKKYGGFDSPTVAYSVLVVAKVEKGKSKKLKSVKELLGITIMERSSFEKNPIDFLEAKGYKEVKKDLIIKLPKYSLFELENGRKRMLASAGELQKGNELALPSKYVNFLYLASHYEKLKGSPEDNEQKQLFVEQHKHYLDEIIEQISEFSKRVILADANLDKVLSAYNKHRDKPIREQAENIIHLFTLTNLGAPAAFKYFDTTIDRKRYTSTKEVLDATLIHQSITGLYETRIDLSQLGGDGGGSSGSSGSSGSSGSSGSSGGVPWLMKKPLQLTVLVPLHEYQERLLQQTALPKEQKELLQKLFLKYDALWQHWENQVGHRRIKPHNIATGTLAPRPQKQYPINPKAKPSIQIVIDDLLKQGVLIQQNSTMNTPVYPVPKPDGKWRMVLDYREVNKTIPLIAAQNQHSAGILSSIYRGKYKTTLDLTNGFWAHPITPESYWLTAFTWQGKQYCWTRLPQGFLNSPALFNADVVDLLKEIPNVQAYVDDIYISHDDPQEHLEQLEKIFSILLNAGYVVSLKKSEIAQREVEFLGFNITKEGRGLTDTFKQKLLNITPPKDLKQLQSILGLLNFARNFIPNYSELVKPLYTIVAPANGKFISWTEDNSNQLQHIISVLNQADNLEERNPETRLIIKVNSSPSAGYIRYYNEGSKRPIMYVNYIFSKAEAKFTQTEKLLTTMHKGLIKAMDLAMGQEILVYSPIVSMTKIQRTPLPERKALPVRWITWMTYLEDPRIQFHYDKSLPELQQIPNVTEDVIAKTKHPSEFAMVFYTDGSAIKHPDVNKSHSAGMGIAQVQFIPEYKIVHQWSIPLGDHTAQLAEIAAVEFACKKALKISGPVLIVTDSFYVAESANKELPYWKSNGFLNNKKKPLRHVSKWKSIAECLQLKPDIIIMHEKGHQQPMTTLHTEGNNLADKLATQGSYVVHAGKRTADGSEFEKRTADGSEFESPKKKAKVE

SEQ ID NO: 438 - protein, 2087 aa, synthetic construct
MPAAKRVKLDGGDKKYSIGLDIGTNSVGWAVITDEYKVPSKKFKVLGNTDRHSIKKNLIGALLFDSGETAEATRLKRTARRRYTRRKNRICYLQEIFSNEMAKVDDSFFHRLEESFLVEEDKKHERHPIFGNIVDEVAYHEKYPTIYHLRKKLVDSTDKADLRLIYLALAHMIKFRGHFLIEGDLNPDNSDVDKLFIQLVQTYNQLFEENPINASGVDAKAILSARLSKSRRLENLIAQLPGEKKNGLFGNLIALSLGLTPNFKSNFDLAEDAKLQLSKDTYDDDLDNLLAQIGDQYADLFLAAKNLSDAILLSDILRVNTEITKAPLSASMIKRYDEHHQDLTLLKALVRQQLPEKYKEIFFDQSKNGYAGYIDGGASQEEFYKFIKPILEKMDGTEELLVKLNREDLLRKQRTFDNGSIPHQIHLGELHAILRRQEDFYPFLKDNREKIEKILTFRIPYYVGPLARGNSRFAWMTRKSEETITPWNFEEVVDKGASAQSFIERMTNFDKNLPNEKVLPKHSLLYEYFTVYNELTKVKYVTEGMRKPAFLSGEQKKAIVDLLFKTNRKVTVKQLKEDYFKKIECFDSVEISGVEDRFNASLGTYHDLLKIIKDKDFLDNEENEDILEDIVLTLTLFEDREMIEERLKTYAHLFDDKVMKQLKRRRYTGWGRLSRKLINGIRDKQSGKTILDFLKSDGFANRNFMQLIHDDSLTFKEDIQKAQVSGQGDSLHEHIANLAGSPAIKKGILQTVKVVDELVKVMGRHKPENIVIEMARENQTTQKGQKNSRERMKRIEEGIKELGSQILKEHPVENTQLQNEKLYLYYLQNGRDMYVDQELDINRLSDYDVDHIVPQSFLKDDSIDNKVLTRSDKARGKSDNVPSEEVVKKMKNYWRQLLNAKLITQRKFDNLTKAERGGLSELDKAGFIKRQLVETRQITKHVAQILDSRMNTKYDENDKLIREVKVITLKSKLVSDFRKDFQFYKVREINNYHHAHDAYLNAVVGTALIKKYPKLESEFVYGDYKVYDVRKMIAKSEQEIGKATAKYFFYSNIMNFFKTEITLANGEIRKRPLIETNGETGEIVWDKGRDFATVRKVLSMPQVNIVKKTEVQTGGFSKESILPKRNSDKLIARKKDWDPKKYGGFDSPTVAYSVLVVAKVEKGKSKKLKSVKELLGITIMERSSFEKNPIDFLEAKGYKEVKKDLIIKLPKYSLFELENGRKRMLASAGELQKGNELALPSKYVNFLYLASHYEKLKGSPEDNEQKQLFVEQHKHYLDEIIEQISEFSKRVILADANLDKVLSAYNKHRDKPIREQAENIIHLFTLTNLGAPAAFKYFDTTIDRKRYTSTKEVLDATLIHQSITGLYETRIDLSQLGGDGGGSSGGGEAAAKGGVPWLMKKPLQLTVLVPLHEYQERLLQQTALPKEQKELLQKLFLKYDALWQHWENQVGHRRIKPHNIATGTLAPRPQKQYPINPKAKPSIQIVIDDLLKQGVLIQQNSTMNTPVYPVPKPDGKWRMVLDYREVNKTIPLIAAQNQHSAGILSSIYRGKYKTTLDLTNGFWAHPITPESYWLTAFTWQGKQYCWTRLPQGFLNSPALFNADVVDLLKEIPNVQAYVDDIYISHDDPQEHLEQLEKIFSILLNAGYVVSLKKSEIAQREVEFLGFNITKEGRGLTDTFKQKLLNITPPKDLKQLQSILGLLNFARNFIPNYSELVKPLYTIVAPANGKFISWTEDNSNQLQHIISVLNQADNLEERNPETRLIIKVNSSPSAGYIRYYNEGSKRPIMYVNYIFSKAEAKFTQTEKLLTTMHKGLIKAMDLAMGQEILVYSPIVSMTKIQRTPLPERKALPVRWITWMTYLEDPRIQFHYDKSLPELQQIPNVTEDVIAKTKHPSEFAMVFYTDGSAIKHPDVNKSHSAGMGIAQVQFIPEYKIVHQWSIPLGDHTAQLAEIAAVEFACKKALKISGPVLIVTDSFYVAESANKELPYWKSNGFLNNKKKPLRHVSKWKSIAECLQLKPDIIIMHEKGHQQPMTTLHTEGNNLADKLATQGSYVVHAGKRTADGSEFEKRTADGSEFESPKKKAKVE

SEQ ID NO: 439 - protein, 2091 aa, synthetic construct
MPAAKRVKLDGGDKKYSIGLDIGTNSVGWAVITDEYKVPSKKFKVLGNTDRHSIKKNLIGALLFDSGETAEATRLKRTARRRYTRRKNRICYLQEIFSNEMAKVDDSFFHRLEESFLVEEDKKHERHPIFGNIVDEVAYHEKYPTIYHLRKKLVDSTDKADLRLIYLALAHMIKFRGHFLIEGDLNPDNSDVDKLFIQLVQTYNQLFEENPINASGVDAKAILSARLSKSRRLENLIAQLPGEKKNGLFGNLIALSLGLTPNFKSNFDLAEDAKLQLSKDTYDDDLDNLLAQIGDQYADLFLAAKNLSDAILLSDILRVNTEITKAPLSASMIKRYDEHHQDLTLLKALVRQQLPEKYKEIFFDQSKNGYAGYIDGGASQEEFYKFIKPILEKMDGTEELLVKLNREDLLRKQRTFDNGSIPHQIHLGELHAILRRQEDFYPFLKDNREKIEKILTFRIPYYVGPLARGNSRFAWMTRKSEETITPWNFEEVVDKGASAQSFIERMTNFDKNLPNEKVLPKHSLLYEYFTVYNELTKVKYVTEGMRKPAFLSGEQKKAIVDLLFKTNRKVTVKQLKEDYFKKIECFDSVEISGVEDRFNASLGTYHDLLKIIKDKDFLDNEENEDILEDIVLTLTLFEDREMIEERLKTYAHLFDDKVMKQLKRRRYTGWGRLSRKLINGIRDKQSGKTILDFLKSDGFANRNFMQLIHDDSLTFKEDIQKAQVSGQGDSLHEHIANLAGSPAIKKGILQTVKVVDELVKVMGRHKPENIVIEMARENQTTQKGQKNSRERMKRIEEGIKELGSQILKEHPVENTQLQNEKLYLYYLQNGRDMYVDQELDINRLSDYDVDHIVPQSFLKDDSIDNKVLTRSDKARGKSDNVPSEEVVKKMKNYWRQLLNAKLITQRKFDNLTKAERGGLSELDKAGFIKRQLVETRQITKHVAQILDSRMNTKYDENDKLIREVKVITLKSKLVSDFRKDFQFYKVREINNYHHAHDAYLNAVVGTALIKKYPKLESEFVYGDYKVYDVRKMIAKSEQEIGKATAKYFFYSNIMNFFKTEITLANGEIRKRPLIETNGETGEIVWDKGRDFATVRKVLSMPQVNIVKKTEVQTGGFSKESILPKRNSDKLIARKKDWDPKKYGGFDSPTVAYSVLVVAKVEKGKSKKLKSVKELLGITIMERSSFEKNPIDFLEAKGYKEVKKDLIIKLPKYSLFELENGRKRMLASAGELQKGNELALPSKYVNFLYLASHYEKLKGSPEDNEQKQLFVEQHKHYLDEIIEQISEFSKRVILADANLDKVLSAYNKHRDKPIREQAENIIHLFTLTNLGAPAAFKYFDTTIDRKRYTSTKEVLDATLIHQSITGLYETRIDLSQLGGDGGGGGGSEAAAKGGGGSGGVPWLMKKPLQLTVLVPLHEYQERLLQQTALPKEQKELLQKLFLKYDALWQHWENQVGHRRIKPHNIATGTLAPRPQKQYPINPKAKPSIQIVIDDLLKQGVLIQQNSTMNTPVYPVPKPDGKWRMVLDYREVNKTIPLIAAQNQHSAGILSSIYRGKYKTTLDLTNGFWAHPITPESYWLTAFTWQGKQYCWTRLPQGFLNSPALFNADVVDLLKEIPNVQAYVDDIYISHDDPQEHLEQLEKIFSILLNAGYVVSLKKSEIAQREVEFLGFNITKEGRGLTDTFKQKLLNITPPKDLKQLQSILGLLNFARNFIPNYSELVKPLYTIVAPANGKFISWTEDNSNQLQHIISVLNQADNLEERNPETRLIIKVNSSPSAGYIRYYNEGSKRPIMYVNYIFSKAEAKFTQTEKLLTTMHKGLIKAMDLAMGQEILVYSPIVSMTKIQRTPLPERKALPVRWITWMTYLEDPRIQFHYDKSLPELQQIPNVTEDVIAKTKHPSEFAMVFYTDGSAIKHPDVNKSHSAGMGIAQVQFIPEYKIVHQWSIPLGDHTAQLAEIAAVEFACKKALKISGPVLIVTDSFYVAESANKELPYWKSNGFLNNKKKPLRHVSKWKSIAECLQLKPDIIIMHEKGHQQPMTTLHTEGNNLADKLATQGSYVVHAGKRTADGSEFEKRTADGSEFESPKKKAKVE

SEQ ID NO: 440 - protein, 2085 aa, synthetic construct
MPAAKRVKLDGGDKKYSIGLDIGTNSVGWAVITDEYKVPSKKFKVLGNTDRHSIKKNLIGALLFDSGETAEATRLKRTARRRYTRRKNRICYLQEIFSNEMAKVDDSFFHRLEESFLVEEDKKHERHPIFGNIVDEVAYHEKYPTIYHLRKKLVDSTDKADLRLIYLALAHMIKFRGHFLIEGDLNPDNSDVDKLFIQLVQTYNQLFEENPINASGVDAKAILSARLSKSRRLENLIAQLPGEKKNGLFGNLIALSLGLTPNFKSNFDLAEDAKLQLSKDTYDDDLDNLLAQIGDQYADLFLAAKNLSDAILLSDILRVNTEITKAPLSASMIKRYDEHHQDLTLLKALVRQQLPEKYKEIFFDQSKNGYAGYIDGGASQEEFYKFIKPILEKMDGTEELLVKLNREDLLRKQRTFDNGSIPHQIHLGELHAILRRQEDFYPFLKDNREKIEKILTFRIPYYVGPLARGNSRFAWMTRKSEETITPWNFEEVVDKGASAQSFIERMTNFDKNLPNEKVLPKHSLLYEYFTVYNELTKVKYVTEGMRKPAFLSGEQKKAIVDLLFKTNRKVTVKQLKEDYFKKIECFDSVEISGVEDRFNASLGTYHDLLKIIKDKDFLDNEENEDILEDIVLTLTLFEDREMIEERLKTYAHLFDDKVMKQLKRRRYTGWGRLSRKLINGIRDKQSGKTILDFLKSDGFANRNFMQLIHDDSLTFKEDIQKAQVSGQGDSLHEHIANLAGSPAIKKGILQTVKVVDELVKVMGRHKPENIVIEMARENQTTQKGQKNSRERMKRIEEGIKELGSQILKEHPVENTQLQNEKLYLYYLQNGRDMYVDQELDINRLSDYDVDHIVPQSFLKDDSIDNKVLTRSDKARGKSDNVPSEEVVKKMKNYWRQLLNAKLITQRKFDNLTKAERGGLSELDKAGFIKRQLVETRQITKHVAQILDSRMNTKYDENDKLIREVKVITLKSKLVSDFRKDFQFYKVREINNYHHAHDAYLNAVVGTALIKKYPKLESEFVYGDYKVYDVRKMIAKSEQEIGKATAKYFFYSNIMNFFKTEITLANGEIRKRPLIETNGETGEIVWDKGRDFATVRKVLSMPQVNIVKKTEVQTGGFSKESILPKRNSDKLIARKKDWDPKKYGGFDSPTVAYSVLVVAKVEKGKSKKLKSVKELLGITIMERSSFEKNPIDFLEAKGYKEVKKDLIIKLPKYSLFELENGRKRMLASAGELQKGNELALPSKYVNFLYLASHYEKLKGSPEDNEQKQLFVEQHKHYLDEIIEQISEFSKRVILADANLDKVLSAYNKHRDKPIREQAENIIHLFTLTNLGAPAAFKYFDTTIDRKRYTSTKEVLDATLIHQSITGLYETRIDLSQLGGDGGPAPGSSGGSGGVPWLMKKPLQLTVLVPLHEYQERLLQQTALPKEQKELLQKLFLKYDALWQHWENQVGHRRIKPHNIATGTLAPRPQKQYPINPKAKPSIQIVIDDLLKQGVLIQQNSTMNTPVYPVPKPDGKWRMVLDYREVNKTIPLIAAQNQHSAGILSSIYRGKYKTTLDLTNGFWAHPITPESYWLTAFTWQGKQYCWTRLPQGFLNSPALFNADVVDLLKEIPNVQAYVDDIYISHDDPQEHLEQLEKIFSILLNAGYVVSLKKSEIAQREVEFLGFNITKEGRGLTDTFKQKLLNITPPKDLKQLQSILGLLNFARNFIPNYSELVKPLYTIVAPANGKFISWTEDNSNQLQHIISVLNQADNLEERNPETRLIIKVNSSPSAGYIRYYNEGSKRPIMYVNYIFSKAEAKFTQTEKLLTTMHKGLIKAMDLAMGQEILVYSPIVSMTKIQRTPLPERKALPVRWITWMTYLEDPRIQFHYDKSLPELQQIPNVTEDVIAKTKHPSEFAMVFYTDGSAIKHPDVNKSHSAGMGIAQVQFIPEYKIVHQWSIPLGDHTAQLAEIAAVEFACKKALKISGPVLIVTDSFYVAESANKELPYWKSNGFLNNKKKPLRHVSKWKSIAECLQLKPDIIIMHEKGHQQPMTTLHTEGNNLADKLATQGSYVVHAGKRTADGSEFEKRTADGSEFESPKKKAKVE

SEQ ID NO: 441 - protein, 2087 aa, synthetic construct
MPAAKRVKLDGGDKKYSIGLDIGTNSVGWAVITDEYKVPSKKFKVLGNTDRHSIKKNLIGALLFDSGETAEATRLKRTARRRYTRRKNRICYLQEIFSNEMAKVDDSFFHRLEESFLVEEDKKHERHPIFGNIVDEVAYHEKYPTIYHLRKKLVDSTDKADLRLIYLALAHMIKFRGHFLIEGDLNPDNSDVDKLFIQLVQTYNQLFEENPINASGVDAKAILSARLSKSRRLENLIAQLPGEKKNGLFGNLIALSLGLTPNFKSNFDLAEDAKLQLSKDTYDDDLDNLLAQIGDQYADLFLAAKNLSDAILLSDILRVNTEITKAPLSASMIKRYDEHHQDLTLLKALVRQQLPEKYKEIFFDQSKNGYAGYIDGGASQEEFYKFIKPILEKMDGTEELLVKLNREDLLRKQRTFDNGSIPHQIHLGELHAILRRQEDFYPFLKDNREKIEKILTFRIPYYVGPLARGNSRFAWMTRKSEETITPWNFEEVVDKGASAQSFIERMTNFDKNLPNEKVLPKHSLLYEYFTVYNELTKVKYVTEGMRKPAFLSGEQKKAIVDLLFKTNRKVTVKQLKEDYFKKIECFDSVEISGVEDRFNASLGTYHDLLKIIKDKDFLDNEENEDILEDIVLTLTLFEDREMIEERLKTYAHLFDDKVMKQLKRRRYTGWGRLSRKLINGIRDKQSGKTILDFLKSDGFANRNFMQLIHDDSLTFKEDIQKAQVSGQGDSLHEHIANLAGSPAIKKGILQTVKVVDELVKVMGRHKPENIVIEMARENQTTQKGQKNSRERMKRIEEGIKELGSQILKEHPVENTQLQNEKLYLYYLQNGRDMYVDQELDINRLSDYDVDHIVPQSFLKDDSIDNKVLTRSDKARGKSDNVPSEEVVKKMKNYWRQLLNAKLITQRKFDNLTKAERGGLSELDKAGFIKRQLVETRQITKHVAQILDSRMNTKYDENDKLIREVKVITLKSKLVSDFRKDFQFYKVREINNYHHAHDAYLNAVVGTALIKKYPKLESEFVYGDYKVYDVRKMIAKSEQEIGKATAKYFFYSNIMNFFKTEITLANGEIRKRPLIETNGETGEIVWDKGRDFATVRKVLSMPQVNIVKKTEVQTGGFSKESILPKRNSDKLIARKKDWDPKKYGGFDSPTVAYSVLVVAKVEKGKSKKLKSVKELLGITIMERSSFEKNPIDFLEAKGYKEVKKDLIIKLPKYSLFELENGRKRMLASAGELQKGNELALPSKYVNFLYLASHYEKLKGSPEDNEQKQLFVEQHKHYLDEIIEQISEFSKRVILADANLDKVLSAYNKHRDKPIREQAENIIHLFTLTNLGAPAAFKYFDTTIDRKRYTSTKEVLDATLIHQSITGLYETRIDLSQLGGDGGGGGEAAAKPAPGGVPWLMKKPLQLTVLVPLHEYQERLLQQTALPKEQKELLQKLFLKYDALWQHWENQVGHRRIKPHNIATGTLAPRPQKQYPINPKAKPSIQIVIDDLLKQGVLIQQNSTMNTPVYPVPKPDGKWRMVLDYREVNKTIPLIAAQNQHSAGILSSIYRGKYKTTLDLTNGFWAHPITPESYWLTAFTWQGKQYCWTRLPQGFLNSPALFNADVVDLLKEIPNVQAYVDDIYISHDDPQEHLEQLEKIFSILLNAGYVVSLKKSEIAQREVEFLGFNITKEGRGLTDTFKQKLLNITPPKDLKQLQSILGLLNFARNFIPNYSELVKPLYTIVAPANGKFISWTEDNSNQLQHIISVLNQADNLEERNPETRLIIKVNSSPSAGYIRYYNEGSKRPIMYVNYIFSKAEAKFTQTEKLLTTMHKGLIKAMDLAMGQEILVYSPIVSMTKIQRTPLPERKALPVRWITWMTYLEDPRIQFHYDKSLPELQQIPNVTEDVIAKTKHPSEFAMVFYTDGSAIKHPDVNKSHSAGMGIAQVQFIPEYKIVHQWSIPLGDHTAQLAEIAAVEFACKKALKISGPVLIVTDSFYVAESANKELPYWKSNGFLNNKKKPLRHVSKWKSIAECLQLKPDIIIMHEKGHQQPMTTLHTEGNNLADKLATQGSYVVHAGKRTADGSEFEKRTADGSEFESPKKKAKVE

SEQ ID NO: 442 - protein, 2087 aa, synthetic construct
MPAAKRVKLDGGDKKYSIGLDIGTNSVGWAVITDEYKVPSKKFKVLGNTDRHSIKKNLIGALLFDSGETAEATRLKRTARRRYTRRKNRICYLQEIFSNEMAKVDDSFFHRLEESFLVEEDKKHERHPIFGNIVDEVAYHEKYPTIYHLRKKLVDSTDKADLRLIYLALAHMIKFRGHFLIEGDLNPDNSDVDKLFIQLVQTYNQLFEENPINASGVDAKAILSARLSKSRRLENLIAQLPGEKKNGLFGNLIALSLGLTPNFKSNFDLAEDAKLQLSKDTYDDDLDNLLAQIGDQYADLFLAAKNLSDAILLSDILRVNTEITKAPLSASMIKRYDEHHQDLTLLKALVRQQLPEKYKEIFFDQSKNGYAGYIDGGASQEEFYKFIKPILEKMDGTEELLVKLNREDLLRKQRTFDNGSIPHQIHLGELHAILRRQEDFYPFLKDNREKIEKILTFRIPYYVGPLARGNSRFAWMTRKSEETITPWNFEEVVDKGASAQSFIERMTNFDKNLPNEKVLPKHSLLYEYFTVYNELTKVKYVTEGMRKPAFLSGEQKKAIVDLLFKTNRKVTVKQLKEDYFKKIECFDSVEISGVEDRFNASLGTYHDLLKIIKDKDFLDNEENEDILEDIVLTLTLFEDREMIEERLKTYAHLFDDKVMKQLKRRRYTGWGRLSRKLINGIRDKQSGKTILDFLKSDGFANRNFMQLIHDDSLTFKEDIQKAQVSGQGDSLHEHIANLAGSPAIKKGILQTVKVVDELVKVMGRHKPENIVIEMARENQTTQKGQKNSRERMKRIEEGIKELGSQILKEHPVENTQLQNEKLYLYYLQNGRDMYVDQELDINRLSDYDVDHIVPQSFLKDDSIDNKVLTRSDKARGKSDNVPSEEVVKKMKNYWRQLLNAKLITQRKFDNLTKAERGGLSELDKAGFIKRQLVETRQITKHVAQILDSRMNTKYDENDKLIREVKVITLKSKLVSDFRKDFQFYKVREINNYHHAHDAYLNAVVGTALIKKYPKLESEFVYGDYKVYDVRKMIAKSEQEIGKATAKYFFYSNIMNFFKTEITLANGEIRKRPLIETNGETGEIVWDKGRDFATVRKVLSMPQVNIVKKTEVQTGGFSKESILPKRNSDKLIARKKDWDPKKYGGFDSPTVAYSVLVVAKVEKGKSKKLKSVKELLGITIMERSSFEKNPIDFLEAKGYKEVKKDLIIKLPKYSLFELENGRKRMLASAGELQKGNELALPSKYVNFLYLASHYEKLKGSPEDNEQKQLFVEQHKHYLDEIIEQISEFSKRVILADANLDKVLSAYNKHRDKPIREQAENIIHLFTLTNLGAPAAFKYFDTTIDRKRYTSTKEVLDATLIHQSITGLYETRIDLSQLGGDGGGGSPAPEAAAKGGVPWLMKKPLQLTVLVPLHEYQERLLQQTALPKEQKELLQKLFLKYDALWQHWENQVGHRRIKPHNIATGTLAPRPQKQYPINPKAKPSIQIVIDDLLKQGVLIQQNSTMNTPVYPVPKPDGKWRMVLDYREVNKTIPLIAAQNQHSAGILSSIYRGKYKTTLDLTNGFWAHPITPESYWLTAFTWQGKQYCWTRLPQGFLNSPALFNADVVDLLKEIPNVQAYVDDIYISHDDPQEHLEQLEKIFSILLNAGYVVSLKKSEIAQREVEFLGFNITKEGRGLTDTFKQKLLNITPPKDLKQLQSILGLLNFARNFIPNYSELVKPLYTIVAPANGKFISWTEDNSNQLQHIISVLNQADNLEERNPETRLIIKVNSSPSAGYIRYYNEGSKRPIMYVNYIFSKAEAKFTQTEKLLTTMHKGLIKAMDLAMGQEILVYSPIVSMTKIQRTPLPERKALPVRWITWMTYLEDPRIQFHYDKSLPELQQIPNVTEDVIAKTKHPSEFAMVFYTDGSAIKHPDVNKSHSAGMGIAQVQFIPEYKIVHQWSIPLGDHTAQLAEIAAVEFACKKALKISGPVLIVTDSFYVAESANKELPYWKSNGFLNNKKKPLRHVSKWKSIAECLQLKPDIIIMHEKGHQQPMTTLHTEGNNLADKLATQGSYVVHAGKRTADGSEFEKRTADGSEFESPKKKAKVE

SEQ ID NO: 443 - protein, 2084 aa, synthetic construct
MPAAKRVKLDGGDKKYSIGLDIGTNSVGWAVITDEYKVPSKKFKVLGNTDRHSIKKNLIGALLFDSGETAEATRLKRTARRRYTRRKNRICYLQEIFSNEMAKVDDSFFHRLEESFLVEEDKKHERHPIFGNIVDEVAYHEKYPTIYHLRKKLVDSTDKADLRLIYLALAHMIKFRGHFLIEGDLNPDNSDVDKLFIQLVQTYNQLFEENPINASGVDAKAILSARLSKSRRLENLIAQLPGEKKNGLFGNLIALSLGLTPNFKSNFDLAEDAKLQLSKDTYDDDLDNLLAQIGDQYADLFLAAKNLSDAILLSDILRVNTEITKAPLSASMIKRYDEHHQDLTLLKALVRQQLPEKYKEIFFDQSKNGYAGYIDGGASQEEFYKFIKPILEKMDGTEELLVKLNREDLLRKQRTFDNGSIPHQIHLGELHAILRRQEDFYPFLKDNREKIEKILTFRIPYYVGPLARGNSRFAWMTRKSEETITPWNFEEVVDKGASAQSFIERMTNFDKNLPNEKVLPKHSLLYEYFTVYNELTKVKYVTEGMRKPAFLSGEQKKAIVDLLFKTNRKVTVKQLKEDYFKKIECFDSVEISGVEDRFNASLGTYHDLLKIIKDKDFLDNEENEDILEDIVLTLTLFEDREMIEERLKTYAHLFDDKVMKQLKRRRYTGWGRLSRKLINGIRDKQSGKTILDFLKSDGFANRNFMQLIHDDSLTFKEDIQKAQVSGQGDSLHEHIANLAGSPAIKKGILQTVKVVDELVKVMGRHKPENIVIEMARENQTTQKGQKNSRERMKRIEEGIKELGSQILKEHPVENTQLQNEKLYLYYLQNGRDMYVDQELDINRLSDYDVDHIVPQSFLKDDSIDNKVLTRSDKARGKSDNVPSEEVVKKMKNYWRQLLNAKLITQRKFDNLTKAERGGLSELDKAGFIKRQLVETRQITKHVAQILDSRMNTKYDENDKLIREVKVITLKSKLVSDFRKDFQFYKVREINNYHHAHDAYLNAVVGTALIKKYPKLESEFVYGDYKVYDVRKMIAKSEQEIGKATAKYFFYSNIMNFFKTEITLANGEIRKRPLIETNGETGEIVWDKGRDFATVRKVLSMPQVNIVKKTEVQTGGFSKESILPKRNSDKLIARKKDWDPKKYGGFDSPTVAYSVLVVAKVEKGKSKKLKSVKELLGITIMERSSFEKNPIDFLEAKGYKEVKKDLIIKLPKYSLFELENGRKRMLASAGELQKGNELALPSKYVNFLYLASHYEKLKGSPEDNEQKQLFVEQHKHYLDEIIEQISEFSKRVILADANLDKVLSAYNKHRDKPIREQAENIIHLFTLTNLGAPAAFKYFDTTIDRKRYTSTKEVLDATLIHQSITGLYETRIDLSQLGGDGGEAAAKGGGGGVPWLMKKPLQLTVLVPLHEYQERLLQQTALPKEQKELLQKLFLKYDALWQHWENQVGHRRIKPHNIATGTLAPRPQKQYPINPKAKPSIQIVIDDLLKQGVLIQQNSTMNTPVYPVPKPDGKWRMVLDYREVNKTIPLIAAQNQHSAGILSSIYRGKYKTTLDLTNGFWAHPITPESYWLTAFTWQGKQYCWTRLPQGFLNSPALFNADVVDLLKEIPNVQAYVDDIYISHDDPQEHLEQLEKIFSILLNAGYVVSLKKSEIAQREVEFLGFNITKEGRGLTDTFKQKLLNITPPKDLKQLQSILGLLNFARNFIPNYSELVKPLYTIVAPANGKFISWTEDNSNQLQHIISVLNQADNLEERNPETRLIIKVNSSPSAGYIRYYNEGSKRPIMYVNYIFSKAEAKFTQTEKLLTTMHKGLIKAMDLAMGQEILVYSPIVSMTKIQRTPLPERKALPVRWITWMTYLEDPRIQFHYDKSLPELQQIPNVTEDVIAKTKHPSEFAMVFYTDGSAIKHPDVNKSHSAGMGIAQVQFIPEYKIVHQWSIPLGDHTAQLAEIAAVEFACKKALKISGPVLIVTDSFYVAESANKELPYWKSNGFLNNKKKPLRHVSKWKSIAECLQLKPDIIIMHEKGHQQPMTTLHTEGNNLADKLATQGSYVVHAGKRTADGSEFEKRTADGSEFESPKKKAKVE

SEQ ID NO: 444 - protein, 2087 aa, synthetic construct
MPAAKRVKLDGGDKKYSIGLDIGTNSVGWAVITDEYKVPSKKFKVLGNTDRHSIKKNLIGALLFDSGETAEATRLKRTARRRYTRRKNRICYLQEIFSNEMAKVDDSFFHRLEESFLVEEDKKHERHPIFGNIVDEVAYHEKYPTIYHLRKKLVDSTDKADLRLIYLALAHMIKFRGHFLIEGDLNPDNSDVDKLFIQLVQTYNQLFEENPINASGVDAKAILSARLSKSRRLENLIAQLPGEKKNGLFGNLIALSLGLTPNFKSNFDLAEDAKLQLSKDTYDDDLDNLLAQIGDQYADLFLAAKNLSDAILLSDILRVNTEITKAPLSASMIKRYDEHHQDLTLLKALVRQQLPEKYKEIFFDQSKNGYAGYIDGGASQEEFYKFIKPILEKMDGTEELLVKLNREDLLRKQRTFDNGSIPHQIHLGELHAILRRQEDFYPFLKDNREKIEKILTFRIPYYVGPLARGNSRFAWMTRKSEETITPWNFEEVVDKGASAQSFIERMTNFDKNLPNEKVLPKHSLLYEYFTVYNELTKVKYVTEGMRKPAFLSGEQKKAIVDLLFKTNRKVTVKQLKEDYFKKIECFDSVEISGVEDRFNASLGTYHDLLKIIKDKDFLDNEENEDILEDIVLTLTLFEDREMIEERLKTYAHLFDDKVMKQLKRRRYTGWGRLSRKLINGIRDKQSGKTILDFLKSDGFANRNFMQLIHDDSLTFKEDIQKAQVSGQGDSLHEHIANLAGSPAIKKGILQTVKVVDELVKVMGRHKPENIVIEMARENQTTQKGQKNSRERMKRIEEGIKELGSQILKEHPVENTQLQNEKLYLYYLQNGRDMYVDQELDINRLSDYDVDHIVPQSFLKDDSIDNKVLTRSDKARGKSDNVPSEEVVKKMKNYWRQLLNAKLITQRKFDNLTKAERGGLSELDKAGFIKRQLVETRQITKHVAQILDSRMNTKYDENDKLIREVKVITLKSKLVSDFRKDFQFYKVREINNYHHAHDAYLNAVVGTALIKKYPKLESEFVYGDYKVYDVRKMIAKSEQEIGKATAKYFFYSNIMNFFKTEITLANGEIRKRPLIETNGETGEIVWDKGRDFATVRKVLSMPQVNIVKKTEVQTGGFSKESILPKRNSDKLIARKKDWDPKKYGGFDSPTVAYSVLVVAKVEKGKSKKLKSVKELLGITIMERSSFEKNPIDFLEAKGYKEVKKDLIIKLPKYSLFELENGRKRMLASAGELQKGNELALPSKYVNFLYLASHYEKLKGSPEDNEQKQLFVEQHKHYLDEIIEQISEFSKRVILADANLDKVLSAYNKHRDKPIREQAENIIHLFTLTNLGAPAAFKYFDTTIDRKRYTSTKEVLDATLIHQSITGLYETRIDLSQLGGDGGPAPGGSEAAAKGGVPWLMKKPLQLTVLVPLHEYQERLLQQTALPKEQKELLQKLFLKYDALWQHWENQVGHRRIKPHNIATGTLAPRPQKQYPINPKAKPSIQIVIDDLLKQGVLIQQNSTMNTPVYPVPKPDGKWRMVLDYREVNKTIPLIAAQNQHSAGILSSIYRGKYKTTLDLTNGFWAHPITPESYWLTAFTWQGKQYCWTRLPQGFLNSPALFNADVVDLLKEIPNVQAYVDDIYISHDDPQEHLEQLEKIFSILLNAGYVVSLKKSEIAQREVEFLGFNITKEGRGLTDTFKQKLLNITPPKDLKQLQSILGLLNFARNFIPNYSELVKPLYTIVAPANGKFISWTEDNSNQLQHIISVLNQADNLEERNPETRLIIKVNSSPSAGYIRYYNEGSKRPIMYVNYIFSKAEAKFTQTEKLLTTMHKGLIKAMDLAMGQEILVYSPIVSMTKIQRTPLPERKALPVRWITWMTYLEDPRIQFHYDKSLPELQQIPNVTEDVIAKTKHPSEFAMVFYTDGSAIKHPDVNKSHSAGMGIAQVQFIPEYKIVHQWSIPLGDHTAQLAEIAAVEFACKKALKISGPVLIVTDSFYVAESANKELPYWKSNGFLNNKKKPLRHVSKWKSIAECLQLKPDIIIMHEKGHQQPMTTLHTEGNNLADKLATQGSYVVHAGKRTADGSEFEKRTADGSEFESPKKKAKVE

SEQ ID NO: 445 - protein, 2091 aa, synthetic construct
MPAAKRVKLDGGDKKYSIGLDIGTNSVGWAVITDEYKVPSKKFKVLGNTDRHSIKKNLIGALLFDSGETAEATRLKRTARRRYTRRKNRICYLQEIFSNEMAKVDDSFFHRLEESFLVEEDKKHERHPIFGNIVDEVAYHEKYPTIYHLRKKLVDSTDKADLRLIYLALAHMIKFRGHFLIEGDLNPDNSDVDKLFIQLVQTYNQLFEENPINASGVDAKAILSARLSKSRRLENLIAQLPGEKKNGLFGNLIALSLGLTPNFKSNFDLAEDAKLQLSKDTYDDDLDNLLAQIGDQYADLFLAAKNLSDAILLSDILRVNTEITKAPLSASMIKRYDEHHQDLTLLKALVRQQLPEKYKEIFFDQSKNGYAGYIDGGASQEEFYKFIKPILEKMDGTEELLVKLNREDLLRKQRTFDNGSIPHQIHLGELHAILRRQEDFYPFLKDNREKIEKILTFRIPYYVGPLARGNSRFAWMTRKSEETITPWNFEEVVDKGASAQSFIERMTNFDKNLPNEKVLPKHSLLYEYFTVYNELTKVKYVTEGMRKPAFLSGEQKKAIVDLLFKTNRKVTVKQLKEDYFKKIECFDSVEISGVEDRFNASLGTYHDLLKIIKDKDFLDNEENEDILEDIVLTLTLFEDREMIEERLKTYAHLFDDKVMKQLKRRRYTGWGRLSRKLINGIRDKQSGKTILDFLKSDGFANRNFMQLIHDDSLTFKEDIQKAQVSGQGDSLHEHIANLAGSPAIKKGILQTVKVVDELVKVMGRHKPENIVIEMARENQTTQKGQKNSRERMKRIEEGIKELGSQILKEHPVENTQLQNEKLYLYYLQNGRDMYVDQELDINRLSDYDVDHIVPQSFLKDDSIDNKVLTRSDKARGKSDNVPSEEVVKKMKNYWRQLLNAKLITQRKFDNLTKAERGGLSELDKAGFIKRQLVETRQITKHVAQILDSRMNTKYDENDKLIREVKVITLKSKLVSDFRKDFQFYKVREINNYHHAHDAYLNAVVGTALIKKYPKLESEFVYGDYKVYDVRKMIAKSEQEIGKATAKYFFYSNIMNFFKTEITLANGEIRKRPLIETNGETGEIVWDKGRDFATVRKVLSMPQVNIVKKTEVQTGGFSKESILPKRNSDKLIARKKDWDPKKYGGFDSPTVAYSVLVVAKVEKGKSKKLKSVKELLGITIMERSSFEKNPIDFLEAKGYKEVKKDLIIKLPKYSLFELENGRKRMLASAGELQKGNELALPSKYVNFLYLASHYEKLKGSPEDNEQKQLFVEQHKHYLDEIIEQISEFSKRVILADANLDKVLSAYNKHRDKPIREQAENIIHLFTLTNLGAPAAFKYFDTTIDRKRYTSTKEVLDATLIHQSITGLYETRIDLSQLGGDGGGGGGSEAAAKGGGGSGGVPWLMKKPLQLTVLVPLHEYQERLLQQTALPKEQKELLQKLFLKYDALWQHWENQVGHRRIKPHNIATGTLAPRPQKQYPINPKAKPSIQIVIDDLLKQGVLIQQNSTMNTPVYPVPKPDGKWRMVLDYREVNKTIPLIAAQNQHSAGILSSIYRGKYKTTLDLTNGFWAHPITPESYWLTAFTWQGKQYCWTRLPQGFLNSPALFNADVVDLLKEIPNVQAYVDDIYISHDDPQEHLEQLEKIFSILLNAGYVVSLKKSEIAQREVEFLGFNITKEGRGLTDTFKQKLLNITPPKDLKQLQSILGKLNFARNFIPNYSELVKPLYTIVAPANGKFISWTEDNSNQLQHIISVLNQADNLEERNPETRLIIKVNSSPSAGYIRYYNEGSKRPIMYVNYIFSKAEAKFTQTEKLLTTMHKGLIKAMDLAMGQEILVYSPIVSMTKIQRTPLPERKALPVRWITWMTYLEDPRIQFHYDKSLPELQQIPNVTEDVIAKTKHPSEFAMVFYTDGSAIKHPDVNKSHSAGMGIAQVQFIPEYKIVHQWSIPLGDHTAQLAEIAAVEFACKKALKISGPVLIVTDSFYVAESANKELPYWKSNGFLNNKKKPLRHVSKWKSIAECLQLKPDIIIMHEKGHQQPMTTLHTEGNNLADKLATQGSYVVHAGKRTADGSEFEKRTADGSEFESPKKKAKVE

SEQ ID NO: 446 - protein, 2082 aa, synthetic construct
MPAAKRVKLDGGDKKYSIGLDIGTNSVGWAVITDEYKVPSKKFKVLGNTDRHSIKKNLIGALLFDSGETAEATRLKRTARRRYTRRKNRICYLQEIFSNEMAKVDDSFFHRLEESFLVEEDKKHERHPIFGNIVDEVAYHEKYPTIYHLRKKLVDSTDKADLRLIYLALAHMIKFRGHFLIEGDLNPDNSDVDKLFIQLVQTYNQLFEENPINASGVDAKAILSARLSKSRRLENLIAQLPGEKKNGLFGNLIALSLGLTPNFKSNFDLAEDAKLQLSKDTYDDDLDNLLAQIGDQYADLFLAAKNLSDAILLSDILRVNTEITKAPLSASMIKRYDEHHQDLTLLKALVRQQLPEKYKEIFFDQSKNGYAGYIDGGASQEEFYKFIKPILEKMDGTEELLVKLNREDLLRKQRTFDNGSIPHQIHLGELHAILRRQEDFYPFLKDNREKIEKILTFRIPYYVGPLARGNSRFAWMTRKSEETITPWNFEEVVDKGASAQSFIERMTNFDKNLPNEKVLPKHSLLYEYFTVYNELTKVKYVTEGMRKPAFLSGEQKKAIVDLLFKTNRKVTVKQLKEDYFKKIECFDSVEISGVEDRFNASLGTYHDLLKIIKDKDFLDNEENEDILEDIVLTLTLFEDREMIEERLKTYAHLFDDKVMKQLKRRRYTGWGRLSRKLINGIRDKQSGKTILDFLKSDGFANRNFMQLIHDDSLTFKEDIQKAQVSGQGDSLHEHIANLAGSPAIKKGILQTVKVVDELVKVMGRHKPENIVIEMARENQTTQKGQKNSRERMKRIEEGIKELGSQILKEHPVENTQLQNEKLYLYYLQNGRDMYVDQELDINRLSDYDVDHIVPQSFLKDDSIDNKVLTRSDKARGKSDNVPSEEVVKKMKNYWRQLLNAKLITQRKFDNLTKAERGGLSELDKAGFIKRQLVETRQITKHVAQILDSRMNTKYDENDKLIREVKVITLKSKLVSDFRKDFQFYKVREINNYHHAHDAYLNAVVGTALIKKYPKLESEFVYGDYKVYDVRKMIAKSEQEIGKATAKYFFYSNIMNFFKTEITLANGEIRKRPLIETNGETGEIVWDKGRDFATVRKVLSMPQVNIVKKTEVQTGGFSKESILPKRNSDKLIARKKDWDPKKYGGFDSPTVAYSVLVVAKVEKGKSKKLKSVKELLGITIMERSSFEKNPIDFLEAKGYKEVKKDLIIKLPKYSLFELENGRKRMLASAGELQKGNELALPSKYVNFLYLASHYEKLKGSPEDNEQKQLFVEQHKHYLDEIIEQISEFSKRVILADANLDKVLSAYNKHRDKPIREQAENIIHLFTLTNLGAPAAFKYFDTTIDRKRYTSTKEVLDATLIHQSITGLYETRIDLSQLGGDGGGGGGSSGGVPWLMKKPLQLTVLVPLHEYQERLLQQTALPKEQKELLQKLFLKYDALWQHWENQVGHRRIKPHNIATGTLAPRPQKQYPINPKAKPSIQIVIDDLLKQGVLIQQNSTMNTPVYPVPKPDGKWRMVLDYREVNKTIPLIAAQNQHSAGILSSIYRGKYKTTLDLTNGFWAHPITPESYWLTAFTWQGKQYCWTRLPQGFLNSPALFNADVVDLLKEIPNVQAYVDDIYISHDDPQEHLEQLEKIFSILLNAGYVVSLKKSEIAQREVEFLGFNITKEGRGLTDTFKQKLLNITPPKDLKQLQSILGKLNFARNFIPNYSELVKPLYTIVAPANGKFISWTEDNSNQLQHIISVLNQADNLEERNPETRLIIKVNSSPSAGYIRYYNEGSKRPIMYVNYIFSKAEAKFTQTEKLLTTMHKGLIKAMDLAMGQEILVYSPIVSMTKIQRTPLPERKALPVRWITWMTYLEDPRIQFHYDKSLPELQQIPNVTEDVIAKTKHPSEFAMVFYTDGSAIKHPDVNKSHSAGMGIAQVQFIPEYKIVHQWSIPLGDHTAQLAEIAAVEFACKKALKISGPVLIVTDSFYVAESANKELPYWKSNGFLNNKKKPLRHVSKWKSIAECLQLKPDIIIMHEKGHQQPMTTLHTEGNNLADKLATQGSYVVHAGKRTADGSEFEKRTADGSEFESPKKKAKVE

SEQ ID NO: 447 - protein, 2101 aa, synthetic construct
MPAAKRVKLDGGDKKYSIGLDIGTNSVGWAVITDEYKVPSKKFKVLGNTDRHSIKKNLIGALLFDSGETAEATRLKRTARRRYTRRKNRICYLQEIFSNEMAKVDDSFFHRLEESFLVEEDKKHERHPIFGNIVDEVAYHEKYPTIYHLRKKLVDSTDKADLRLIYLALAHMIKFRGHFLIEGDLNPDNSDVDKLFIQLVQTYNQLFEENPINASGVDAKAILSARLSKSRRLENLIAQLPGEKKNGLFGNLIALSLGLTPNFKSNFDLAEDAKLQLSKDTYDDDLDNLLAQIGDQYADLFLAAKNLSDAILLSDILRVNTEITKAPLSASMIKRYDEHHQDLTLLKALVRQQLPEKYKEIFFDQSKNGYAGYIDGGASQEEFYKFIKPILEKMDGTEELLVKLNREDLLRKQRTFDNGSIPHQIHLGELHAILRRQEDFYPFLKDNREKIEKILTFRIPYYVGPLARGNSRFAWMTRKSEETITPWNFEEVVDKGASAQSFIERMTNFDKNLPNEKVLPKHSLLYEYFTVYNELTKVKYVTEGMRKPAFLSGEQKKAIVDLLFKTNRKVTVKQLKEDYFKKIECFDSVEISGVEDRFNASLGTYHDLLKIIKDKDFLDNEENEDILEDIVLTLTLFEDREMIEERLKTYAHLFDDKVMKQLKRRRYTGWGRLSRKLINGIRDKQSGKTILDFLKSDGFANRNFMQLIHDDSLTFKEDIQKAQVSGQGDSLHEHIANLAGSPAIKKGILQTVKVVDELVKVMGRHKPENIVIEMARENQTTQKGQKNSRERMKRIEEGIKELGSQILKEHPVENTQLQNEKLYLYYLQNGRDMYVDQELDINRLSDYDVDHIVPQSFLKDDSIDNKVLTRSDKARGKSDNVPSEEVVKKMKNYWRQLLNAKLITQRKFDNLTKAERGGLSELDKAGFIKRQLVETRQITKHVAQILDSRMNTKYDENDKLIREVKVITLKSKLVSDFRKDFQFYKVREINNYHHAHDAYLNAVVGTALIKKYPKLESEFVYGDYKVYDVRKMIAKSEQEIGKATAKYFFYSNIMNFFKTEITLANGEIRKRPLIETNGETGEIVWDKGRDFATVRKVLSMPQVNIVKKTEVQTGGFSKESILPKRNSDKLIARKKDWDPKKYGGFDSPTVAYSVLVVAKVEKGKSKKLKSVKELLGITIMERSSFEKNPIDFLEAKGYKEVKKDLIIKLPKYSLFELENGRKRMLASAGELQKGNELALPSKYVNFLYLASHYEKLKGSPEDNEQKQLFVEQHKHYLDEIIEQISEFSKRVILADANLDKVLSAYNKHRDKPIREQAENIIHLFTLTNLGAPAAFKYFDTTIDRKRYTSTKEVLDATLIHQSITGLYETRIDLSQLGGDGGEAAAKEAAAKEAAAKEAAAKEAAAKGGVPWLMKKPLQLTVLVPLHEYQERLLQQTALPKEQKELLQKLFLKYDALWQHWENQVGHRRIKPHNIATGTLAPRPQKQYPINPKAKPSIQIVIDDLLKQGVLIQQNSTMNTPVYPVPKPDGKWRMVLDYREVNKTIPLIAAQNQHSAGILSSIYRGKYKTTLDLTNGFWAHPITPESYWLTAFTWQGKQYCWTRLPQGFLNSPALFNADVVDLLKEIPNVQAYVDDIYISHDDPQEHLEQLEKIFSILLNAGYVVSLKKSEIAQREVEFLGFNITKEGRGLTDTFKQKLLNITPPKDLKQLQSILGKLNFARNFIPNYSELVKPLYTIVAPANGKFISWTEDNSNQLQHIISVLNQADNLEERNPETRLIIKVNSSPSAGYIRYYNEGSKRPIMYVNYIFSKAEAKFTQTEKLLTTMHKGLIKAMDLAMGQEILVYSPIVSMTKIQRTPLPERKALPVRWITWMTYLEDPRIQFHYDKSLPELQQIPNVTEDVIAKTKHPSEFAMVFYTDGSAIKHPDVNKSHSAGMGIAQVQFIPEYKIVHQWSIPLGDHTAQLAEIAAVEFACKKALKISGPVLIVTDSFYVAESANKELPYWKSNGFLNNKKKPLRHVSKWKSIAECLQLKPDIIIMHEKGHQQPMTTLHTEGNNLADKLATQGSYVVHAGKRTADGSEFEKRTADGSEFESPKKKAKVE

SEQ ID NO: 448 - protein, 2085 aa, synthetic construct
MPAAKRVKLDGGDKKYSIGLDIGTNSVGWAVITDEYKVPSKKFKVLGNTDRHSIKKNLIGALLFDSGETAEATRLKRTARRRYTRRKNRICYLQEIFSNEMAKVDDSFFHRLEESFLVEEDKKHERHPIFGNIVDEVAYHEKYPTIYHLRKKLVDSTDKADLRLIYLALAHMIKFRGHFLIEGDLNPDNSDVDKLFIQLVQTYNQLFEENPINASGVDAKAILSARLSKSRRLENLIAQLPGEKKNGLFGNLIALSLGLTPNFKSNFDLAEDAKLQLSKDTYDDDLDNLLAQIGDQYADLFLAAKNLSDAILLSDILRVNTEITKAPLSASMIKRYDEHHQDLTLLKALVRQQLPEKYKEIFFDQSKNGYAGYIDGGASQEEFYKFIKPILEKMDGTEELLVKLNREDLLRKQRTFDNGSIPHQIHLGELHAILRRQEDFYPFLKDNREKIEKILTFRIPYYVGPLARGNSRFAWMTRKSEETITPWNFEEVVDKGASAQSFIERMTNFDKNLPNEKVLPKHSLLYEYFTVYNELTKVKYVTEGMRKPAFLSGEQKKAIVDLLFKTNRKVTVKQLKEDYFKKIECFDSVEISGVEDRFNASLGTYHDLLKIIKDKDFLDNEENEDILEDIVLTLTLFEDREMIEERLKTYAHLFDDKVMKQLKRRRYTGWGRLSRKLINGIRDKQSGKTILDFLKSDGFANRNFMQLIHDDSLTFKEDIQKAQVSGQGDSLHEHIANLAGSPAIKKGILQTVKVVDELVKVMGRHKPENIVIEMARENQTTQKGQKNSRERMKRIEEGIKELGSQILKEHPVENTQLQNEKLYLYYLQNGRDMYVDQELDINRLSDYDVDHIVPQSFLKDDSIDNKVLTRSDKARGKSDNVPSEEVVKKMKNYWRQLLNAKLITQRKFDNLTKAERGGLSELDKAGFIKRQLVETRQITKHVAQILDSRMNTKYDENDKLIREVKVITLKSKLVSDFRKDFQFYKVREINNYHHAHDAYLNAVVGTALIKKYPKLESEFVYGDYKVYDVRKMIAKSEQEIGKATAKYFFYSNIMNFFKTEITLANGEIRKRPLIETNGETGEIVWDKGRDFATVRKVLSMPQVNIVKKTEVQTGGFSKESILPKRNSDKLIARKKDWDPKKYGGFDSPTVAYSVLVVAKVEKGKSKKLKSVKELLGITIMERSSFEKNPIDFLEAKGYKEVKKDLIIKLPKYSLFELENGRKRMLASAGELQKGNELALPSKYVNFLYLASHYEKLKGSPEDNEQKQLFVEQHKHYLDEIIEQISEFSKRVILADANLDKVLSAYNKHRDKPIREQAENIIHLFTLTNLGAPAAFKYFDTTIDRKRYTSTKEVLDATLIHQSITGLYETRIDLSQLGGDGGGGGPAPGGSGGVPWLMKKPLQLTVLVPLHEYQERLLQQTALPKEQKELLQKLFLKYDALWQHWENQVGHRRIKPHNIATGTLAPRPQKQYPINPKAKPSIQIVIDDLLKQGVLIQQNSTMNTPVYPVPKPDGKWRMVLDYREVNKTIPLIAAQNQHSAGILSSIYRGKYKTTLDLTNGFWAHPITPESYWLTAFTWQGKQYCWTRLPQGFLNSPALFNADVVDLLKEIPNVQAYVDDIYISHDDPQEHLEQLEKIFSILLNAGYVVSLKKSEIAQREVEFLGFNITKEGRGLTDTFKQKLLNITPPKDLKQLQSILGKLNFARNFIPNYSELVKPLYTIVAPANGKFISWTEDNSNQLQHIISVLNQADNLEERNPETRLIIKVNSSPSAGYIRYYNEGSKRPIMYVNYIFSKAEAKFTQTEKLLTTMHKGLIKAMDLAMGQEILVYSPIVSMTKIQRTPLPERKALPVRWITWMTYLEDPRIQFHYDKSLPELQQIPNVTEDVIAKTKHPSEFAMVFYTDGSAIKHPDVNKSHSAGMGIAQVQFIPEYKIVHQWSIPLGDHTAQLAEIAAVEFACKKALKISGPVLIVTDSFYVAESANKELPYWKSNGFLNNKKKPLRHVSKWKSIAECLQLKPDIIIMHEKGHQQPMTTLHTEGNNLADKLATQGSYVVHAGKRTADGSEFEKRTADGSEFESPKKKAKVE

SEQ ID NO: 449 - protein, 2088 aa, synthetic construct
MPAAKRVKLDGGDKKYSIGLDIGTNSVGWAVITDEYKVPSKKFKVLGNTDRHSIKKNLIGALLFDSGETAEATRLKRTARRRYTRRKNRICYLQEIFSNEMAKVDDSFFHRLEESFLVEEDKKHERHPIFGNIVDEVAYHEKYPTIYHLRKKLVDSTDKADLRLIYLALAHMIKFRGHFLIEGDLNPDNSDVDKLFIQLVQTYNQLFEENPINASGVDAKAILSARLSKSRRLENLIAQLPGEKKNGLFGNLIALSLGLTPNFKSNFDLAEDAKLQLSKDTYDDDLDNLLAQIGDQYADLFLAAKNLSDAILLSDILRVNTEITKAPLSASMIKRYDEHHQDLTLLKALVRQQLPEKYKEIFFDQSKNGYAGYIDGGASQEEFYKFIKPILEKMDGTEELLVKLNREDLLRKQRTFDNGSIPHQIHLGELHAILRRQEDFYPFLKDNREKIEKILTFRIPYYVGPLARGNSRFAWMTRKSEETITPWNFEEVVDKGASAQSFIERMTNFDKNLPNEKVLPKHSLLYEYFTVYNELTKVKYVTEGMRKPAFLSGEQKKAIVDLLFKTNRKVTVKQLKEDYFKKIECFDSVEISGVEDRFNASLGTYHDLLKIIKDKDFLDNEENEDILEDIVLTLTLFEDREMIEERLKTYAHLFDDKVMKQLKRRRYTGWGRLSRKLINGIRDKQSGKTILDFLKSDGFANRNFMQLIHDDSLTFKEDIQKAQVSGQGDSLHEHIANLAGSPAIKKGILQTVKVVDELVKVMGRHKPENIVIEMARENQTTQKGQKNSRERMKRIEEGIKELGSQILKEHPVENTQLQNEKLYLYYLQNGRDMYVDQELDINRLSDYDVDHIVPQSFLKDDSIDNKVLTRSDKARGKSDNVPSEEVVKKMKNYWRQLLNAKLITQRKFDNLTKAERGGLSELDKAGFIKRQLVETRQITKHVAQILDSRMNTKYDENDKLIREVKVITLKSKLVSDFRKDFQFYKVREINNYHHAHDAYLNAVVGTALIKKYPKLESEFVYGDYKVYDVRKMIAKSEQEIGKATAKYFFYSNIMNFFKTEITLANGEIRKRPLIETNGETGEIVWDKGRDFATVRKVLSMPQVNIVKKTEVQTGGFSKESILPKRNSDKLIARKKDWDPKKYGGFDSPTVAYSVLVVAKVEKGKSKKLKSVKELLGITIMERSSFEKNPIDFLEAKGYKEVKKDLIIKLPKYSLFELENGRKRMLASAGELQKGNELALPSKYVNFLYLASHYEKLKGSPEDNEQKQLFVEQHKHYLDEIIEQISEFSKRVILADANLDKVLSAYNKHRDKPIREQAENIIHLFTLTNLGAPAAFKYFDTTIDRKRYTSTKEVLDATLIHQSITGLYETRIDLSQLGGDGGGSSGSSGSSGSSGGVPWLMKKPLQLTVLVPLHEYQERLLQQTALPKEQKELLQKLFLKYDALWQHWENQVGHRRIKPHNIATGTLAPRPQKQYPINPKAKPSIQIVIDDLLKQGVLIQQNSTMNTPVYPVPKPDGKWRMVLDYREVNKTIPLIAAQNQHSAGILSSIYRGKYKTTLDLTNGFWAHPITPESYWLTAFTWQGKQYCWTRLPQGFLNSPALFNADVVDLLKEIPNVQAYVDDIYISHDDPQEHLEQLEKIFSILLNAGYVVSLKKSEIAQREVEFLGFNITKEGRGLTDTFKQKLLNITPPKDLKQLQSILGKLNFARNFIPNYSELVKPLYTIVAPANGKFISWTEDNSNQLQHIISVLNQADNLEERNPETRLIIKVNSSPSAGYIRYYNEGSKRPIMYVNYIFSKAEAKFTQTEKLLTTMHKGLIKAMDLAMGQEILVYSPIVSMTKIQRTPLPERKALPVRWITWMTYLEDPRIQFHYDKSLPELQQIPNVTEDVIAKTKHPSEFAMVFYTDGSAIKHPDVNKSHSAGMGIAQVQFIPEYKIVHQWSIPLGDHTAQLAEIAAVEFACKKALKISGPVLIVTDSFYVAESANKELPYWKSNGFLNNKKKPLRHVSKWKSIAECLQLKPDIIIMHEKGHQQPMTTLHTEGNNLADKLATQGSYVVHAGKRTADGSEFEKRTADGSEFESPKKKAKVE

SEQ ID NO: 450 - protein, 2094 aa, synthetic construct
MPAAKRVKLDGGDKKYSIGLDIGTNSVGWAVITDEYKVPSKKFKVLGNTDRHSIKKNLIGALLFDSGETAEATRLKRTARRRYTRRKNRICYLQEIFSNEMAKVDDSFFHRLEESFLVEEDKKHERHPIFGNIVDEVAYHEKYPTIYHLRKKLVDSTDKADLRLIYLALAHMIKFRGHFLIEGDLNPDNSDVDKLFIQLVQTYNQLFEENPINASGVDAKAILSARLSKSRRLENLIAQLPGEKKNGLFGNLIALSLGLTPNFKSNFDLAEDAKLQLSKDTYDDDLDNLLAQIGDQYADLFLAAKNLSDAILLSDILRVNTEITKAPLSASMIKRYDEHHQDLTLLKALVRQQLPEKYKEIFFDQSKNGYAGYIDGGASQEEFYKFIKPILEKMDGTEELLVKLNREDLLRKQRTFDNGSIPHQIHLGELHAILRRQEDFYPFLKDNREKIEKILTFRIPYYVGPLARGNSRFAWMTRKSEETITPWNFEEVVDKGASAQSFIERMTNFDKNLPNEKVLPKHSLLYEYFTVYNELTKVKYVTEGMRKPAFLSGEQKKAIVDLLFKTNRKVTVKQLKEDYFKKIECFDSVEISGVEDRFNASLGTYHDLLKIIKDKDFLDNEENEDILEDIVLTLTLFEDREMIEERLKTYAHLFDDKVMKQLKRRRYTGWGRLSRKLINGIRDKQSGKTILDFLKSDGFANRNFMQLIHDDSLTFKEDIQKAQVSGQGDSLHEHIANLAGSPAIKKGILQTVKVVDELVKVMGRHKPENIVIEMARENQTTQKGQKNSRERMKRIEEGIKELGSQILKEHPVENTQLQNEKLYLYYLQNGRDMYVDQELDINRLSDYDVDHIVPQSFLKDDSIDNKVLTRSDKARGKSDNVPSEEVVKKMKNYWRQLLNAKLITQRKFDNLTKAERGGLSELDKAGFIKRQLVETRQITKHVAQILDSRMNTKYDENDKLIREVKVITLKSKLVSDFRKDFQFYKVREINNYHHAHDAYLNAVVGTALIKKYPKLESEFVYGDYKVYDVRKMIAKSEQEIGKATAKYFFYSNIMNFFKTEITLANGEIRKRPLIETNGETGEIVWDKGRDFATVRKVLSMPQVNIVKKTEVQTGGFSKESILPKRNSDKLIARKKDWDPKKYGGFDSPTVAYSVLVVAKVEKGKSKKLKSVKELLGITIMERSSFEKNPIDFLEAKGYKEVKKDLIIKLPKYSLFELENGRKRMLASAGELQKGNELALPSKYVNFLYLASHYEKLKGSPEDNEQKQLFVEQHKHYLDEIIEQISEFSKRVILADANLDKVLSAYNKHRDKPIREQAENIIHLFTLTNLGAPAAFKYFDTTIDRKRYTSTKEVLDATLIHQSITGLYETRIDLSQLGGDGGGSSGSSGSSGSSGSSGSSGGVPWLMKKPLQLTVLVPLHEYQERLLQQTALPKEQKELLQKLFLKYDALWQHWENQVGHRRIKPHNIATGTLAPRPQKQYPINPKAKPSIQIVIDDLLKQGVLIQQNSTMNTPVYPVPKPDGKWRMVLDYREVNKTIPLIAAQNQHSAGILSSIYRGKYKTTLDLTNGFWAHPITPESYWLTAFTWQGKQYCWTRLPQGFLNSPALFNADVVDLLKEIPNVQAYVDDIYISHDDPQEHLEQLEKIFSILLNAGYVVSLKKSEIAQREVEFLGFNITKEGRGLTDTFKQKLLNITPPKDLKQLQSILGKLNFARNFIPNYSELVKPLYTIVAPANGKFISWTEDNSNQLQHIISVLNQADNLEERNPETRLIIKVNSSPSAGYIRYYNEGSKRPIMYVNYIFSKAEAKFTQTEKLLTTMHKGLIKAMDLAMGQEILVYSPIVSMTKIQRTPLPERKALPVRWITWMTYLEDPRIQFHYDKSLPELQQIPNVTEDVIAKTKHPSEFAMVFYTDGSAIKHPDVNKSHSAGMGIAQVQFIPEYKIVHQWSIPLGDHTAQLAEIAAVEFACKKALKISGPVLIVTDSFYVAESANKELPYWKSNGFLNNKKKPLRHVSKWKSIAECLQLKPDIIIMHEKGHQQPMTTLHTEGNNLADKLATQGSYVVHAGKRTADGSEFEKRTADGSEFESPKKKAKVE

SEQ ID NO: 451 - protein, 2087 aa, synthetic construct
MPAAKRVKLDGGDKKYSIGLDIGTNSVGWAVITDEYKVPSKKFKVLGNTDRHSIKKNLIGALLFDSGETAEATRLKRTARRRYTRRKNRICYLQEIFSNEMAKVDDSFFHRLEESFLVEEDKKHERHPIFGNIVDEVAYHEKYPTIYHLRKKLVDSTDKADLRLIYLALAHMIKFRGHFLIEGDLNPDNSDVDKLFIQLVQTYNQLFEENPINASGVDAKAILSARLSKSRRLENLIAQLPGEKKNGLFGNLIALSLGLTPNFKSNFDLAEDAKLQLSKDTYDDDLDNLLAQIGDQYADLFLAAKNLSDAILLSDILRVNTEITKAPLSASMIKRYDEHHQDLTLLKALVRQQLPEKYKEIFFDQSKNGYAGYIDGGASQEEFYKFIKPILEKMDGTEELLVKLNREDLLRKQRTFDNGSIPHQIHLGELHAILRRQEDFYPFLKDNREKIEKILTFRIPYYVGPLARGNSRFAWMTRKSEETITPWNFEEVVDKGASAQSFIERMTNFDKNLPNEKVLPKHSLLYEYFTVYNELTKVKYVTEGMRKPAFLSGEQKKAIVDLLFKTNRKVTVKQLKEDYFKKIECFDSVEISGVEDRFNASLGTYHDLLKIIKDKDFLDNEENEDILEDIVLTLTLFEDREMIEERLKTYAHLFDDKVMKQLKRRRYTGWGRLSRKLINGIRDKQSGKTILDFLKSDGFANRNFMQLIHDDSLTFKEDIQKAQVSGQGDSLHEHIANLAGSPAIKKGILQTVKVVDELVKVMGRHKPENIVIEMARENQTTQKGQKNSRERMKRIEEGIKELGSQILKEHPVENTQLQNEKLYLYYLQNGRDMYVDQELDINRLSDYDVDHIVPQSFLKDDSIDNKVLTRSDKARGKSDNVPSEEVVKKMKNYWRQLLNAKLITQRKFDNLTKAERGGLSELDKAGFIKRQLVETRQITKHVAQILDSRMNTKYDENDKLIREVKVITLKSKLVSDFRKDFQFYKVREINNYHHAHDAYLNAVVGTALIKKYPKLESEFVYGDYKVYDVRKMIAKSEQEIGKATAKYFFYSNIMNFFKTEITLANGEIRKRPLIETNGETGEIVWDKGRDFATVRKVLSMPQVNIVKKTEVQTGGFSKESILPKRNSDKLIARKKDWDPKKYGGFDSPTVAYSVLVVAKVEKGKSKKLKSVKELLGITIMERSSFEKNPIDFLEAKGYKEVKKDLIIKLPKYSLFELENGRKRMLASAGELQKGNELALPSKYVNFLYLASHYEKLKGSPEDNEQKQLFVEQHKHYLDEIIEQISEFSKRVILADANLDKVLSAYNKHRDKPIREQAENIIHLFTLTNLGAPAAFKYFDTTIDRKRYTSTKEVLDATLIHQSITGLYETRIDLSQLGGDGGPAPGGGEAAAKGGVPWLMKKPLQLTVLVPLHEYQERLLQQTALPKEQKELLQKLFLKYDALWQHWENQVGHRRIKPHNIATGTLAPRPQKQYPINPKAKPSIQIVIDDLLKQGVLIQQNSTMNTPVYPVPKPDGKWRMVLDYREVNKTIPLIAAQNQHSAGILSSIYRGKYKTTLDLTNGFWAHPITPESYWLTAFTWQGKQYCWTRLPQGFLNSPALFNADVVDLLKEIPNVQAYVDDIYISHDDPQEHLEQLEKIFSILLNAGYVVSLKKSEIAQREVEFLGFNITKEGRGLTDTFKQKLLNITPPKDLKQLQSILGKLNFARNFIPNYSELVKPLYTIVAPANGKFISWTEDNSNQLQHIISVLNQADNLEERNPETRLIIKVNSSPSAGYIRYYNEGSKRPIMYVNYIFSKAEAKFTQTEKLLTTMHKGLIKAMDLAMGQEILVYSPIVSMTKIQRTPLPERKALPVRWITWMTYLEDPRIQFHYDKSLPELQQIPNVTEDVIAKTKHPSEFAMVFYTDGSAIKHPDVNKSHSAGMGIAQVQFIPEYKIVHQWSIPLGDHTAQLAEIAAVEFACKKALKISGPVLIVTDSFYVAESANKELPYWKSNGFLNNKKKPLRHVSKWKSIAECLQLKPDIIIMHEKGHQQPMTTLHTEGNNLADKLATQGSYVVHAGKRTADGSEFEKRTADGSEFESPKKKAKVE

SEQ ID NO: 452 - protein, 2081 aa, synthetic construct
MPAAKRVKLDGGDKKYSIGLDIGTNSVGWAVITDEYKVPSKKFKVLGNTDRHSIKKNLIGALLFDSGETAEATRLKRTARRRYTRRKNRICYLQEIFSNEMAKVDDSFFHRLEESFLVEEDKKHERHPIFGNIVDEVAYHEKYPTIYHLRKKLVDSTDKADLRLIYLALAHMIKFRGHFLIEGDLNPDNSDVDKLFIQLVQTYNQLFEENPINASGVDAKAILSARLSKSRRLENLIAQLPGEKKNGLFGNLIALSLGLTPNFKSNFDLAEDAKLQLSKDTYDDDLDNLLAQIGDQYADLFLAAKNLSDAILLSDILRVNTEITKAPLSASMIKRYDEHHQDLTLLKALVRQQLPEKYKEIFFDQSKNGYAGYIDGGASQEEFYKFIKPILEKMDGTEELLVKLNREDLLRKQRTFDNGSIPHQIHLGELHAILRRQEDFYPFLKDNREKIEKILTFRIPYYVGPLARGNSRFAWMTRKSEETITPWNFEEVVDKGASAQSFIERMTNFDKNLPNEKVLPKHSLLYEYFTVYNELTKVKYVTEGMRKPAFLSGEQKKAIVDLLFKTNRKVTVKQLKEDYFKKIECFDSVEISGVEDRFNASLGTYHDLLKIIKDKDFLDNEENEDILEDIVLTLTLFEDREMIEERLKTYAHLFDDKVMKQLKRRRYTGWGRLSRKLINGIRDKQSGKTILDFLKSDGFANRNFMQLIHDDSLTFKEDIQKAQVSGQGDSLHEHIANLAGSPAIKKGILQTVKVVDELVKVMGRHKPENIVIEMARENQTTQKGQKNSRERMKRIEEGIKELGSQILKEHPVENTQLQNEKLYLYYLQNGRDMYVDQELDINRLSDYDVDHIVPQSFLKDDSIDNKVLTRSDKARGKSDNVPSEEVVKKMKNYWRQLLNAKLITQRKFDNLTKAERGGLSELDKAGFIKRQLVETRQITKHVAQILDSRMNTKYDENDKLIREVKVITLKSKLVSDFRKDFQFYKVREINNYHHAHDAYLNAVVGTALIKKYPKLESEFVYGDYKVYDVRKMIAKSEQEIGKATAKYFFYSNIMNFFKTEITLANGEIRKRPLIETNGETGEIVWDKGRDFATVRKVLSMPQVNIVKKTEVQTGGFSKESILPKRNSDKLIARKKDWDPKKYGGFDSPTVAYSVLVVAKVEKGKSKKLKSVKELLGITIMERSSFEKNPIDFLEAKGYKEVKKDLIIKLPKYSLFELENGRKRMLASAGELQKGNELALPSKYVNFLYLASHYEKLKGSPEDNEQKQLFVEQHKHYLDEIIEQISEFSKRVILADANLDKVLSAYNKHRDKPIREQAENIIHLFTLTNLGAPAAFKYFDTTIDRKRYTSTKEVLDATLIHQSITGLYETRIDLSQLGGDGGGGGGSGGVPWLMKKPLQLTVLVPLHEYQERLLQQTALPKEQKELLQKLFLKYDALWQHWENQVGHRRIKPHNIATGTLAPRPQKQYPINPKAKPSIQIVIDDLLKQGVLIQQNSTMNTPVYPVPKPDGKWRMVLDYREVNKTIPLIAAQNQHSAGILSSIYRGKYKTTLDLTNGFWAHPITPESYWLTAFTWQGKQYCWTRLPQGFLNSPALFNADVVDLLKEIPNVQAYVDDIYISHDDPQEHLEQLEKIFSILLNAGYVVSLKKSEIAQREVEFLGFNITKEGRGLTDTFKQKLLNITPPKDLKQLQSILGKLNFARNFIPNYSELVKPLYTIVAPANGKFISWTEDNSNQLQHIISVLNQADNLEERNPETRLIIKVNSSPSAGYIRYYNEGSKRPIMYVNYIFSKAEAKFTQTEKLLTTMHKGLIKAMDLAMGQEILVYSPIVSMTKIQRTPLPERKALPVRWITWMTYLEDPRIQFHYDKSLPELQQIPNVTEDVIAKTKHPSEFAMVFYTDGSAIKHPDVNKSHSAGMGIAQVQFIPEYKIVHQWSIPLGDHTAQLAEIAAVEFACKKALKISGPVLIVTDSFYVAESANKELPYWKSNGFLNNKKKPLRHVSKWKSIAECLQLKPDIIIMHEKGHQQPMTTLHTEGNNLADKLATQGSYVVHAGKRTADGSEFEKRTADGSEFESPKKKAKVE

SEQ ID NO: 453 - protein, 2084 aa, synthetic construct
MPAAKRVKLDGGDKKYSIGLDIGTNSVGWAVITDEYKVPSKKFKVLGNTDRHSIKKNLIGALLFDSGETAEATRLKRTARRRYTRRKNRICYLQEIFSNEMAKVDDSFFHRLEESFLVEEDKKHERHPIFGNIVDEVAYHEKYPTIYHLRKKLVDSTDKADLRLIYLALAHMIKFRGHFLIEGDLNPDNSDVDKLFIQLVQTYNQLFEENPINASGVDAKAILSARLSKSRRLENLIAQLPGEKKNGLFGNLIALSLGLTPNFKSNFDLAEDAKLQLSKDTYDDDLDNLLAQIGDQYADLFLAAKNLSDAILLSDILRVNTEITKAPLSASMIKRYDEHHQDLTLLKALVRQQLPEKYKEIFFDQSKNGYAGYIDGGASQEEFYKFIKPILEKMDGTEELLVKLNREDLLRKQRTFDNGSIPHQIHLGELHAILRRQEDFYPFLKDNREKIEKILTFRIPYYVGPLARGNSRFAWMTRKSEETITPWNFEEVVDKGASAQSFIERMTNFDKNLPNEKVLPKHSLLYEYFTVYNELTKVKYVTEGMRKPAFLSGEQKKAIVDLLFKTNRKVTVKQLKEDYFKKIECFDSVEISGVEDRFNASLGTYHDLLKIIKDKDFLDNEENEDILEDIVLTLTLFEDREMIEERLKTYAHLFDDKVMKQLKRRRYTGWGRLSRKLINGIRDKQSGKTILDFLKSDGFANRNFMQLIHDDSLTFKEDIQKAQVSGQGDSLHEHIANLAGSPAIKKGILQTVKVVDELVKVMGRHKPENIVIEMARENQTTQKGQKNSRERMKRIEEGIKELGSQILKEHPVENTQLQNEKLYLYYLQNGRDMYVDQELDINRLSDYDVDHIVPQSFLKDDSIDNKVLTRSDKARGKSDNVPSEEVVKKMKNYWRQLLNAKLITQRKFDNLTKAERGGLSELDKAGFIKRQLVETRQITKHVAQILDSRMNTKYDENDKLIREVKVITLKSKLVSDFRKDFQFYKVREINNYHHAHDAYLNAVVGTALIKKYPKLESEFVYGDYKVYDVRKMIAKSEQEIGKATAKYFFYSNIMNFFKTEITLANGEIRKRPLIETNGETGEIVWDKGRDFATVRKVLSMPQVNIVKKTEVQTGGFSKESILPKRNSDKLIARKKDWDPKKYGGFDSPTVAYSVLVVAKVEKGKSKKLKSVKELLGITIMERSSFEKNPIDFLEAKGYKEVKKDLIIKLPKYSLFELENGRKRMLASAGELQKGNELALPSKYVNFLYLASHYEKLKGSPEDNEQKQLFVEQHKHYLDEIIEQISEFSKRVILADANLDKVLSAYNKHRDKPIREQAENIIHLFTLTNLGAPAAFKYFDTTIDRKRYTSTKEVLDATLIHQSITGLYETRIDLSQLGGDGGEAAAKPAPGGVPWLMKKPLQLTVLVPLHEYQERLLQQTALPKEQKELLQKLFLKYDALWQHWENQVGHRRIKPHNIATGTLAPRPQKQYPINPKAKPSIQIVIDDLLKQGVLIQQNSTMNTPVYPVPKPDGKWRMVLDYREVNKTIPLIAAQNQHSAGILSSIYRGKYKTTLDLTNGFWAHPITPESYWLTAFTWQGKQYCWTRLPQGFLNSPALFNADVVDLLKEIPNVQAYVDDIYISHDDPQEHLEQLEKIFSILLNAGYVVSLKKSEIAQREVEFLGFNITKEGRGLTDTFKQKLLNITPPKDLKQLQSILGKLNFARNFIPNYSELVKPLYTIVAPANGKFISWTEDNSNQLQHIISVLNQADNLEERNPETRLIIKVNSSPSAGYIRYYNEGSKRPIMYVNYIFSKAEAKFTQTEKLLTTMHKGLIKAMDLAMGQEILVYSPIVSMTKIQRTPLPERKALPVRWITWMTYLEDPRIQFHYDKSLPELQQIPNVTEDVIAKTKHPSEFAMVFYTDGSAIKHPDVNKSHSAGMGIAQVQFIPEYKIVHQWSIPLGDHTAQLAEIAAVEFACKKALKISGPVLIVTDSFYVAESANKELPYWKSNGFLNNKKKPLRHVSKWKSIAECLQLKPDIIIMHEKGHQQPMTTLHTEGNNLADKLATQGSYVVHAGKRTADGSEFEKRTADGSEFESPKKKAKVE

SEQ ID NO: 454 - protein, 2085 aa, synthetic construct
MPAAKRVKLDGGDKKYSIGLDIGTNSVGWAVITDEYKVPSKKFKVLGNTDRHSIKKNLIGALLFDSGETAEATRLKRTARRRYTRRKNRICYLQEIFSNEMAKVDDSFFHRLEESFLVEEDKKHERHPIFGNIVDEVAYHEKYPTIYHLRKKLVDSTDKADLRLIYLALAHMIKFRGHFLIEGDLNPDNSDVDKLFIQLVQTYNQLFEENPINASGVDAKAILSARLSKSRRLENLIAQLPGEKKNGLFGNLIALSLGLTPNFKSNFDLAEDAKLQLSKDTYDDDLDNLLAQIGDQYADLFLAAKNLSDAILLSDILRVNTEITKAPLSASMIKRYDEHHQDLTLLKALVRQQLPEKYKEIFFDQSKNGYAGYIDGGASQEEFYKFIKPILEKMDGTEELLVKLNREDLLRKQRTFDNGSIPHQIHLGELHAILRRQEDFYPFLKDNREKIEKILTFRIPYYVGPLARGNSRFAWMTRKSEETITPWNFEEVVDKGASAQSFIERMTNFDKNLPNEKVLPKHSLLYEYFTVYNELTKVKYVTEGMRKPAFLSGEQKKAIVDLLFKTNRKVTVKQLKEDYFKKIECFDSVEISGVEDRFNASLGTYHDLLKIIKDKDFLDNEENEDILEDIVLTLTLFEDREMIEERLKTYAHLFDDKVMKQLKRRRYTGWGRLSRKLINGIRDKQSGKTILDFLKSDGFANRNFMQLIHDDSLTFKEDIQKAQVSGQGDSLHEHIANLAGSPAIKKGILQTVKVVDELVKVMGRHKPENIVIEMARENQTTQKGQKNSRERMKRIEEGIKELGSQILKEHPVENTQLQNEKLYLYYLQNGRDMYVDQELDINRLSDYDVDHIVPQSFLKDDSIDNKVLTRSDKARGKSDNVPSEEVVKKMKNYWRQLLNAKLITQRKFDNLTKAERGGLSELDKAGFIKRQLVETRQITKHVAQILDSRMNTKYDENDKLIREVKVITLKSKLVSDFRKDFQFYKVREINNYHHAHDAYLNAVVGTALIKKYPKLESEFVYGDYKVYDVRKMIAKSEQEIGKATAKYFFYSNIMNFFKTEITLANGEIRKRPLIETNGETGEIVWDKGRDFATVRKVLSMPQVNIVKKTEVQTGGFSKESILPKRNSDKLIARKKDWDPKKYGGFDSPTVAYSVLVVAKVEKGKSKKLKSVKELLGITIMERSSFEKNPIDFLEAKGYKEVKKDLIIKLPKYSLFELENGRKRMLASAGELQKGNELALPSKYVNFLYLASHYEKLKGSPEDNEQKQLFVEQHKHYLDEIIEQISEFSKRVILADANLDKVLSAYNKHRDKPIREQAENIIHLFTLTNLGAPAAFKYFDTTIDRKRYTSTKEVLDATLIHQSITGLYETRIDLSQLGGDGGGGGGSSGGSGGVPWLMKKPLQLTVLVPLHEYQERLLQQTALPKEQKELLQKLFLKYDALWQHWENQVGHRRIKPHNIATGTLAPRPQKQYPINPKAKPSIQIVIDDLLKQGVLIQQNSTMNTPVYPVPKPDGKWRMVLDYREVNKTIPLIAAQNQHSAGILSSIYRGKYKTTLDLTNGFWAHPITPESYWLTAFTWQGKQYCWTRLPQGFLNSPALFNADVVDLLKEIPNVQAYVDDIYISHDDPQEHLEQLEKIFSILLNAGYVVSLKKSEIAQREVEFLGFNITKEGRGLTDTFKQKLLNITPPKDLKQLQSILGKLNFARNFIPNYSELVKPLYTIVAPANGKFISWTEDNSNQLQHIISVLNQADNLEERNPETRLIIKVNSSPSAGYIRYYNEGSKRPIMYVNYIFSKAEAKFTQTEKLLTTMHKGLIKAMDLAMGQEILVYSPIVSMTKIQRTPLPERKALPVRWITWMTYLEDPRIQFHYDKSLPELQQIPNVTEDVIAKTKHPSEFAMVFYTDGSAIKHPDVNKSHSAGMGIAQVQFIPEYKIVHQWSIPLGDHTAQLAEIAAVEFACKKALKISGPVLIVTDSFYVAESANKELPYWKSNGFLNNKKKPLRHVSKWKSIAECLQLKPDIIIMHEKGHQQPMTTLHTEGNNLADKLATQGSYVVHAGKRTADGSEFEKRTADGSEFESPKKKAKVE

SEQ ID NO: 455 - protein, 2085 aa, synthetic construct
MPAAKRVKLDGGDKKYSIGLDIGTNSVGWAVITDEYKVPSKKFKVLGNTDRHSIKKNLIGALLFDSGETAEATRLKRTARRRYTRRKNRICYLQEIFSNEMAKVDDSFFHRLEESFLVEEDKKHERHPIFGNIVDEVAYHEKYPTIYHLRKKLVDSTDKADLRLIYLALAHMIKFRGHFLIEGDLNPDNSDVDKLFIQLVQTYNQLFEENPINASGVDAKAILSARLSKSRRLENLIAQLPGEKKNGLFGNLIALSLGLTPNFKSNFDLAEDAKLQLSKDTYDDDLDNLLAQIGDQYADLFLAAKNLSDAILLSDILRVNTEITKAPLSASMIKRYDEHHQDLTLLKALVRQQLPEKYKEIFFDQSKNGYAGYIDGGASQEEFYKFIKPILEKMDGTEELLVKLNREDLLRKQRTFDNGSIPHQIHLGELHAILRRQEDFYPFLKDNREKIEKILTFRIPYYVGPLARGNSRFAWMTRKSEETITPWNFEEVVDKGASAQSFIERMTNFDKNLPNEKVLPKHSLLYEYFTVYNELTKVKYVTEGMRKPAFLSGEQKKAIVDLLFKTNRKVTVKQLKEDYFKKIECFDSVEISGVEDRFNASLGTYHDLLKIIKDKDFLDNEENEDILEDIVLTLTLFEDREMIEERLKTYAHLFDDKVMKQLKRRRYTGWGRLSRKLINGIRDKQSGKTILDFLKSDGFANRNFMQLIHDDSLTFKEDIQKAQVSGQGDSLHEHIANLAGSPAIKKGILQTVKVVDELVKVMGRHKPENIVIEMARENQTTQKGQKNSRERMKRIEEGIKELGSQILKEHPVENTQLQNEKLYLYYLQNGRDMYVDQELDINRLSDYDVDHIVPQSFLKDDSIDNKVLTRSDKARGKSDNVPSEEVVKKMKNYWRQLLNAKLITQRKFDNLTKAERGGLSELDKAGFIKRQLVETRQITKHVAQILDSRMNTKYDENDKLIREVKVITLKSKLVSDFRKDFQFYKVREINNYHHAHDAYLNAVVGTALIKKYPKLESEFVYGDYKVYDVRKMIAKSEQEIGKATAKYFFYSNIMNFFKTEITLANGEIRKRPLIETNGETGEIVWDKGRDFATVRKVLSMPQVNIVKKTEVQTGGFSKESILPKRNSDKLIARKKDWDPKKYGGFDSPTVAYSVLVVAKVEKGKSKKLKSVKELLGITIMERSSFEKNPIDFLEAKGYKEVKKDLIIKLPKYSLFELENGRKRMLASAGELQKGNELALPSKYVNFLYLASHYEKLKGSPEDNEQKQLFVEQHKHYLDEIIEQISEFSKRVILADANLDKVLSAYNKHRDKPIREQAENIIHLFTLTNLGAPAAFKYFDTTIDRKRYTSTKEVLDATLIHQSITGLYETRIDLSQLGGDGGGSSPAPGGSGGVPWLMKKPLQLTVLVPLHEYQERLLQQTALPKEQKELLQKLFLKYDALWQHWENQVGHRRIKPHNIATGTLAPRPQKQYPINPKAKPSIQIVIDDLLKQGVLIQQNSTMNTPVYPVPKPDGKWRMVLDYREVNKTIPLIAAQNQHSAGILSSIYRGKYKTTLDLTNGFWAHPITPESYWLTAFTWQGKQYCWTRLPQGFLNSPALFNADVVDLLKEIPNVQAYVDDIYISHDDPQEHLEQLEKIFSILLNAGYVVSLKKSEIAQREVEFLGFNITKEGRGLTDTFKQKLLNITPPKDLKQLQSILGKLNFARNFIPNYSELVKPLYTIVAPANGKFISWTEDNSNQLQHIISVLNQADNLEERNPETRLIIKVNSSPSAGYIRYYNEGSKRPIMYVNYIFSKAEAKFTQTEKLLTTMHKGLIKAMDLAMGQEILVYSPIVSMTKIQRTPLPERKALPVRWITWMTYLEDPRIQFHYDKSLPELQQIPNVTEDVIAKTKHPSEFAMVFYTDGSAIKHPDVNKSHSAGMGIAQVQFIPEYKIVHQWSIPLGDHTAQLAEIAAVEFACKKALKISGPVLIVTDSFYVAESANKELPYWKSNGFLNNKKKPLRHVSKWKSIAECLQLKPDIIIMHEKGHQQPMTTLHTEGNNLADKLATQGSYVVHAGKRTADGSEFEKRTADGSEFESPKKKAKVE

SEQ ID NO: 456 - protein, 2085 aa, synthetic construct
MPAAKRVKLDGGDKKYSIGLDIGTNSVGWAVITDEYKVPSKKFKVLGNTDRHSIKKNLIGALLFDSGETAEATRLKRTARRRYTRRKNRICYLQEIFSNEMAKVDDSFFHRLEESFLVEEDKKHERHPIFGNIVDEVAYHEKYPTIYHLRKKLVDSTDKADLRLIYLALAHMIKFRGHFLIEGDLNPDNSDVDKLFIQLVQTYNQLFEENPINASGVDAKAILSARLSKSRRLENLIAQLPGEKKNGLFGNLIALSLGLTPNFKSNFDLAEDAKLQLSKDTYDDDLDNLLAQIGDQYADLFLAAKNLSDAILLSDILRVNTEITKAPLSASMIKRYDEHHQDLTLLKALVRQQLPEKYKEIFFDQSKNGYAGYIDGGASQEEFYKFIKPILEKMDGTEELLVKLNREDLLRKQRTFDNGSIPHQIHLGELHAILRRQEDFYPFLKDNREKIEKILTFRIPYYVGPLARGNSRFAWMTRKSEETITPWNFEEVVDKGASAQSFIERMTNFDKNLPNEKVLPKHSLLYEYFTVYNELTKVKYVTEGMRKPAFLSGEQKKAIVDLLFKTNRKVTVKQLKEDYFKKIECFDSVEISGVEDRFNASLGTYHDLLKIIKDKDFLDNEENEDILEDIVLTLTLFEDREMIEERLKTYAHLFDDKVMKQLKRRRYTGWGRLSRKLINGIRDKQSGKTILDFLKSDGFANRNFMQLIHDDSLTFKEDIQKAQVSGQGDSLHEHIANLAGSPAIKKGILQTVKVVDELVKVMGRHKPENIVIEMARENQTTQKGQKNSRERMKRIEEGIKELGSQILKEHPVENTQLQNEKLYLYYLQNGRDMYVDQELDINRLSDYDVDHIVPQSFLKDDSIDNKVLTRSDKARGKSDNVPSEEVVKKMKNYWRQLLNAKLITQRKFDNLTKAERGGLSELDKAGFIKRQLVETRQITKHVAQILDSRMNTKYDENDKLIREVKVITLKSKLVSDFRKDFQFYKVREINNYHHAHDAYLNAVVGTALIKKYPKLESEFVYGDYKVYDVRKMIAKSEQEIGKATAKYFFYSNIMNFFKTEITLANGEIRKRPLIETNGETGEIVWDKGRDFATVRKVLSMPQVNIVKKTEVQTGGFSKESILPKRNSDKLIARKKDWDPKKYGGFDSPTVAYSVLVVAKVEKGKSKKLKSVKELLGITIMERSSFEKNPIDFLEAKGYKEVKKDLIIKLPKYSLFELENGRKRMLASAGELQKGNELALPSKYVNFLYLASHYEKLKGSPEDNEQKQLFVEQHKHYLDEIIEQISEFSKRVILADANLDKVLSAYNKHRDKPIREQAENIIHLFTLTNLGAPAAFKYFDTTIDRKRYTSTKEVLDATLIHQSITGLYETRIDLSQLGGDGGPAPGSSGGGGGVPWLMKKPLQLTVLVPLHEYQERLLQQTALPKEQKELLQKLFLKYDALWQHWENQVGHRRIKPHNIATGTLAPRPQKQYPINPKAKPSIQIVIDDLLKQGVLIQQNSTMNTPVYPVPKPDGKWRMVLDYREVNKTIPLIAAQNQHSAGILSSIYRGKYKTTLDLTNGFWAHPITPESYWLTAFTWQGKQYCWTRLPQGFLNSPALFNADVVDLLKEIPNVQAYVDDIYISHDDPQEHLEQLEKIFSILLNAGYVVSLKKSEIAQREVEFLGFNITKEGRGLTDTFKQKLLNITPPKDLKQLQSILGKLNFARNFIPNYSELVKPLYTIVAPANGKFISWTEDNSNQLQHIISVLNQADNLEERNPETRLIIKVNSSPSAGYIRYYNEGSKRPIMYVNYIFSKAEAKFTQTEKLLTTMHKGLIKAMDLAMGQEILVYSPIVSMTKIQRTPLPERKALPVRWITWMTYLEDPRIQFHYDKSLPELQQIPNVTEDVIAKTKHPSEFAMVFYTDGSAIKHPDVNKSHSAGMGIAQVQFIPEYKIVHQWSIPLGDHTAQLAEIAAVEFACKKALKISGPVLIVTDSFYVAESANKELPYWKSNGFLNNKKKPLRHVSKWKSIAECLQLKPDIIIMHEKGHQQPMTTLHTEGNNLADKLATQGSYVVHAGKRTADGSEFEKRTADGSEFESPKKKAKVE

SEQ ID NO: 457 - protein, 2082 aa, synthetic construct
MPAAKRVKLDGGDKKYSIGLDIGTNSVGWAVITDEYKVPSKKFKVLGNTDRHSIKKNLIGALLFDSGETAEATRLKRTARRRYTRRKNRICYLQEIFSNEMAKVDDSFFHRLEESFLVEEDKKHERHPIFGNIVDEVAYHEKYPTIYHLRKKLVDSTDKADLRLIYLALAHMIKFRGHFLIEGDLNPDNSDVDKLFIQLVQTYNQLFEENPINASGVDAKAILSARLSKSRRLENLIAQLPGEKKNGLFGNLIALSLGLTPNFKSNFDLAEDAKLQLSKDTYDDDLDNLLAQIGDQYADLFLAAKNLSDAILLSDILRVNTEITKAPLSASMIKRYDEHHQDLTLLKALVRQQLPEKYKEIFFDQSKNGYAGYIDGGASQEEFYKFIKPILEKMDGTEELLVKLNREDLLRKQRTFDNGSIPHQIHLGELHAILRRQEDFYPFLKDNREKIEKILTFRIPYYVGPLARGNSRFAWMTRKSEETITPWNFEEVVDKGASAQSFIERMTNFDKNLPNEKVLPKHSLLYEYFTVYNELTKVKYVTEGMRKPAFLSGEQKKAIVDLLFKTNRKVTVKQLKEDYFKKIECFDSVEISGVEDRFNASLGTYHDLLKIIKDKDFLDNEENEDILEDIVLTLTLFEDREMIEERLKTYAHLFDDKVMKQLKRRRYTGWGRLSRKLINGIRDKQSGKTILDFLKSDGFANRNFMQLIHDDSLTFKEDIQKAQVSGQGDSLHEHIANLAGSPAIKKGILQTVKVVDELVKVMGRHKPENIVIEMARENQTTQKGQKNSRERMKRIEEGIKELGSQILKEHPVENTQLQNEKLYLYYLQNGRDMYVDQELDINRLSDYDVDHIVPQSFLKDDSIDNKVLTRSDKARGKSDNVPSEEVVKKMKNYWRQLLNAKLITQRKFDNLTKAERGGLSELDKAGFIKRQLVETRQITKHVAQILDSRMNTKYDENDKLIREVKVITLKSKLVSDFRKDFQFYKVREINNYHHAHDAYLNAVVGTALIKKYPKLESEFVYGDYKVYDVRKMIAKSEQEIGKATAKYFFYSNIMNFFKTEITLANGEIRKRPLIETNGETGEIVWDKGRDFATVRKVLSMPQVNIVKKTEVQTGGFSKESILPKRNSDKLIARKKDWDPKKYGGFDSPTVAYSVLVVAKVEKGKSKKLKSVKELLGITIMERSSFEKNPIDFLEAKGYKEVKKDLIIKLPKYSLFELENGRKRMLASAGELQKGNELALPSKYVNFLYLASHYEKLKGSPEDNEQKQLFVEQHKHYLDEIIEQISEFSKRVILADANLDKVLSAYNKHRDKPIREQAENIIHLFTLTNLGAPAAFKYFDTTIDRKRYTSTKEVLDATLIHQSITGLYETRIDLSQLGGDGGGGSGGSGGVPWLMKKPLQLTVLVPLHEYQERLLQQTALPKEQKELLQKLFLKYDALWQHWENQVGHRRIKPHNIATGTLAPRPQKQYPINPKAKPSIQIVIDDLLKQGVLIQQNSTMNTPVYPVPKPDGKWRMVLDYREVNKTIPLIAAQNQHSAGILSSIYRGKYKTTLDLTNGFWAHPITPESYWLTAFTWQGKQYCWTRLPQGFLNSPALFNADVVDLLKEIPNVQAYVDDIYISHDDPQEHLEQLEKIFSILLNAGYVVSLKKSEIAQREVEFLGFNITKEGRGLTDTFKQKLLNITPPKDLKQLQSILGKLNFARNFIPNYSELVKPLYTIVAPANGKFISWTEDNSNQLQHIISVLNQADNLEERNPETRLIIKVNSSPSAGYIRYYNEGSKRPIMYVNYIFSKAEAKFTQTEKLLTTMHKGLIKAMDLAMGQEILVYSPIVSMTKIQRTPLPERKALPVRWITWMTYLEDPRIQFHYDKSLPELQQIPNVTEDVIAKTKHPSEFAMVFYTDGSAIKHPDVNKSHSAGMGIAQVQFIPEYKIVHQWSIPLGDHTAQLAEIAAVEFACKKALKISGPVLIVTDSFYVAESANKELPYWKSNGFLNNKKKPLRHVSKWKSIAECLQLKPDIIIMHEKGHQQPMTTLHTEGNNLADKLATQGSYVVHAGKRTADGSEFEKRTADGSEFESPKKKAKVE

SEQ ID NO: 458 - protein, 2087 aa, synthetic construct
MPAAKRVKLDGGDKKYSIGLDIGTNSVGWAVITDEYKVPSKKFKVLGNTDRHSIKKNLIGALLFDSGETAEATRLKRTARRRYTRRKNRICYLQEIFSNEMAKVDDSFFHRLEESFLVEEDKKHERHPIFGNIVDEVAYHEKYPTIYHLRKKLVDSTDKADLRLIYLALAHMIKFRGHFLIEGDLNPDNSDVDKLFIQLVQTYNQLFEENPINASGVDAKAILSARLSKSRRLENLIAQLPGEKKNGLFGNLIALSLGLTPNFKSNFDLAEDAKLQLSKDTYDDDLDNLLAQIGDQYADLFLAAKNLSDAILLSDILRVNTEITKAPLSASMIKRYDEHHQDLTLLKALVRQQLPEKYKEIFFDQSKNGYAGYIDGGASQEEFYKFIKPILEKMDGTEELLVKLNREDLLRKQRTFDNGSIPHQIHLGELHAILRRQEDFYPFLKDNREKIEKILTFRIPYYVGPLARGNSRFAWMTRKSEETITPWNFEEVVDKGASAQSFIERMTNFDKNLPNEKVLPKHSLLYEYFTVYNELTKVKYVTEGMRKPAFLSGEQKKAIVDLLFKTNRKVTVKQLKEDYFKKIECFDSVEISGVEDRFNASLGTYHDLLKIIKDKDFLDNEENEDILEDIVLTLTLFEDREMIEERLKTYAHLFDDKVMKQLKRRRYTGWGRLSRKLINGIRDKQSGKTILDFLKSDGFANRNFMQLIHDDSLTFKEDIQKAQVSGQGDSLHEHIANLAGSPAIKKGILQTVKVVDELVKVMGRHKPENIVIEMARENQTTQKGQKNSRERMKRIEEGIKELGSQILKEHPVENTQLQNEKLYLYYLQNGRDMYVDQELDINRLSDYDVDHIVPQSFLKDDSIDNKVLTRSDKARGKSDNVPSEEVVKKMKNYWRQLLNAKLITQRKFDNLTKAERGGLSELDKAGFIKRQLVETRQITKHVAQILDSRMNTKYDENDKLIREVKVITLKSKLVSDFRKDFQFYKVREINNYHHAHDAYLNAVVGTALIKKYPKLESEFVYGDYKVYDVRKMIAKSEQEIGKATAKYFFYSNIMNFFKTEITLANGEIRKRPLIETNGETGEIVWDKGRDFATVRKVLSMPQVNIVKKTEVQTGGFSKESILPKRNSDKLIARKKDWDPKKYGGFDSPTVAYSVLVVAKVEKGKSKKLKSVKELLGITIMERSSFEKNPIDFLEAKGYKEVKKDLIIKLPKYSLFELENGRKRMLASAGELQKGNELALPSKYVNFLYLASHYEKLKGSPEDNEQKQLFVEQHKHYLDEIIEQISEFSKRVILADANLDKVLSAYNKHRDKPIREQAENIIHLFTLTNLGAPAAFKYFDTTIDRKRYTSTKEVLDATLIHQSITGLYETRIDLSQLGGDGGGGGEAAAKGSSGGVPWLMKKPLQLTVLVPLHEYQERLLQQTALPKEQKELLQKLFLKYDALWQHWENQVGHRRIKPHNIATGTLAPRPQKQYPINPKAKPSIQIVIDDLLKQGVLIQQNSTMNTPVYPVPKPDGKWRMVLDYREVNKTIPLIAAQNQHSAGILSSIYRGKYKTTLDLTNGFWAHPITPESYWLTAFTWQGKQYCWTRLPQGFLNSPALFNADVVDLLKEIPNVQAYVDDIYISHDDPQEHLEQLEKIFSILLNAGYVVSLKKSEIAQREVEFLGFNITKEGRGLTDTFKQKLLNITPPKDLKQLQSILGKLNFARNFIPNYSELVKPLYTIVAPANGKFISWTEDNSNQLQHIISVLNQADNLEERNPETRLIIKVNSSPSAGYIRYYNEGSKRPIMYVNYIFSKAEAKFTQTEKLLTTMHKGLIKAMDLAMGQEILVYSPIVSMTKIQRTPLPERKALPVRWITWMTYLEDPRIQFHYDKSLPELQQIPNVTEDVIAKTKHPSEFAMVFYTDGSAIKHPDVNKSHSAGMGIAQVQFIPEYKIVHQWSIPLGDHTAQLAEIAAVEFACKKALKISGPVLIVTDSFYVAESANKELPYWKSNGFLNNKKKPLRHVSKWKSIAECLQLKPDIIIMHEKGHQQPMTTLHTEGNNLADKLATQGSYVVHAGKRTADGSEFEKRTADGSEFESPKKKAKVE

SEQ ID NO: 459 - protein, 2087 aa, synthetic construct
MPAAKRVKLDGGDKKYSIGLDIGTNSVGWAVITDEYKVPSKKFKVLGNTDRHSIKKNLIGALLFDSGETAEATRLKRTARRRYTRRKNRICYLQEIFSNEMAKVDDSFFHRLEESFLVEEDKKHERHPIFGNIVDEVAYHEKYPTIYHLRKKLVDSTDKADLRLIYLALAHMIKFRGHFLIEGDLNPDNSDVDKLFIQLVQTYNQLFEENPINASGVDAKAILSARLSKSRRLENLIAQLPGEKKNGLFGNLIALSLGLTPNFKSNFDLAEDAKLQLSKDTYDDDLDNLLAQIGDQYADLFLAAKNLSDAILLSDILRVNTEITKAPLSASMIKRYDEHHQDLTLLKALVRQQLPEKYKEIFFDQSKNGYAGYIDGGASQEEFYKFIKPILEKMDGTEELLVKLNREDLLRKQRTFDNGSIPHQIHLGELHAILRRQEDFYPFLKDNREKIEKILTFRIPYYVGPLARGNSRFAWMTRKSEETITPWNFEEVVDKGASAQSFIERMTNFDKNLPNEKVLPKHSLLYEYFTVYNELTKVKYVTEGMRKPAFLSGEQKKAIVDLLFKTNRKVTVKQLKEDYFKKIECFDSVEISGVEDRFNASLGTYHDLLKIIKDKDFLDNEENEDILEDIVLTLTLFEDREMIEERLKTYAHLFDDKVMKQLKRRRYTGWGRLSRKLINGIRDKQSGKTILDFLKSDGFANRNFMQLIHDDSLTFKEDIQKAQVSGQGDSLHEHIANLAGSPAIKKGILQTVKVVDELVKVMGRHKPENIVIEMARENQTTQKGQKNSRERMKRIEEGIKELGSQILKEHPVENTQLQNEKLYLYYLQNGRDMYVDQELDINRLSDYDVDHIVPQSFLKDDSIDNKVLTRSDKARGKSDNVPSEEVVKKMKNYWRQLLNAKLITQRKFDNLTKAERGGLSELDKAGFIKRQLVETRQITKHVAQILDSRMNTKYDENDKLIREVKVITLKSKLVSDFRKDFQFYKVREINNYHHAHDAYLNAVVGTALIKKYPKLESEFVYGDYKVYDVRKMIAKSEQEIGKATAKYFFYSNIMNFFKTEITLANGEIRKRPLIETNGETGEIVWDKGRDFATVRKVLSMPQVNIVKKTEVQTGGFSKESILPKRNSDKLIARKKDWDPKKYGGFDSPTVAYSVLVVAKVEKGKSKKLKSVKELLGITIMERSSFEKNPIDFLEAKGYKEVKKDLIIKLPKYSLFELENGRKRMLASAGELQKGNELALPSKYVNFLYLASHYEKLKGSPEDNEQKQLFVEQHKHYLDEIIEQISEFSKRVILADANLDKVLSAYNKHRDKPIREQAENIIHLFTLTNLGAPAAFKYFDTTIDRKRYTSTKEVLDATLIHQSITGLYETRIDLSQLGGDGGGGSGGGEAAAKGGVPWLMKKPLQLTVLVPLHEYQERLLQQTALPKEQKELLQKLFLKYDALWQHWENQVGHRRIKPHNIATGTLAPRPQKQYPINPKAKPSIQIVIDDLLKQGVLIQQNSTMNTPVYPVPKPDGKWRMVLDYREVNKTIPLIAAQNQHSAGILSSIYRGKYKTTLDLTNGFWAHPITPESYWLTAFTWQGKQYCWTRLPQGFLNSPALFNADVVDLLKEIPNVQAYVDDIYISHDDPQEHLEQLEKIFSILLNAGYVVSLKKSEIAQREVEFLGFNITKEGRGLTDTFKQKLLNITPPKDLKQLQSILGKLNFARNFIPNYSELVKPLYTIVAPANGKFISWTEDNSNQLQHIISVLNQADNLEERNPETRLIIKVNSSPSAGYIRYYNEGSKRPIMYVNYIFSKAEAKFTQTEKLLTTMHKGLIKAMDLAMGQEILVYSPIVSMTKIQRTPLPERKALPVRWITWMTYLEDPRIQFHYDKSLPELQQIPNVTEDVIAKTKHPSEFAMVFYTDGSAIKHPDVNKSHSAGMGIAQVQFIPEYKIVHQWSIPLGDHTAQLAEIAAVEFACKKALKISGPVLIVTDSFYVAESANKELPYWKSNGFLNNKKKPLRHVSKWKSIAECLQLKPDIIIMHEKGHQQPMTTLHTEGNNLADKLATQGSYVVHAGKRTADGSEFEKRTADGSEFESPKKKAKVE

SEQ ID NO: 460 - protein, 2185 aa, synthetic construct
MPAAKRVKLDGGDKKYSIGLDIGTNSVGWAVITDEYKVPSKKFKVLGNTDRHSIKKNLIGALLFDSGETAEATRLKRTARRRYTRRKNRICYLQEIFSNEMAKVDDSFFHRLEESFLVEEDKKHERHPIFGNIVDEVAYHEKYPTIYHLRKKLVDSTDKADLRLIYLALAHMIKFRGHFLIEGDLNPDNSDVDKLFIQLVQTYNQLFEENPINASGVDAKAILSARLSKSRRLENLIAQLPGEKKNGLFGNLIALSLGLTPNFKSNFDLAEDAKLQLSKDTYDDDLDNLLAQIGDQYADLFLAAKNLSDAILLSDILRVNTEITKAPLSASMIKRYDEHHQDLTLLKALVRQQLPEKYKEIFFDQSKNGYAGYIDGGASQEEFYKFIKPILEKMDGTEELLVKLNREDLLRKQRTFDNGSIPHQIHLGELHAILRRQEDFYPFLKDNREKIEKILTFRIPYYVGPLARGNSRFAWMTRKSEETITPWNFEEVVDKGASAQSFIERMTNFDKNLPNEKVLPKHSLLYEYFTVYNELTKVKYVTEGMRKPAFLSGEQKKAIVDLLFKTNRKVTVKQLKEDYFKKIECFDSVEISGVEDRFNASLGTYHDLLKIIKDKDFLDNEENEDILEDIVLTLTLFEDREMIEERLKTYAHLFDDKVMKQLKRRRYTGWGRLSRKLINGIRDKQSGKTILDFLKSDGFANRNFMQLIHDDSLTFKEDIQKAQVSGQGDSLHEHIANLAGSPAIKKGILQTVKVVDELVKVMGRHKPENIVIEMARENQTTQKGQKNSRERMKRIEEGIKELGSQILKEHPVENTQLQNEKLYLYYLQNGRDMYVDQELDINRLSDYDVDHIVPQSFLKDDSIDNKVLTRSDKARGKSDNVPSEEVVKKMKNYWRQLLNAKLITQRKFDNLTKAERGGLSELDKAGFIKRQLVETRQITKHVAQILDSRMNTKYDENDKLIREVKVITLKSKLVSDFRKDFQFYKVREINNYHHAHDAYLNAVVGTALIKKYPKLESEFVYGDYKVYDVRKMIAKSEQEIGKATAKYFFYSNIMNFFKTEITLANGEIRKRPLIETNGETGEIVWDKGRDFATVRKVLSMPQVNIVKKTEVQTGGFSKESILPKRNSDKLIARKKDWDPKKYGGFDSPTVAYSVLVVAKVEKGKSKKLKSVKELLGITIMERSSFEKNPIDFLEAKGYKEVKKDLIIKLPKYSLFELENGRKRMLASAGELQKGNELALPSKYVNFLYLASHYEKLKGSPEDNEQKQLFVEQHKHYLDEIIEQISEFSKRVILADANLDKVLSAYNKHRDKPIREQAENIIHLFTLTNLGAPAAFKYFDTTIDRKRYTSTKEVLDATLIHQSITGLYETRIDLSQLGGDGGGGGGSGGGGSGGGGSGGGGSGGMDPLQLLQPLEAEIKGTKLKAHWNSGATITCVPEAFLEDERPIQTMLIKTIHGEKQQDVYYLTFKVQGRKVEAEVLASPYDYILLNPSDVPWLMKKPLQLTVLVPLHEYQERLLQQTALPKEQKELLQKLFLKYDALWQHWENQVGHRRIKPHNIATGTLAPRPQKQYPINPKAKPSIQIVIDDLLKQGVLIQQNSTMNTPVYPVPKPDGKWRMVLDYREVNKTIPLIAAQNQHSAGILSSIYRGKYKTTLDLTNGFWAHPITPESYWLTAFTWQGKQYCWTRLPQGFLNSPALFNADVVDLLKEIPNVQAYVDDIYISHDDPQEHLEQLEKIFSILLNAGYVVSLKKSEIAQREVEFLGFNITKEGRGLTDTFKQKLLNITPPKDLKQLQSILGLLNFARNFIPNYSELVKPLYTIVAPANGKFISWTEDNSNQLQHIISVLNQADNLEERNPETRLIIKVNSSPSAGYIRYYNEGSKRPIMYVNYIFSKAEAKFTQTEKLLTTMHKGLIKAMDLAMGQEILVYSPIVSMTKIQRTPLPERKALPVRWITWMTYLEDPRIQFHYDKSLPELQQIPNVTEDVIAKTKHPSEFAMVFYTDGSAIKHPDVNKSHSAGMGIAQVQFIPEYKIVHQWSIPLGDHTAQLAEIAAVEFACKKALKISGPVLIVTDSFYVAESANKELPYWKSNGFLNNKKKPLRHVSKWKSIAECLQLKPDIIIMHEKGHQQPMTTLHTEGNNLADKLATQGSYVVHAGKRTADGSEFEKRTADGSEFESPKKKAKVE

SEQ ID NO: 461 - protein, 2180 aa, synthetic construct
MPAAKRVKLDGGDKKYSIGLDIGTNSVGWAVITDEYKVPSKKFKVLGNTDRHSIKKNLIGALLFDSGETAEATRLKRTARRRYTRRKNRICYLQEIFSNEMAKVDDSFFHRLEESFLVEEDKKHERHPIFGNIVDEVAYHEKYPTIYHLRKKLVDSTDKADLRLIYLALAHMIKFRGHFLIEGDLNPDNSDVDKLFIQLVQTYNQLFEENPINASGVDAKAILSARLSKSRRLENLIAQLPGEKKNGLFGNLIALSLGLTPNFKSNFDLAEDAKLQLSKDTYDDDLDNLLAQIGDQYADLFLAAKNLSDAILLSDILRVNTEITKAPLSASMIKRYDEHHQDLTLLKALVRQQLPEKYKEIFFDQSKNGYAGYIDGGASQEEFYKFIKPILEKMDGTEELLVKLNREDLLRKQRTFDNGSIPHQIHLGELHAILRRQEDFYPFLKDNREKIEKILTFRIPYYVGPLARGNSRFAWMTRKSEETITPWNFEEVVDKGASAQSFIERMTNFDKNLPNEKVLPKHSLLYEYFTVYNELTKVKYVTEGMRKPAFLSGEQKKAIVDLLFKTNRKVTVKQLKEDYFKKIECFDSVEISGVEDRFNASLGTYHDLLKIIKDKDFLDNEENEDILEDIVLTLTLFEDREMIEERLKTYAHLFDDKVMKQLKRRRYTGWGRLSRKLINGIRDKQSGKTILDFLKSDGFANRNFMQLIHDDSLTFKEDIQKAQVSGQGDSLHEHIANLAGSPAIKKGILQTVKVVDELVKVMGRHKPENIVIEMARENQTTQKGQKNSRERMKRIEEGIKELGSQILKEHPVENTQLQNEKLYLYYLQNGRDMYVDQELDINRLSDYDVDHIVPQSFLKDDSIDNKVLTRSDKARGKSDNVPSEEVVKKMKNYWRQLLNAKLITQRKFDNLTKAERGGLSELDKAGFIKRQLVETRQITKHVAQILDSRMNTKYDENDKLIREVKVITLKSKLVSDFRKDFQFYKVREINNYHHAHDAYLNAVVGTALIKKYPKLESEFVYGDYKVYDVRKMIAKSEQEIGKATAKYFFYSNIMNFFKTEITLANGEIRKRPLIETNGETGEIVWDKGRDFATVRKVLSMPQVNIVKKTEVQTGGFSKESILPKRNSDKLIARKKDWDPKKYGGFDSPTVAYSVLVVAKVEKGKSKKLKSVKELLGITIMERSSFEKNPIDFLEAKGYKEVKKDLIIKLPKYSLFELENGRKRMLASAGELQKGNELALPSKYVNFLYLASHYEKLKGSPEDNEQKQLFVEQHKHYLDEIIEQISEFSKRVILADANLDKVLSAYNKHRDKPIREQAENIIHLFTLTNLGAPAAFKYFDTTIDRKRYTSTKEVLDATLIHQSITGLYETRIDLSQLGGDGGGSSGSSGSSGSSGSSGGMDPLQLLQPLEAEIKGTKLKAHWNSGATITCVPEAFLEDERPIQTMLIKTIHGEKQQDVYYLTFKVQGRKVEAEVLASPYDYILLNPSDVPWLMKKPLQLTVLVPLHEYQERLLQQTALPKEQKELLQKLFLKYDALWQHWENQVGHRRIKPHNIATGTLAPRPQKQYPINPKAKPSIQIVIDDLLKQGVLIQQNSTMNTPVYPVPKPDGKWRMVLDYREVNKTIPLIAAQNQHSAGILSSIYRGKYKTTLDLTNGFWAHPITPESYWLTAFTWQGKQYCWTRLPQGFLNSPALFNADVVDLLKEIPNVQAYVDDIYISHDDPQEHLEQLEKIFSILLNAGYVVSLKKSEIAQREVEFLGFNITKEGRGLTDTFKQKLLNITPPKDLKQLQSILGLLNFARNFIPNYSELVKPLYTIVAPANGKFISWTEDNSNQLQHIISVLNQADNLEERNPETRLIIKVNSSPSAGYIRYYNEGSKRPIMYVNYIFSKAEAKFTQTEKLLTTMHKGLIKAMDLAMGQEILVYSPIVSMTKIQRTPLPERKALPVRWITWMTYLEDPRIQFHYDKSLPELQQIPNVTEDVIAKTKHPSEFAMVFYTDGSAIKHPDVNKSHSAGMGIAQVQFIPEYKIVHQWSIPLGDHTAQLAEIAAVEFACKKALKISGPVLIVTDSFYVAESANKELPYWKSNGFLNNKKKPLRHVSKWKSIAECLQLKPDIIIMHEKGHQQPMTTLHTEGNNLADKLATQGSYVVHAGKRTADGSEFEKRTADGSEFESPKKKAKVE

SEQ ID NO: 462 - protein, 2176 aa, synthetic construct
MPAAKRVKLDGGDKKYSIGLDIGTNSVGWAVITDEYKVPSKKFKVLGNTDRHSIKKNLIGALLFDSGETAEATRLKRTARRRYTRRKNRICYLQEIFSNEMAKVDDSFFHRLEESFLVEEDKKHERHPIFGNIVDEVAYHEKYPTIYHLRKKLVDSTDKADLRLIYLALAHMIKFRGHFLIEGDLNPDNSDVDKLFIQLVQTYNQLFEENPINASGVDAKAILSARLSKSRRLENLIAQLPGEKKNGLFGNLIALSLGLTPNFKSNFDLAEDAKLQLSKDTYDDDLDNLLAQIGDQYADLFLAAKNLSDAILLSDILRVNTEITKAPLSASMIKRYDEHHQDLTLLKALVRQQLPEKYKEIFFDQSKNGYAGYIDGGASQEEFYKFIKPILEKMDGTEELLVKLNREDLLRKQRTFDNGSIPHQIHLGELHAILRRQEDFYPFLKDNREKIEKILTFRIPYYVGPLARGNSRFAWMTRKSEETITPWNFEEVVDKGASAQSFIERMTNFDKNLPNEKVLPKHSLLYEYFTVYNELTKVKYVTEGMRKPAFLSGEQKKAIVDLLFKTNRKVTVKQLKEDYFKKIECFDSVEISGVEDRFNASLGTYHDLLKIIKDKDFLDNEENEDILEDIVLTLTLFEDREMIEERLKTYAHLFDDKVMKQLKRRRYTGWGRLSRKLINGIRDKQSGKTILDFLKSDGFANRNFMQLIHDDSLTFKEDIQKAQVSGQGDSLHEHIANLAGSPAIKKGILQTVKVVDELVKVMGRHKPENIVIEMARENQTTQKGQKNSRERMKRIEEGIKELGSQILKEHPVENTQLQNEKLYLYYLQNGRDMYVDQELDINRLSDYDVDHIVPQSFLKDDSIDNKVLTRSDKARGKSDNVPSEEVVKKMKNYWRQLLNAKLITQRKFDNLTKAERGGLSELDKAGFIKRQLVETRQITKHVAQILDSRMNTKYDENDKLIREVKVITLKSKLVSDFRKDFQFYKVREINNYHHAHDAYLNAVVGTALIKKYPKLESEFVYGDYKVYDVRKMIAKSEQEIGKATAKYFFYSNIMNFFKTEITLANGEIRKRPLIETNGETGEIVWDKGRDFATVRKVLSMPQVNIVKKTEVQTGGFSKESILPKRNSDKLIARKKDWDPKKYGGFDSPTVAYSVLVVAKVEKGKSKKLKSVKELLGITIMERSSFEKNPIDFLEAKGYKEVKKDLIIKLPKYSLFELENGRKRMLASAGELQKGNELALPSKYVNFLYLASHYEKLKGSPEDNEQKQLFVEQHKHYLDEIIEQISEFSKRVILADANLDKVLSAYNKHRDKPIREQAENIIHLFTLTNLGAPAAFKYFDTTIDRKRYTSTKEVLDATLIHQSITGLYETRIDLSQLGGDGGGGGEAAAKGSSGGMDPLQLLQPLEAEIKGTKLKAHWNSGATITCVPEAFLEDERPIQTMLIKTIHGEKQQDVYYLTFKVQGRKVEAEVLASPYDYILLNPSDVPWLMKKPLQLTVLVPLHEYQERLLQQTALPKEQKELLQKLFLKYDALWQHWENQVGHRRIKPHNIATGTLAPRPQKQYPINPKAKPSIQIVIDDLLKQGVLIQQNSTMNTPVYPVPKPDGKWRMVLDYREVNKTIPLIAAQNQHSAGILSSIYRGKYKTTLDLTNGFWAHPITPESYWLTAFTWQGKQYCWTRLPQGFLNSPALFNADVVDLLKEIPNVQAYVDDIYISHDDPQEHLEQLEKIFSILLNAGYVVSLKKSEIAQREVEFLGFNITKEGRGLTDTFKQKLLNITPPKDLKQLQSILGLLNFARNFIPNYSELVKPLYTIVAPANGKFISWTEDNSNQLQHIISVLNQADNLEERNPETRLIIKVNSSPSAGYIRYYNEGSKRPIMYVNYIFSKAEAKFTQTEKLLTTMHKGLIKAMDLAMGQEILVYSPIVSMTKIQRTPLPERKALPVRWITWMTYLEDPRIQFHYDKSLPELQQIPNVTEDVIAKTKHPSEFAMVFYTDGSAIKHPDVNKSHSAGMGIAQVQFIPEYKIVHQWSIPLGDHTAQLAEIAAVEFACKKALKISGPVLIVTDSFYVAESANKELPYWKSNGFLNNKKKPLRHVSKWKSIAECLQLKPDIIIMHEKGHQQPMTTLHTEGNNLADKLATQGSYVVHAGKRTADGSEFEKRTADGSEFESPKKKAKVE

SEQ ID NO: 463 - protein, 2176 aa, synthetic construct
MPAAKRVKLDGGDKKYSIGLDIGTNSVGWAVITDEYKVPSKKFKVLGNTDRHSIKKNLIGALLFDSGETAEATRLKRTARRRYTRRKNRICYLQEIFSNEMAKVDDSFFHRLEESFLVEEDKKHERHPIFGNIVDEVAYHEKYPTIYHLRKKLVDSTDKADLRLIYLALAHMIKFRGHFLIEGDLNPDNSDVDKLFIQLVQTYNQLFEENPINASGVDAKAILSARLSKSRRLENLIAQLPGEKKNGLFGNLIALSLGLTPNFKSNFDLAEDAKLQLSKDTYDDDLDNLLAQIGDQYADLFLAAKNLSDAILLSDILRVNTEITKAPLSASMIKRYDEHHQDLTLLKALVRQQLPEKYKEIFFDQSKNGYAGYIDGGASQEEFYKFIKPILEKMDGTEELLVKLNREDLLRKQRTFDNGSIPHQIHLGELHAILRRQEDFYPFLKDNREKIEKILTFRIPYYVGPLARGNSRFAWMTRKSEETITPWNFEEVVDKGASAQSFIERMTNFDKNLPNEKVLPKHSLLYEYFTVYNELTKVKYVTEGMRKPAFLSGEQKKAIVDLLFKTNRKVTVKQLKEDYFKKIECFDSVEISGVEDRFNASLGTYHDLLKIIKDKDFLDNEENEDILEDIVLTLTLFEDREMIEERLKTYAHLFDDKVMKQLKRRRYTGWGRLSRKLINGIRDKQSGKTILDFLKSDGFANRNFMQLIHDDSLTFKEDIQKAQVSGQGDSLHEHIANLAGSPAIKKGILQTVKVVDELVKVMGRHKPENIVIEMARENQTTQKGQKNSRERMKRIEEGIKELGSQILKEHPVENTQLQNEKLYLYYLQNGRDMYVDQELDINRLSDYDVDHIVPQSFLKDDSIDNKVLTRSDKARGKSDNVPSEEVVKKMKNYWRQLLNAKLITQRKFDNLTKAERGGLSELDKAGFIKRQLVETRQITKHVAQILDSRMNTKYDENDKLIREVKVITLKSKLVSDFRKDFQFYKVREINNYHHAHDAYLNAVVGTALIKKYPKLESEFVYGDYKVYDVRKMIAKSEQEIGKATAKYFFYSNIMNFFKTEITLANGEIRKRPLIETNGETGEIVWDKGRDFATVRKVLSMPQVNIVKKTEVQTGGFSKESILPKRNSDKLIARKKDWDPKKYGGFDSPTVAYSVLVVAKVEKGKSKKLKSVKELLGITIMERSSFEKNPIDFLEAKGYKEVKKDLIIKLPKYSLFELENGRKRMLASAGELQKGNELALPSKYVNFLYLASHYEKLKGSPEDNEQKQLFVEQHKHYLDEIIEQISEFSKRVILADANLDKVLSAYNKHRDKPIREQAENIIHLFTLTNLGAPAAFKYFDTTIDRKRYTSTKEVLDATLIHQSITGLYETRIDLSQLGGDGGGGGEAAAKPAPGGMDPLQLLQPLEAEIKGTKLKAHWNSGATITCVPEAFLEDERPIQTMLIKTIHGEKQQDVYYLTFKVQGRKVEAEVLASPYDYILLNPSDVPWLMKKPLQLTVLVPLHEYQERLLQQTALPKEQKELLQKLFLKYDALWQHWENQVGHRRIKPHNIATGTLAPRPQKQYPINPKAKPSIQIVIDDLLKQGVLIQQNSTMNTPVYPVPKPDGKWRMVLDYREVNKTIPLIAAQNQHSAGILSSIYRGKYKTTLDLTNGFWAHPITPESYWLTAFTWQGKQYCWTRLPQGFLNSPALFNADVVDLLKEIPNVQAYVDDIYISHDDPQEHLEQLEKIFSILLNAGYVVSLKKSEIAQREVEFLGFNITKEGRGLTDTFKQKLLNITPPKDLKQLQSILGLLNFARNFIPNYSELVKPLYTIVAPANGKFISWTEDNSNQLQHIISVLNQADNLEERNPETRLIIKVNSSPSAGYIRYYNEGSKRPIMYVNYIFSKAEAKFTQTEKLLTTMHKGLIKAMDLAMGQEILVYSPIVSMTKIQRTPLPERKALPVRWITWMTYLEDPRIQFHYDKSLPELQQIPNVTEDVIAKTKHPSEFAMVFYTDGSAIKHPDVNKSHSAGMGIAQVQFIPEYKIVHQWSIPLGDHTAQLAEIAAVEFACKKALKISGPVLIVTDSFYVAESANKELPYWKSNGFLNNKKKPLRHVSKWKSIAECLQLKPDIIIMHEKGHQQPMTTLHTEGNNLADKLATQGSYVVHAGKRTADGSEFEKRTADGSEFESPKKKAKVE

SEQ ID NO: 464 - protein, 2176 aa, synthetic construct
MPAAKRVKLDGGDKKYSIGLDIGTNSVGWAVITDEYKVPSKKFKVLGNTDRHSIKKNLIGALLFDSGETAEATRLKRTARRRYTRRKNRICYLQEIFSNEMAKVDDSFFHRLEESFLVEEDKKHERHPIFGNIVDEVAYHEKYPTIYHLRKKLVDSTDKADLRLIYLALAHMIKFRGHFLIEGDLNPDNSDVDKLFIQLVQTYNQLFEENPINASGVDAKAILSARLSKSRRLENLIAQLPGEKKNGLFGNLIALSLGLTPNFKSNFDLAEDAKLQLSKDTYDDDLDNLLAQIGDQYADLFLAAKNLSDAILLSDILRVNTEITKAPLSASMIKRYDEHHQDLTLLKALVRQQLPEKYKEIFFDQSKNGYAGYIDGGASQEEFYKFIKPILEKMDGTEELLVKLNREDLLRKQRTFDNGSIPHQIHLGELHAILRRQEDFYPFLKDNREKIEKILTFRIPYYVGPLARGNSRFAWMTRKSEETITPWNFEEVVDKGASAQSFIERMTNFDKNLPNEKVLPKHSLLYEYFTVYNELTKVKYVTEGMRKPAFLSGEQKKAIVDLLFKTNRKVTVKQLKEDYFKKIECFDSVEISGVEDRFNASLGTYHDLLKIIKDKDFLDNEENEDILEDIVLTLTLFEDREMIEERLKTYAHLFDDKVMKQLKRRRYTGWGRLSRKLINGIRDKQSGKTILDFLKSDGFANRNFMQLIHDDSLTFKEDIQKAQVSGQGDSLHEHIANLAGSPAIKKGILQTVKVVDELVKVMGRHKPENIVIEMARENQTTQKGQKNSRERMKRIEEGIKELGSQILKEHPVENTQLQNEKLYLYYLQNGRDMYVDQELDINRLSDYDVDHIVPQSFLKDDSIDNKVLTRSDKARGKSDNVPSEEVVKKMKNYWRQLLNAKLITQRKFDNLTKAERGGLSELDKAGFIKRQLVETRQITKHVAQILDSRMNTKYDENDKLIREVKVITLKSKLVSDFRKDFQFYKVREINNYHHAHDAYLNAVVGTALIKKYPKLESEFVYGDYKVYDVRKMIAKSEQEIGKATAKYFFYSNIMNFFKTEITLANGEIRKRPLIETNGETGEIVWDKGRDFATVRKVLSMPQVNIVKKTEVQTGGFSKESILPKRNSDKLIARKKDWDPKKYGGFDSPTVAYSVLVVAKVEKGKSKKLKSVKELLGITIMERSSFEKNPIDFLEAKGYKEVKKDLIIKLPKYSLFELENGRKRMLASAGELQKGNELALPSKYVNFLYLASHYEKLKGSPEDNEQKQLFVEQHKHYLDEIIEQISEFSKRVILADANLDKVLSAYNKHRDKPIREQAENIIHLFTLTNLGAPAAFKYFDTTIDRKRYTSTKEVLDATLIHQSITGLYETRIDLSQLGGDGGGGSEAAAKPAPGGMDPLQLLQPLEAEIKGTKLKAHWNSGATITCVPEAFLEDERPIQTMLIKTIHGEKQQDVYYLTFKVQGRKVEAEVLASPYDYILLNPSDVPWLMKKPLQLTVLVPLHEYQERLLQQTALPKEQKELLQKLFLKYDALWQHWENQVGHRRIKPHNIATGTLAPRPQKQYPINPKAKPSIQIVIDDLLKQGVLIQQNSTMNTPVYPVPKPDGKWRMVLDYREVNKTIPLIAAQNQHSAGILSSIYRGKYKTTLDLTNGFWAHPITPESYWLTAFTWQGKQYCWTRLPQGFLNSPALFNADVVDLLKEIPNVQAYVDDIYISHDDPQEHLEQLEKIFSILLNAGYVVSLKKSEIAQREVEFLGFNITKEGRGLTDTFKQKLLNITPPKDLKQLQSILGLLNFARNFIPNYSELVKPLYTIVAPANGKFISWTEDNSNQLQHIISVLNQADNLEERNPETRLIIKVNSSPSAGYIRYYNEGSKRPIMYVNYIFSKAEAKFTQTEKLLTTMHKGLIKAMDLAMGQEILVYSPIVSMTKIQRTPLPERKALPVRWITWMTYLEDPRIQFHYDKSLPELQQIPNVTEDVIAKTKHPSEFAMVFYTDGSAIKHPDVNKSHSAGMGIAQVQFIPEYKIVHQWSIPLGDHTAQLAEIAAVEFACKKALKISGPVLIVTDSFYVAESANKELPYWKSNGFLNNKKKPLRHVSKWKSIAECLQLKPDIIIMHEKGHQQPMTTLHTEGNNLADKLATQGSYVVHAGKRTADGSEFEKRTADGSEFESPKKKAKVE

SEQ ID NO: 465 - protein, 2170 aa, synthetic construct
MPAAKRVKLDGGDKKYSIGLDIGTNSVGWAVITDEYKVPSKKFKVLGNTDRHSIKKNLIGALLFDSGETAEATRLKRTARRRYTRRKNRICYLQEIFSNEMAKVDDSFFHRLEESFLVEEDKKHERHPIFGNIVDEVAYHEKYPTIYHLRKKLVDSTDKADLRLIYLALAHMIKFRGHFLIEGDLNPDNSDVDKLFIQLVQTYNQLFEENPINASGVDAKAILSARLSKSRRLENLIAQLPGEKKNGLFGNLIALSLGLTPNFKSNFDLAEDAKLQLSKDTYDDDLDNLLAQIGDQYADLFLAAKNLSDAILLSDILRVNTEITKAPLSASMIKRYDEHHQDLTLLKALVRQQLPEKYKEIFFDQSKNGYAGYIDGGASQEEFYKFIKPILEKMDGTEELLVKLNREDLLRKQRTFDNGSIPHQIHLGELHAILRRQEDFYPFLKDNREKIEKILTFRIPYYVGPLARGNSRFAWMTRKSEETITPWNFEEVVDKGASAQSFIERMTNFDKNLPNEKVLPKHSLLYEYFTVYNELTKVKYVTEGMRKPAFLSGEQKKAIVDLLFKTNRKVTVKQLKEDYFKKIECFDSVEISGVEDRFNASLGTYHDLLKIIKDKDFLDNEENEDILEDIVLTLTLFEDREMIEERLKTYAHLFDDKVMKQLKRRRYTGWGRLSRKLINGIRDKQSGKTILDFLKSDGFANRNFMQLIHDDSLTFKEDIQKAQVSGQGDSLHEHIANLAGSPAIKKGILQTVKVVDELVKVMGRHKPENIVIEMARENQTTQKGQKNSRERMKRIEEGIKELGSQILKEHPVENTQLQNEKLYLYYLQNGRDMYVDQELDINRLSDYDVDHIVPQSFLKDDSIDNKVLTRSDKARGKSDNVPSEEVVKKMKNYWRQLLNAKLITQRKFDNLTKAERGGLSELDKAGFIKRQLVETRQITKHVAQILDSRMNTKYDENDKLIREVKVITLKSKLVSDFRKDFQFYKVREINNYHHAHDAYLNAVVGTALIKKYPKLESEFVYGDYKVYDVRKMIAKSEQEIGKATAKYFFYSNIMNFFKTEITLANGEIRKRPLIETNGETGEIVWDKGRDFATVRKVLSMPQVNIVKKTEVQTGGFSKESILPKRNSDKLIARKKDWDPKKYGGFDSPTVAYSVLVVAKVEKGKSKKLKSVKELLGITIMERSSFEKNPIDFLEAKGYKEVKKDLIIKLPKYSLFELENGRKRMLASAGELQKGNELALPSKYVNFLYLASHYEKLKGSPEDNEQKQLFVEQHKHYLDEIIEQISEFSKRVILADANLDKVLSAYNKHRDKPIREQAENIIHLFTLTNLGAPAAFKYFDTTIDRKRYTSTKEVLDATLIHQSITGLYETRIDLSQLGGDGGEAAAKGGMDPLQLLQPLEAEIKGTKLKAHWNSGATITCVPEAFLEDERPIQTMLIKTIHGEKQQDVYYLTFKVQGRKVEAEVLASPYDYILLNPSDVPWLMKKPLQLTVLVPLHEYQERLLQQTALPKEQKELLQKLFLKYDALWQHWENQVGHRRIKPHNIATGTLAPRPQKQYPINPKAKPSIQIVIDDLLKQGVLIQQNSTMNTPVYPVPKPDGKWRMVLDYREVNKTIPLIAAQNQHSAGILSSIYRGKYKTTLDLTNGFWAHPITPESYWLTAFTWQGKQYCWTRLPQGFLNSPALFNADVVDLLKEIPNVQAYVDDIYISHDDPQEHLEQLEKIFSILLNAGYVVSLKKSEIAQREVEFLGFNITKEGRGLTDTFKQKLLNITPPKDLKQLQSILGLLNFARNFIPNYSELVKPLYTIVAPANGKFISWTEDNSNQLQHIISVLNQADNLEERNPETRLIIKVNSSPSAGYIRYYNEGSKRPIMYVNYIFSKAEAKFTQTEKLLTTMHKGLIKAMDLAMGQEILVYSPIVSMTKIQRTPLPERKALPVRWITWMTYLEDPRIQFHYDKSLPELQQIPNVTEDVIAKTKHPSEFAMVFYTDGSAIKHPDVNKSHSAGMGIAQVQFIPEYKIVHQWSIPLGDHTAQLAEIAAVEFACKKALKISGPVLIVTDSFYVAESANKELPYWKSNGFLNNKKKPLRHVSKWKSIAECLQLKPDIIIMHEKGHQQPMTTLHTEGNNLADKLATQGSYVVHAGKRTADGSEFEKRTADGSEFESPKKKAKVE

SEQ ID NO: 466 - protein, 2176 aa, synthetic construct
MPAAKRVKLDGGDKKYSIGLDIGTNSVGWAVITDEYKVPSKKFKVLGNTDRHSIKKNLIGALLFDSGETAEATRLKRTARRRYTRRKNRICYLQEIFSNEMAKVDDSFFHRLEESFLVEEDKKHERHPIFGNIVDEVAYHEKYPTIYHLRKKLVDSTDKADLRLIYLALAHMIKFRGHFLIEGDLNPDNSDVDKLFIQLVQTYNQLFEENPINASGVDAKAILSARLSKSRRLENLIAQLPGEKKNGLFGNLIALSLGLTPNFKSNFDLAEDAKLQLSKDTYDDDLDNLLAQIGDQYADLFLAAKNLSDAILLSDILRVNTEITKAPLSASMIKRYDEHHQDLTLLKALVRQQLPEKYKEIFFDQSKNGYAGYIDGGASQEEFYKFIKPILEKMDGTEELLVKLNREDLLRKQRTFDNGSIPHQIHLGELHAILRRQEDFYPFLKDNREKIEKILTFRIPYYVGPLARGNSRFAWMTRKSEETITPWNFEEVVDKGASAQSFIERMTNFDKNLPNEKVLPKHSLLYEYFTVYNELTKVKYVTEGMRKPAFLSGEQKKAIVDLLFKTNRKVTVKQLKEDYFKKIECFDSVEISGVEDRFNASLGTYHDLLKIIKDKDFLDNEENEDILEDIVLTLTLFEDREMIEERLKTYAHLFDDKVMKQLKRRRYTGWGRLSRKLINGIRDKQSGKTILDFLKSDGFANRNFMQLIHDDSLTFKEDIQKAQVSGQGDSLHEHIANLAGSPAIKKGILQTVKVVDELVKVMGRHKPENIVIEMARENQTTQKGQKNSRERMKRIEEGIKELGSQILKEHPVENTQLQNEKLYLYYLQNGRDMYVDQELDINRLSDYDVDHIVPQSFLKDDSIDNKVLTRSDKARGKSDNVPSEEVVKKMKNYWRQLLNAKLITQRKFDNLTKAERGGLSELDKAGFIKRQLVETRQITKHVAQILDSRMNTKYDENDKLIREVKVITLKSKLVSDFRKDFQFYKVREINNYHHAHDAYLNAVVGTALIKKYPKLESEFVYGDYKVYDVRKMIAKSEQEIGKATAKYFFYSNIMNFFKTEITLANGEIRKRPLIETNGETGEIVWDKGRDFATVRKVLSMPQVNIVKKTEVQTGGFSKESILPKRNSDKLIARKKDWDPKKYGGFDSPTVAYSVLVVAKVEKGKSKKLKSVKELLGITIMERSSFEKNPIDFLEAKGYKEVKKDLIIKLPKYSLFELENGRKRMLASAGELQKGNELALPSKYVNFLYLASHYEKLKGSPEDNEQKQLFVEQHKHYLDEIIEQISEFSKRVILADANLDKVLSAYNKHRDKPIREQAENIIHLFTLTNLGAPAAFKYFDTTIDRKRYTSTKEVLDATLIHQSITGLYETRIDLSQLGGDGGGGSGSSEAAAKGGMDPLQLLQPLEAEIKGTKLKAHWNSGATITCVPEAFLEDERPIQTMLIKTIHGEKQQDVYYLTFKVQGRKVEAEVLASPYDYILLNPSDVPWLMKKPLQLTVLVPLHEYQERLLQQTALPKEQKELLQKLFLKYDALWQHWENQVGHRRIKPHNIATGTLAPRPQKQYPINPKAKPSIQIVIDDLLKQGVLIQQNSTMNTPVYPVPKPDGKWRMVLDYREVNKTIPLIAAQNQHSAGILSSIYRGKYKTTLDLTNGFWAHPITPESYWLTAFTWQGKQYCWTRLPQGFLNSPALFNADVVDLLKEIPNVQAYVDDIYISHDDPQEHLEQLEKIFSILLNAGYVVSLKKSEIAQREVEFLGFNITKEGRGLTDTFKQKLLNITPPKDLKQLQSILGLLNFARNFIPNYSELVKPLYTIVAPANGKFISWTEDNSNQLQHIISVLNQADNLEERNPETRLIIKVNSSPSAGYIRYYNEGSKRPIMYVNYIFSKAEAKFTQTEKLLTTMHKGLIKAMDLAMGQEILVYSPIVSMTKIQRTPLPERKALPVRWITWMTYLEDPRIQFHYDKSLPELQQIPNVTEDVIAKTKHPSEFAMVFYTDGSAIKHPDVNKSHSAGMGIAQVQFIPEYKIVHQWSIPLGDHTAQLAEIAAVEFACKKALKISGPVLIVTDSFYVAESANKELPYWKSNGFLNNKKKPLRHVSKWKSIAECLQLKPDIIIMHEKGHQQPMTTLHTEGNNLADKLATQGSYVVHAGKRTADGSEFEKRTADGSEFESPKKKAKVE

SEQ ID NO: 467 - protein, 2177 aa, synthetic construct
MPAAKRVKLDGGDKKYSIGLDIGTNSVGWAVITDEYKVPSKKFKVLGNTDRHSIKKNLIGALLFDSGETAEATRLKRTARRRYTRRKNRICYLQEIFSNEMAKVDDSFFHRLEESFLVEEDKKHERHPIFGNIVDEVAYHEKYPTIYHLRKKLVDSTDKADLRLIYLALAHMIKFRGHFLIEGDLNPDNSDVDKLFIQLVQTYNQLFEENPINASGVDAKAILSARLSKSRRLENLIAQLPGEKKNGLFGNLIALSLGLTPNFKSNFDLAEDAKLQLSKDTYDDDLDNLLAQIGDQYADLFLAAKNLSDAILLSDILRVNTEITKAPLSASMIKRYDEHHQDLTLLKALVRQQLPEKYKEIFFDQSKNGYAGYIDGGASQEEFYKFIKPILEKMDGTEELLVKLNREDLLRKQRTFDNGSIPHQIHLGELHAILRRQEDFYPFLKDNREKIEKILTFRIPYYVGPLARGNSRFAWMTRKSEETITPWNFEEVVDKGASAQSFIERMTNFDKNLPNEKVLPKHSLLYEYFTVYNELTKVKYVTEGMRKPAFLSGEQKKAIVDLLFKTNRKVTVKQLKEDYFKKIECFDSVEISGVEDRFNASLGTYHDLLKIIKDKDFLDNEENEDILEDIVLTLTLFEDREMIEERLKTYAHLFDDKVMKQLKRRRYTGWGRLSRKLINGIRDKQSGKTILDFLKSDGFANRNFMQLIHDDSLTFKEDIQKAQVSGQGDSLHEHIANLAGSPAIKKGILQTVKVVDELVKVMGRHKPENIVIEMARENQTTQKGQKNSRERMKRIEEGIKELGSQILKEHPVENTQLQNEKLYLYYLQNGRDMYVDQELDINRLSDYDVDHIVPQSFLKDDSIDNKVLTRSDKARGKSDNVPSEEVVKKMKNYWRQLLNAKLITQRKFDNLTKAERGGLSELDKAGFIKRQLVETRQITKHVAQILDSRMNTKYDENDKLIREVKVITLKSKLVSDFRKDFQFYKVREINNYHHAHDAYLNAVVGTALIKKYPKLESEFVYGDYKVYDVRKMIAKSEQEIGKATAKYFFYSNIMNFFKTEITLANGEIRKRPLIETNGETGEIVWDKGRDFATVRKVLSMPQVNIVKKTEVQTGGFSKESILPKRNSDKLIARKKDWDPKKYGGFDSPTVAYSVLVVAKVEKGKSKKLKSVKELLGITIMERSSFEKNPIDFLEAKGYKEVKKDLIIKLPKYSLFELENGRKRMLASAGELQKGNELALPSKYVNFLYLASHYEKLKGSPEDNEQKQLFVEQHKHYLDEIIEQISEFSKRVILADANLDKVLSAYNKHRDKPIREQAENIIHLFTLTNLGAPAAFKYFDTTIDRKRYTSTKEVLDATLIHQSITGLYETRIDLSQLGGDGGGSSGSSGSSGSSGGMDPLQLLQPLEAEIKGTKLKAHWNSGATITCVPEAFLEDERPIQTMLIKTIHGEKQQDVYYLTFKVQGRKVEAEVLASPYDYILLNPSDVPWLMKKPLQLTVLVPLHEYQERLLQQTALPKEQKELLQKLFLKYDALWQHWENQVGHRRIKPHNIATGTLAPRPQKQYPINPKAKPSIQIVIDDLLKQGVLIQQNSTMNTPVYPVPKPDGKWRMVLDYREVNKTIPLIAAQNQHSAGILSSIYRGKYKTTLDLTNGFWAHPITPESYWLTAFTWQGKQYCWTRLPQGFLNSPALFNADVVDLLKEIPNVQAYVDDIYISHDDPQEHLEQLEKIFSILLNAGYVVSLKKSEIAQREVEFLGFNITKEGRGLTDTFKQKLLNITPPKDLKQLQSILGLLNFARNFIPNYSELVKPLYTIVAPANGKFISWTEDNSNQLQHIISVLNQADNLEERNPETRLIIKVNSSPSAGYIRYYNEGSKRPIMYVNYIFSKAEAKFTQTEKLLTTMHKGLIKAMDLAMGQEILVYSPIVSMTKIQRTPLPERKALPVRWITWMTYLEDPRIQFHYDKSLPELQQIPNVTEDVIAKTKHPSEFAMVFYTDGSAIKHPDVNKSHSAGMGIAQVQFIPEYKIVHQWSIPLGDHTAQLAEIAAVEFACKKALKISGPVLIVTDSFYVAESANKELPYWKSNGFLNNKKKPLRHVSKWKSIAECLQLKPDIIIMHEKGHQQPMTTLHTEGNNLADKLATQGSYVVHAGKRTADGSEFEKRTADGSEFESPKKKAKVE

SEQ ID NO: 468 - protein, 2177 aa, synthetic construct
MPAAKRVKLDGGDKKYSIGLDIGTNSVGWAVITDEYKVPSKKFKVLGNTDRHSIKKNLIGALLFDSGETAEATRLKRTARRRYTRRKNRICYLQEIFSNEMAKVDDSFFHRLEESFLVEEDKKHERHPIFGNIVDEVAYHEKYPTIYHLRKKLVDSTDKADLRLIYLALAHMIKFRGHFLIEGDLNPDNSDVDKLFIQLVQTYNQLFEENPINASGVDAKAILSARLSKSRRLENLIAQLPGEKKNGLFGNLIALSLGLTPNFKSNFDLAEDAKLQLSKDTYDDDLDNLLAQIGDQYADLFLAAKNLSDAILLSDILRVNTEITKAPLSASMIKRYDEHHQDLTLLKALVRQQLPEKYKEIFFDQSKNGYAGYIDGGASQEEFYKFIKPILEKMDGTEELLVKLNREDLLRKQRTFDNGSIPHQIHLGELHAILRRQEDFYPFLKDNREKIEKILTFRIPYYVGPLARGNSRFAWMTRKSEETITPWNFEEVVDKGASAQSFIERMTNFDKNLPNEKVLPKHSLLYEYFTVYNELTKVKYVTEGMRKPAFLSGEQKKAIVDLLFKTNRKVTVKQLKEDYFKKIECFDSVEISGVEDRFNASLGTYHDLLKIIKDKDFLDNEENEDILEDIVLTLTLFEDREMIEERLKTYAHLFDDKVMKQLKRRRYTGWGRLSRKLINGIRDKQSGKTILDFLKSDGFANRNFMQLIHDDSLTFKEDIQKAQVSGQGDSLHEHIANLAGSPAIKKGILQTVKVVDELVKVMGRHKPENIVIEMARENQTTQKGQKNSRERMKRIEEGIKELGSQILKEHPVENTQLQNEKLYLYYLQNGRDMYVDQELDINRLSDYDVDHIVPQSFLKDDSIDNKVLTRSDKARGKSDNVPSEEVVKKMKNYWRQLLNAKLITQRKFDNLTKAERGGLSELDKAGFIKRQLVETRQITKHVAQILDSRMNTKYDENDKLIREVKVITLKSKLVSDFRKDFQFYKVREINNYHHAHDAYLNAVVGTALIKKYPKLESEFVYGDYKVYDVRKMIAKSEQEIGKATAKYFFYSNIMNFFKTEITLANGEIRKRPLIETNGETGEIVWDKGRDFATVRKVLSMPQVNIVKKTEVQTGGFSKESILPKRNSDKLIARKKDWDPKKYGGFDSPTVAYSVLVVAKVEKGKSKKLKSVKELLGITIMERSSFEKNPIDFLEAKGYKEVKKDLIIKLPKYSLFELENGRKRMLASAGELQKGNELALPSKYVNFLYLASHYEKLKGSPEDNEQKQLFVEQHKHYLDEIIEQISEFSKRVILADANLDKVLSAYNKHRDKPIREQAENIIHLFTLTNLGAPAAFKYFDTTIDRKRYTSTKEVLDATLIHQSITGLYETRIDLSQLGGDGGGSAGSAAGSGEFGGMDPLQLLQPLEAEIKGTKLKAHWNSGATITCVPEAFLEDERPIQTMLIKTIHGEKQQDVYYLTFKVQGRKVEAEVLASPYDYILLNPSDVPWLMKKPLQLTVLVPLHEYQERLLQQTALPKEQKELLQKLFLKYDALWQHWENQVGHRRIKPHNIATGTLAPRPQKQYPINPKAKPSIQIVIDDLLKQGVLIQQNSTMNTPVYPVPKPDGKWRMVLDYREVNKTIPLIAAQNQHSAGILSSIYRGKYKTTLDLTNGFWAHPITPESYWLTAFTWQGKQYCWTRLPQGFLNSPALFNADVVDLLKEIPNVQAYVDDIYISHDDPQEHLEQLEKIFSILLNAGYVVSLKKSEIAQREVEFLGFNITKEGRGLTDTFKQKLLNITPPKDLKQLQSILGLLNFARNFIPNYSELVKPLYTIVAPANGKFISWTEDNSNQLQHIISVLNQADNLEERNPETRLIIKVNSSPSAGYIRYYNEGSKRPIMYVNYIFSKAEAKFTQTEKLLTTMHKGLIKAMDLAMGQEILVYSPIVSMTKIQRTPLPERKALPVRWITWMTYLEDPRIQFHYDKSLPELQQIPNVTEDVIAKTKHPSEFAMVFYTDGSAIKHPDVNKSHSAGMGIAQVQFIPEYKIVHQWSIPLGDHTAQLAEIAAVEFACKKALKISGPVLIVTDSFYVAESANKELPYWKSNGFLNNKKKPLRHVSKWKSIAECLQLKPDIIIMHEKGHQQPMTTLHTEGNNLADKLATQGSYVVHAGKRTADGSEFEKRTADGSEFESPKKKAKVE

SEQ ID NO: 469 - protein, 2171 aa, synthetic construct
MPAAKRVKLDGGDKKYSIGLDIGTNSVGWAVITDEYKVPSKKFKVLGNTDRHSIKKNLIGALLFDSGETAEATRLKRTARRRYTRRKNRICYLQEIFSNEMAKVDDSFFHRLEESFLVEEDKKHERHPIFGNIVDEVAYHEKYPTIYHLRKKLVDSTDKADLRLIYLALAHMIKFRGHFLIEGDLNPDNSDVDKLFIQLVQTYNQLFEENPINASGVDAKAILSARLSKSRRLENLIAQLPGEKKNGLFGNLIALSLGLTPNFKSNFDLAEDAKLQLSKDTYDDDLDNLLAQIGDQYADLFLAAKNLSDAILLSDILRVNTEITKAPLSASMIKRYDEHHQDLTLLKALVRQQLPEKYKEIFFDQSKNGYAGYIDGGASQEEFYKFIKPILEKMDGTEELLVKLNREDLLRKQRTFDNGSIPHQIHLGELHAILRRQEDFYPFLKDNREKIEKILTFRIPYYVGPLARGNSRFAWMTRKSEETITPWNFEEVVDKGASAQSFIERMTNFDKNLPNEKVLPKHSLLYEYFTVYNELTKVKYVTEGMRKPAFLSGEQKKAIVDLLFKTNRKVTVKQLKEDYFKKIECFDSVEISGVEDRFNASLGTYHDLLKIIKDKDFLDNEENEDILEDIVLTLTLFEDREMIEERLKTYAHLFDDKVMKQLKRRRYTGWGRLSRKLINGIRDKQSGKTILDFLKSDGFANRNFMQLIHDDSLTFKEDIQKAQVSGQGDSLHEHIANLAGSPAIKKGILQTVKVVDELVKVMGRHKPENIVIEMARENQTTQKGQKNSRERMKRIEEGIKELGSQILKEHPVENTQLQNEKLYLYYLQNGRDMYVDQELDINRLSDYDVDHIVPQSFLKDDSIDNKVLTRSDKARGKSDNVPSEEVVKKMKNYWRQLLNAKLITQRKFDNLTKAERGGLSELDKAGFIKRQLVETRQITKHVAQILDSRMNTKYDENDKLIREVKVITLKSKLVSDFRKDFQFYKVREINNYHHAHDAYLNAVVGTALIKKYPKLESEFVYGDYKVYDVRKMIAKSEQEIGKATAKYFFYSNIMNFFKTEITLANGEIRKRPLIETNGETGEIVWDKGRDFATVRKVLSMPQVNIVKKTEVQTGGFSKESILPKRNSDKLIARKKDWDPKKYGGFDSPTVAYSVLVVAKVEKGKSKKLKSVKELLGITIMERSSFEKNPIDFLEAKGYKEVKKDLIIKLPKYSLFELENGRKRMLASAGELQKGNELALPSKYVNFLYLASHYEKLKGSPEDNEQKQLFVEQHKHYLDEIIEQISEFSKRVILADANLDKVLSAYNKHRDKPIREQAENIIHLFTLTNLGAPAAFKYFDTTIDRKRYTSTKEVLDATLIHQSITGLYETRIDLSQLGGDGGGGSGGSGGMDPLQLLQPLEAEIKGTKLKAHWNSGATITCVPEAFLEDERPIQTMLIKTIHGEKQQDVYYLTFKVQGRKVEAEVLASPYDYILLNPSDVPWLMKKPLQLTVLVPLHEYQERLLQQTALPKEQKELLQKLFLKYDALWQHWENQVGHRRIKPHNIATGTLAPRPQKQYPINPKAKPSIQIVIDDLLKQGVLIQQNSTMNTPVYPVPKPDGKWRMVLDYREVNKTIPLIAAQNQHSAGILSSIYRGKYKTTLDLTNGFWAHPITPESYWLTAFTWQGKQYCWTRLPQGFLNSPALFNADVVDLLKEIPNVQAYVDDIYISHDDPQEHLEQLEKIFSILLNAGYVVSLKKSEIAQREVEFLGFNITKEGRGLTDTFKQKLLNITPPKDLKQLQSILGLLNFARNFIPNYSELVKPLYTIVAPANGKFISWTEDNSNQLQHIISVLNQADNLEERNPETRLIIKVNSSPSAGYIRYYNEGSKRPIMYVNYIFSKAEAKFTQTEKLLTTMHKGLIKAMDLAMGQEILVYSPIVSMTKIQRTPLPERKALPVRWITWMTYLEDPRIQFHYDKSLPELQQIPNVTEDVIAKTKHPSEFAMVFYTDGSAIKHPDVNKSHSAGMGIAQVQFIPEYKIVHQWSIPLGDHTAQLAEIAAVEFACKKALKISGPVLIVTDSFYVAESANKELPYWKSNGFLNNKKKPLRHVSKWKSIAECLQLKPDIIIMHEKGHQQPMTTLHTEGNNLADKLATQGSYVVHAGKRTADGSEFEKRTADGSEFESPKKKAKVE

SEQ ID NO: 470 - protein, 2176 aa, synthetic construct
MPAAKRVKLDGGDKKYSIGLDIGTNSVGWAVITDEYKVPSKKFKVLGNTDRHSIKKNLIGALLFDSGETAEATRLKRTARRRYTRRKNRICYLQEIFSNEMAKVDDSFFHRLEESFLVEEDKKHERHPIFGNIVDEVAYHEKYPTIYHLRKKLVDSTDKADLRLIYLALAHMIKFRGHFLIEGDLNPDNSDVDKLFIQLVQTYNQLFEENPINASGVDAKAILSARLSKSRRLENLIAQLPGEKKNGLFGNLIALSLGLTPNFKSNFDLAEDAKLQLSKDTYDDDLDNLLAQIGDQYADLFLAAKNLSDAILLSDILRVNTEITKAPLSASMIKRYDEHHQDLTLLKALVRQQLPEKYKEIFFDQSKNGYAGYIDGGASQEEFYKFIKPILEKMDGTEELLVKLNREDLLRKQRTFDNGSIPHQIHLGELHAILRRQEDFYPFLKDNREKIEKILTFRIPYYVGPLARGNSRFAWMTRKSEETITPWNFEEVVDKGASAQSFIERMTNFDKNLPNEKVLPKHSLLYEYFTVYNELTKVKYVTEGMRKPAFLSGEQKKAIVDLLFKTNRKVTVKQLKEDYFKKIECFDSVEISGVEDRFNASLGTYHDLLKIIKDKDFLDNEENEDILEDIVLTLTLFEDREMIEERLKTYAHLFDDKVMKQLKRRRYTGWGRLSRKLINGIRDKQSGKTILDFLKSDGFANRNFMQLIHDDSLTFKEDIQKAQVSGQGDSLHEHIANLAGSPAIKKGILQTVKVVDELVKVMGRHKPENIVIEMARENQTTQKGQKNSRERMKRIEEGIKELGSQILKEHPVENTQLQNEKLYLYYLQNGRDMYVDQELDINRLSDYDVDHIVPQSFLKDDSIDNKVLTRSDKARGKSDNVPSEEVVKKMKNYWRQLLNAKLITQRKFDNLTKAERGGLSELDKAGFIKRQLVETRQITKHVAQILDSRMNTKYDENDKLIREVKVITLKSKLVSDFRKDFQFYKVREINNYHHAHDAYLNAVVGTALIKKYPKLESEFVYGDYKVYDVRKMIAKSEQEIGKATAKYFFYSNIMNFFKTEITLANGEIRKRPLIETNGETGEIVWDKGRDFATVRKVLSMPQVNIVKKTEVQTGGFSKESILPKRNSDKLIARKKDWDPKKYGGFDSPTVAYSVLVVAKVEKGKSKKLKSVKELLGITIMERSSFEKNPIDFLEAKGYKEVKKDLIIKLPKYSLFELENGRKRMLASAGELQKGNELALPSKYVNFLYLASHYEKLKGSPEDNEQKQLFVEQHKHYLDEIIEQISEFSKRVILADANLDKVLSAYNKHRDKPIREQAENIIHLFTLTNLGAPAAFKYFDTTIDRKRYTSTKEVLDATLIHQSITGLYETRIDLSQLGGDGGGGGEAAAKGGSGGMDPLQLLQPLEAEIKGTKLKAHWNSGATITCVPEAFLEDERPIQTMLIKTIHGEKQQDVYYLTFKVQGRKVEAEVLASPYDYILLNPSDVPWLMKKPLQLTVLVPLHEYQERLLQQTALPKEQKELLQKLFLKYDALWQHWENQVGHRRIKPHNIATGTLAPRPQKQYPINPKAKPSIQIVIDDLLKQGVLIQQNSTMNTPVYPVPKPDGKWRMVLDYREVNKTIPLIAAQNQHSAGILSSIYRGKYKTTLDLTNGFWAHPITPESYWLTAFTWQGKQYCWTRLPQGFLNSPALFNADVVDLLKEIPNVQAYVDDIYISHDDPQEHLEQLEKIFSILLNAGYVVSLKKSEIAQREVEFLGFNITKEGRGLTDTFKQKLLNITPPKDLKQLQSILGLLNFARNFIPNYSELVKPLYTIVAPANGKFISWTEDNSNQLQHIISVLNQADNLEERNPETRLIIKVNSSPSAGYIRYYNEGSKRPIMYVNYIFSKAEAKFTQTEKLLTTMHKGLIKAMDLAMGQEILVYSPIVSMTKIQRTPLPERKALPVRWITWMTYLEDPRIQFHYDKSLPELQQIPNVTEDVIAKTKHPSEFAMVFYTDGSAIKHPDVNKSHSAGMGIAQVQFIPEYKIVHQWSIPLGDHTAQLAEIAAVEFACKKALKISGPVLIVTDSFYVAESANKELPYWKSNGFLNNKKKPLRHVSKWKSIAECLQLKPDIIIMHEKGHQQPMTTLHTEGNNLADKLATQGSYVVHAGKRTADGSEFEKRTADGSEFESPKKKAKVE

SEQ ID NO: 471 - protein, 2174 aa, synthetic construct
MPAAKRVKLDGGDKKYSIGLDIGTNSVGWAVITDEYKVPSKKFKVLGNTDRHSIKKNLIGALLFDSGETAEATRLKRTARRRYTRRKNRICYLQEIFSNEMAKVDDSFFHRLEESFLVEEDKKHERHPIFGNIVDEVAYHEKYPTIYHLRKKLVDSTDKADLRLIYLALAHMIKFRGHFLIEGDLNPDNSDVDKLFIQLVQTYNQLFEENPINASGVDAKAILSARLSKSRRLENLIAQLPGEKKNGLFGNLIALSLGLTPNFKSNFDLAEDAKLQLSKDTYDDDLDNLLAQIGDQYADLFLAAKNLSDAILLSDILRVNTEITKAPLSASMIKRYDEHHQDLTLLKALVRQQLPEKYKEIFFDQSKNGYAGYIDGGASQEEFYKFIKPILEKMDGTEELLVKLNREDLLRKQRTFDNGSIPHQIHLGELHAILRRQEDFYPFLKDNREKIEKILTFRIPYYVGPLARGNSRFAWMTRKSEETITPWNFEEVVDKGASAQSFIERMTNFDKNLPNEKVLPKHSLLYEYFTVYNELTKVKYVTEGMRKPAFLSGEQKKAIVDLLFKTNRKVTVKQLKEDYFKKIECFDSVEISGVEDRFNASLGTYHDLLKIIKDKDFLDNEENEDILEDIVLTLTLFEDREMIEERLKTYAHLFDDKVMKQLKRRRYTGWGRLSRKLINGIRDKQSGKTILDFLKSDGFANRNFMQLIHDDSLTFKEDIQKAQVSGQGDSLHEHIANLAGSPAIKKGILQTVKVVDELVKVMGRHKPENIVIEMARENQTTQKGQKNSRERMKRIEEGIKELGSQILKEHPVENTQLQNEKLYLYYLQNGRDMYVDQELDINRLSDYDVDHIVPQSFLKDDSIDNKVLTRSDKARGKSDNVPSEEVVKKMKNYWRQLLNAKLITQRKFDNLTKAERGGLSELDKAGFIKRQLVETRQITKHVAQILDSRMNTKYDENDKLIREVKVITLKSKLVSDFRKDFQFYKVREINNYHHAHDAYLNAVVGTALIKKYPKLESEFVYGDYKVYDVRKMIAKSEQEIGKATAKYFFYSNIMNFFKTEITLANGEIRKRPLIETNGETGEIVWDKGRDFATVRKVLSMPQVNIVKKTEVQTGGFSKESILPKRNSDKLIARKKDWDPKKYGGFDSPTVAYSVLVVAKVEKGKSKKLKSVKELLGITIMERSSFEKNPIDFLEAKGYKEVKKDLIIKLPKYSLFELENGRKRMLASAGELQKGNELALPSKYVNFLYLASHYEKLKGSPEDNEQKQLFVEQHKHYLDEIIEQISEFSKRVILADANLDKVLSAYNKHRDKPIREQAENIIHLFTLTNLGAPAAFKYFDTTIDRKRYTSTKEVLDATLIHQSITGLYETRIDLSQLGGDGGPAPAPAPAPGGMDPLQLLQPLEAEIKGTKLKAHWNSGATITCVPEAFLEDERPIQTMLIKTIHGEKQQDVYYLTFKVQGRKVEAEVLASPYDYILLNPSDVPWLMKKPLQLTVLVPLHEYQERLLQQTALPKEQKELLQKLFLKYDALWQHWENQVGHRRIKPHNIATGTLAPRPQKQYPINPKAKPSIQIVIDDLLKQGVLIQQNSTMNTPVYPVPKPDGKWRMVLDYREVNKTIPLIAAQNQHSAGILSSIYRGKYKTTLDLTNGFWAHPITPESYWLTAFTWQGKQYCWTRLPQGFLNSPALFNADVVDLLKEIPNVQAYVDDIYISHDDPQEHLEQLEKIFSILLNAGYVVSLKKSEIAQREVEFLGFNITKEGRGLTDTFKQKLLNITPPKDLKQLQSILGLLNFARNFIPNYSELVKPLYTIVAPANGKFISWTEDNSNQLQHIISVLNQADNLEERNPETRLIIKVNSSPSAGYIRYYNEGSKRPIMYVNYIFSKAEAKFTQTEKLLTTMHKGLIKAMDLAMGQEILVYSPIVSMTKIQRTPLPERKALPVRWITWMTYLEDPRIQFHYDKSLPELQQIPNVTEDVIAKTKHPSEFAMVFYTDGSAIKHPDVNKSHSAGMGIAQVQFIPEYKIVHQWSIPLGDHTAQLAEIAAVEFACKKALKISGPVLIVTDSFYVAESANKELPYWKSNGFLNNKKKPLRHVSKWKSIAECLQLKPDIIIMHEKGHQQPMTTLHTEGNNLADKLATQGSYVVHAGKRTADGSEFEKRTADGSEFESPKKKAKVE

SEQ ID NO: 472 - protein, 2174 aa, synthetic construct
MPAAKRVKLDGGDKKYSIGLDIGTNSVGWAVITDEYKVPSKKFKVLGNTDRHSIKKNLIGALLFDSGETAEATRLKRTARRRYTRRKNRICYLQEIFSNEMAKVDDSFFHRLEESFLVEEDKKHERHPIFGNIVDEVAYHEKYPTIYHLRKKLVDSTDKADLRLIYLALAHMIKFRGHFLIEGDLNPDNSDVDKLFIQLVQTYNQLFEENPINASGVDAKAILSARLSKSRRLENLIAQLPGEKKNGLFGNLIALSLGLTPNFKSNFDLAEDAKLQLSKDTYDDDLDNLLAQIGDQYADLFLAAKNLSDAILLSDILRVNTEITKAPLSASMIKRYDEHHQDLTLLKALVRQQLPEKYKEIFFDQSKNGYAGYIDGGASQEEFYKFIKPILEKMDGTEELLVKLNREDLLRKQRTFDNGSIPHQIHLGELHAILRRQEDFYPFLKDNREKIEKILTFRIPYYVGPLARGNSRFAWMTRKSEETITPWNFEEVVDKGASAQSFIERMTNFDKNLPNEKVLPKHSLLYEYFTVYNELTKVKYVTEGMRKPAFLSGEQKKAIVDLLFKTNRKVTVKQLKEDYFKKIECFDSVEISGVEDRFNASLGTYHDLLKIIKDKDFLDNEENEDILEDIVLTLTLFEDREMIEERLKTYAHLFDDKVMKQLKRRRYTGWGRLSRKLINGIRDKQSGKTILDFLKSDGFANRNFMQLIHDDSLTFKEDIQKAQVSGQGDSLHEHIANLAGSPAIKKGILQTVKVVDELVKVMGRHKPENIVIEMARENQTTQKGQKNSRERMKRIEEGIKELGSQILKEHPVENTQLQNEKLYLYYLQNGRDMYVDQELDINRLSDYDVDHIVPQSFLKDDSIDNKVLTRSDKARGKSDNVPSEEVVKKMKNYWRQLLNAKLITQRKFDNLTKAERGGLSELDKAGFIKRQLVETRQITKHVAQILDSRMNTKYDENDKLIREVKVITLKSKLVSDFRKDFQFYKVREINNYHHAHDAYLNAVVGTALIKKYPKLESEFVYGDYKVYDVRKMIAKSEQEIGKATAKYFFYSNIMNFFKTEITLANGEIRKRPLIETNGETGEIVWDKGRDFATVRKVLSMPQVNIVKKTEVQTGGFSKESILPKRNSDKLIARKKDWDPKKYGGFDSPTVAYSVLVVAKVEKGKSKKLKSVKELLGITIMERSSFEKNPIDFLEAKGYKEVKKDLIIKLPKYSLFELENGRKRMLASAGELQKGNELALPSKYVNFLYLASHYEKLKGSPEDNEQKQLFVEQHKHYLDEIIEQISEFSKRVILADANLDKVLSAYNKHRDKPIREQAENIIHLFTLTNLGAPAAFKYFDTTIDRKRYTSTKEVLDATLIHQSITGLYETRIDLSQLGGDGGGSSGGSGGGGGMDPLQLLQPLEAEIKGTKLKAHWNSGATITCVPEAFLEDERPIQTMLIKTIHGEKQQDVYYLTFKVQGRKVEAEVLASPYDYILLNPSDVPWLMKKPLQLTVLVPLHEYQERLLQQTALPKEQKELLQKLFLKYDALWQHWENQVGHRRIKPHNIATGTLAPRPQKQYPINPKAKPSIQIVIDDLLKQGVLIQQNSTMNTPVYPVPKPDGKWRMVLDYREVNKTIPLIAAQNQHSAGILSSIYRGKYKTTLDLTNGFWAHPITPESYWLTAFTWQGKQYCWTRLPQGFLNSPALFNADVVDLLKEIPNVQAYVDDIYISHDDPQEHLEQLEKIFSILLNAGYVVSLKKSEIAQREVEFLGFNITKEGRGLTDTFKQKLLNITPPKDLKQLQSILGLLNFARNFIPNYSELVKPLYTIVAPANGKFISWTEDNSNQLQHIISVLNQADNLEERNPETRLIIKVNSSPSAGYIRYYNEGSKRPIMYVNYIFSKAEAKFTQTEKLLTTMHKGLIKAMDLAMGQEILVYSPIVSMTKIQRTPLPERKALPVRWITWMTYLEDPRIQFHYDKSLPELQQIPNVTEDVIAKTKHPSEFAMVFYTDGSAIKHPDVNKSHSAGMGIAQVQFIPEYKIVHQWSIPLGDHTAQLAEIAAVEFACKKALKISGPVLIVTDSFYVAESANKELPYWKSNGFLNNKKKPLRHVSKWKSIAECLQLKPDIIIMHEKGHQQPMTTLHTEGNNLADKLATQGSYVVHAGKRTADGSEFEKRTADGSEFESPKKKAKVE

SEQ ID NO: 473 - protein, 2174 aa, synthetic construct
MPAAKRVKLDGGDKKYSIGLDIGTNSVGWAVITDEYKVPSKKFKVLGNTDRHSIKKNLIGALLFDSGETAEATRLKRTARRRYTRRKNRICYLQEIFSNEMAKVDDSFFHRLEESFLVEEDKKHERHPIFGNIVDEVAYHEKYPTIYHLRKKLVDSTDKADLRLIYLALAHMIKFRGHFLIEGDLNPDNSDVDKLFIQLVQTYNQLFEENPINASGVDAKAILSARLSKSRRLENLIAQLPGEKKNGLFGNLIALSLGLTPNFKSNFDLAEDAKLQLSKDTYDDDLDNLLAQIGDQYADLFLAAKNLSDAILLSDILRVNTEITKAPLSASMIKRYDEHHQDLTLLKALVRQQLPEKYKEIFFDQSKNGYAGYIDGGASQEEFYKFIKPILEKMDGTEELLVKLNREDLLRKQRTFDNGSIPHQIHLGELHAILRRQEDFYPFLKDNREKIEKILTFRIPYYVGPLARGNSRFAWMTRKSEETITPWNFEEVVDKGASAQSFIERMTNFDKNLPNEKVLPKHSLLYEYFTVYNELTKVKYVTEGMRKPAFLSGEQKKAIVDLLFKTNRKVTVKQLKEDYFKKIECFDSVEISGVEDRFNASLGTYHDLLKIIKDKDFLDNEENEDILEDIVLTLTLFEDREMIEERLKTYAHLFDDKVMKQLKRRRYTGWGRLSRKLINGIRDKQSGKTILDFLKSDGFANRNFMQLIHDDSLTFKEDIQKAQVSGQGDSLHEHIANLAGSPAIKKGILQTVKVVDELVKVMGRHKPENIVIEMARENQTTQKGQKNSRERMKRIEEGIKELGSQILKEHPVENTQLQNEKLYLYYLQNGRDMYVDQELDINRLSDYDVDHIVPQSFLKDDSIDNKVLTRSDKARGKSDNVPSEEVVKKMKNYWRQLLNAKLITQRKFDNLTKAERGGLSELDKAGFIKRQLVETRQITKHVAQILDSRMNTKYDENDKLIREVKVITLKSKLVSDFRKDFQFYKVREINNYHHAHDAYLNAVVGTALIKKYPKLESEFVYGDYKVYDVRKMIAKSEQEIGKATAKYFFYSNIMNFFKTEITLANGEIRKRPLIETNGETGEIVWDKGRDFATVRKVLSMPQVNIVKKTEVQTGGFSKESILPKRNSDKLIARKKDWDPKKYGGFDSPTVAYSVLVVAKVEKGKSKKLKSVKELLGITIMERSSFEKNPIDFLEAKGYKEVKKDLIIKLPKYSLFELENGRKRMLASAGELQKGNELALPSKYVNFLYLASHYEKLKGSPEDNEQKQLFVEQHKHYLDEIIEQISEFSKRVILADANLDKVLSAYNKHRDKPIREQAENIIHLFTLTNLGAPAAFKYFDTTIDRKRYTSTKEVLDATLIHQSITGLYETRIDLSQLGGDGGPAPGSSGGSGGMDPLQLLQPLEAEIKGTKLKAHWNSGATITCVPEAFLEDERPIQTMLIKTIHGEKQQDVYYLTFKVQGRKVEAEVLASPYDYILLNPSDVPWLMKKPLQLTVLVPLHEYQERLLQQTALPKEQKELLQKLFLKYDALWQHWENQVGHRRIKPHNIATGTLAPRPQKQYPINPKAKPSIQIVIDDLLKQGVLIQQNSTMNTPVYPVPKPDGKWRMVLDYREVNKTIPLIAAQNQHSAGILSSIYRGKYKTTLDLTNGFWAHPITPESYWLTAFTWQGKQYCWTRLPQGFLNSPALFNADVVDLLKEIPNVQAYVDDIYISHDDPQEHLEQLEKIFSILLNAGYVVSLKKSEIAQREVEFLGFNITKEGRGLTDTFKQKLLNITPPKDLKQLQSILGLLNFARNFIPNYSELVKPLYTIVAPANGKFISWTEDNSNQLQHIISVLNQADNLEERNPETRLIIKVNSSPSAGYIRYYNEGSKRPIMYVNYIFSKAEAKFTQTEKLLTTMHKGLIKAMDLAMGQEILVYSPIVSMTKIQRTPLPERKALPVRWITWMTYLEDPRIQFHYDKSLPELQQIPNVTEDVIAKTKHPSEFAMVFYTDGSAIKHPDVNKSHSAGMGIAQVQFIPEYKIVHQWSIPLGDHTAQLAEIAAVEFACKKALKISGPVLIVTDSFYVAESANKELPYWKSNGFLNNKKKPLRHVSKWKSIAECLQLKPDIIIMHEKGHQQPMTTLHTEGNNLADKLATQGSYVVHAGKRTADGSEFEKRTADGSEFESPKKKAKVE

SEQ ID NO: 474 - protein, 2176 aa, synthetic construct
MPAAKRVKLDGGDKKYSIGLDIGTNSVGWAVITDEYKVPSKKFKVLGNTDRHSIKKNLIGALLFDSGETAEATRLKRTARRRYTRRKNRICYLQEIFSNEMAKVDDSFFHRLEESFLVEEDKKHERHPIFGNIVDEVAYHEKYPTIYHLRKKLVDSTDKADLRLIYLALAHMIKFRGHFLIEGDLNPDNSDVDKLFIQLVQTYNQLFEENPINASGVDAKAILSARLSKSRRLENLIAQLPGEKKNGLFGNLIALSLGLTPNFKSNFDLAEDAKLQLSKDTYDDDLDNLLAQIGDQYADLFLAAKNLSDAILLSDILRVNTEITKAPLSASMIKRYDEHHQDLTLLKALVRQQLPEKYKEIFFDQSKNGYAGYIDGGASQEEFYKFIKPILEKMDGTEELLVKLNREDLLRKQRTFDNGSIPHQIHLGELHAILRRQEDFYPFLKDNREKIEKILTFRIPYYVGPLARGNSRFAWMTRKSEETITPWNFEEVVDKGASAQSFIERMTNFDKNLPNEKVLPKHSLLYEYFTVYNELTKVKYVTEGMRKPAFLSGEQKKAIVDLLFKTNRKVTVKQLKEDYFKKIECFDSVEISGVEDRFNASLGTYHDLLKIIKDKDFLDNEENEDILEDIVLTLTLFEDREMIEERLKTYAHLFDDKVMKQLKRRRYTGWGRLSRKLINGIRDKQSGKTILDFLKSDGFANRNFMQLIHDDSLTFKEDIQKAQVSGQGDSLHEHIANLAGSPAIKKGILQTVKVVDELVKVMGRHKPENIVIEMARENQTTQKGQKNSRERMKRIEEGIKELGSQILKEHPVENTQLQNEKLYLYYLQNGRDMYVDQELDINRLSDYDVDHIVPQSFLKDDSIDNKVLTRSDKARGKSDNVPSEEVVKKMKNYWRQLLNAKLITQRKFDNLTKAERGGLSELDKAGFIKRQLVETRQITKHVAQILDSRMNTKYDENDKLIREVKVITLKSKLVSDFRKDFQFYKVREINNYHHAHDAYLNAVVGTALIKKYPKLESEFVYGDYKVYDVRKMIAKSEQEIGKATAKYFFYSNIMNFFKTEITLANGEIRKRPLIETNGETGEIVWDKGRDFATVRKVLSMPQVNIVKKTEVQTGGFSKESILPKRNSDKLIARKKDWDPKKYGGFDSPTVAYSVLVVAKVEKGKSKKLKSVKELLGITIMERSSFEKNPIDFLEAKGYKEVKKDLIIKLPKYSLFELENGRKRMLASAGELQKGNELALPSKYVNFLYLASHYEKLKGSPEDNEQKQLFVEQHKHYLDEIIEQISEFSKRVILADANLDKVLSAYNKHRDKPIREQAENIIHLFTLTNLGAPAAFKYFDTTIDRKRYTSTKEVLDATLIHQSITGLYETRIDLSQLGGDGGPAPGGSEAAAKGGMDPLQLLQPLEAEIKGTKLKAHWNSGATITCVPEAFLEDERPIQTMLIKTIHGEKQQDVYYLTFKVQGRKVEAEVLASPYDYILLNPSDVPWLMKKPLQLTVLVPLHEYQERLLQQTALPKEQKELLQKLFLKYDALWQHWENQVGHRRIKPHNIATGTLAPRPQKQYPINPKAKPSIQIVIDDLLKQGVLIQQNSTMNTPVYPVPKPDGKWRMVLDYREVNKTIPLIAAQNQHSAGILSSIYRGKYKTTLDLTNGFWAHPITPESYWLTAFTWQGKQYCWTRLPQGFLNSPALFNADVVDLLKEIPNVQAYVDDIYISHDDPQEHLEQLEKIFSILLNAGYVVSLKKSEIAQREVEFLGFNITKEGRGLTDTFKQKLLNITPPKDLKQLQSILGLLNFARNFIPNYSELVKPLYTIVAPANGKFISWTEDNSNQLQHIISVLNQADNLEERNPETRLIIKVNSSPSAGYIRYYNEGSKRPIMYVNYIFSKAEAKFTQTEKLLTTMHKGLIKAMDLAMGQEILVYSPIVSMTKIQRTPLPERKALPVRWITWMTYLEDPRIQFHYDKSLPELQQIPNVTEDVIAKTKHPSEFAMVFYTDGSAIKHPDVNKSHSAGMGIAQVQFIPEYKIVHQWSIPLGDHTAQLAEIAAVEFACKKALKISGPVLIVTDSFYVAESANKELPYWKSNGFLNNKKKPLRHVSKWKSIAECLQLKPDIIIMHEKGHQQPMTTLHTEGNNLADKLATQGSYVVHAGKRTADGSEFEKRTADGSEFESPKKKAKVE

SEQ ID NO: 475 - protein, 2176 aa, synthetic construct
MPAAKRVKLDGGDKKYSIGLDIGTNSVGWAVITDEYKVPSKKFKVLGNTDRHSIKKNLIGALLFDSGETAEATRLKRTARRRYTRRKNRICYLQEIFSNEMAKVDDSFFHRLEESFLVEEDKKHERHPIFGNIVDEVAYHEKYPTIYHLRKKLVDSTDKADLRLIYLALAHMIKFRGHFLIEGDLNPDNSDVDKLFIQLVQTYNQLFEENPINASGVDAKAILSARLSKSRRLENLIAQLPGEKKNGLFGNLIALSLGLTPNFKSNFDLAEDAKLQLSKDTYDDDLDNLLAQIGDQYADLFLAAKNLSDAILLSDILRVNTEITKAPLSASMIKRYDEHHQDLTLLKALVRQQLPEKYKEIFFDQSKNGYAGYIDGGASQEEFYKFIKPILEKMDGTEELLVKLNREDLLRKQRTFDNGSIPHQIHLGELHAILRRQEDFYPFLKDNREKIEKILTFRIPYYVGPLARGNSRFAWMTRKSEETITPWNFEEVVDKGASAQSFIERMTNFDKNLPNEKVLPKHSLLYEYFTVYNELTKVKYVTEGMRKPAFLSGEQKKAIVDLLFKTNRKVTVKQLKEDYFKKIECFDSVEISGVEDRFNASLGTYHDLLKIIKDKDFLDNEENEDILEDIVLTLTLFEDREMIEERLKTYAHLFDDKVMKQLKRRRYTGWGRLSRKLINGIRDKQSGKTILDFLKSDGFANRNFMQLIHDDSLTFKEDIQKAQVSGQGDSLHEHIANLAGSPAIKKGILQTVKVVDELVKVMGRHKPENIVIEMARENQTTQKGQKNSRERMKRIEEGIKELGSQILKEHPVENTQLQNEKLYLYYLQNGRDMYVDQELDINRLSDYDVDHIVPQSFLKDDSIDNKVLTRSDKARGKSDNVPSEEVVKKMKNYWRQLLNAKLITQRKFDNLTKAERGGLSELDKAGFIKRQLVETRQITKHVAQILDSRMNTKYDENDKLIREVKVITLKSKLVSDFRKDFQFYKVREINNYHHAHDAYLNAVVGTALIKKYPKLESEFVYGDYKVYDVRKMIAKSEQEIGKATAKYFFYSNIMNFFKTEITLANGEIRKRPLIETNGETGEIVWDKGRDFATVRKVLSMPQVNIVKKTEVQTGGFSKESILPKRNSDKLIARKKDWDPKKYGGFDSPTVAYSVLVVAKVEKGKSKKLKSVKELLGITIMERSSFEKNPIDFLEAKGYKEVKKDLIIKLPKYSLFELENGRKRMLASAGELQKGNELALPSKYVNFLYLASHYEKLKGSPEDNEQKQLFVEQHKHYLDEIIEQISEFSKRVILADANLDKVLSAYNKHRDKPIREQAENIIHLFTLTNLGAPAAFKYFDTTIDRKRYTSTKEVLDATLIHQSITGLYETRIDLSQLGGDGGEAAAKGGGGSSGGMDPLQLLQPLEAEIKGTKLKAHWNSGATITCVPEAFLEDERPIQTMLIKTIHGEKQQDVYYLTFKVQGRKVEAEVLASPYDYILLNPSDVPWLMKKPLQLTVLVPLHEYQERLLQQTALPKEQKELLQKLFLKYDALWQHWENQVGHRRIKPHNIATGTLAPRPQKQYPINPKAKPSIQIVIDDLLKQGVLIQQNSTMNTPVYPVPKPDGKWRMVLDYREVNKTIPLIAAQNQHSAGILSSIYRGKYKTTLDLTNGFWAHPITPESYWLTAFTWQGKQYCWTRLPQGFLNSPALFNADVVDLLKEIPNVQAYVDDIYISHDDPQEHLEQLEKIFSILLNAGYVVSLKKSEIAQREVEFLGFNITKEGRGLTDTFKQKLLNITPPKDLKQLQSILGLLNFARNFIPNYSELVKPLYTIVAPANGKFISWTEDNSNQLQHIISVLNQADNLEERNPETRLIIKVNSSPSAGYIRYYNEGSKRPIMYVNYIFSKAEAKFTQTEKLLTTMHKGLIKAMDLAMGQEILVYSPIVSMTKIQRTPLPERKALPVRWITWMTYLEDPRIQFHYDKSLPELQQIPNVTEDVIAKTKHPSEFAMVFYTDGSAIKHPDVNKSHSAGMGIAQVQFIPEYKIVHQWSIPLGDHTAQLAEIAAVEFACKKALKISGPVLIVTDSFYVAESANKELPYWKSNGFLNNKKKPLRHVSKWKSIAECLQLKPDIIIMHEKGHQQPMTTLHTEGNNLADKLATQGSYVVHAGKRTADGSEFEKRTADGSEFESPKKKAKVE

(The sequence listing continues in the following parts.)

1. A template RNA comprising from 5′ to 3′:
a) a gRNA spacer that is complementary to a first portion of the human HBB gene, wherein the gRNA spacer comprises a sequence according to SEQ ID NO: 20,027;
b) a gRNA scaffold that binds a SpCas9;
c) a heterologous object sequence comprising a mutation region to correct a mutation in a second portion of the human HBB gene; and
d) a primer binding site (PBS) sequence comprising 8 bases with 100% identity to a third portion of the human HBB gene, wherein the PBS sequence comprises a nucleotide sequence comprising GAGAAGUCUGC.

2. The template RNA of claim 1, wherein the mutation to be corrected in the human HBB gene is E6V.

3. The template RNA of claim 1, wherein the gRNA spacer has a length of 20 nucleotides.

4. The template RNA of claim 1, wherein the heterologous object sequence has a length of 10-20 nucleotides.

5. The template RNA of claim 1, wherein the heterologous object sequence comprises, from 5′ to 3′, a post-edit homology region, a mutation region, and a pre-edit homology region.

6. The template RNA of claim 1, wherein the heterologous object sequence has an RNA sequence of (i) ACCUGACUCCUGAG, (ii) ACCUGACUCCCGAG, or (iii) an RNA sequence having at least 90% identity thereto.

7. The template RNA of claim 1, wherein the PBS sequence has a length of 11-16 nucleotides.

8. The template RNA of claim 1, wherein the PBS sequence consists of an RNA sequence of GAGAAGUCUGC.

9. The template RNA of claim 1, wherein the gRNA scaffold comprises an RNA sequence having at least 90% identity to SEQ ID NO: 20,117.

10. The template RNA of claim 1, wherein the gRNA scaffold comprises an RNA sequence according to SEQ ID NO: 20,117.

11. The template RNA of claim 1, which comprises an RNA sequence having at least 90% identity to SEQ ID NO: 21,963, SEQ ID NO: 20,567, or SEQ ID NO: 21,903.

12. The template RNA of claim 1, which comprises an RNA sequence according to SEQ ID NO: 21,963, SEQ ID NO: 20,567, or SEQ ID NO: 21,903.

13. The template RNA of claim 1, wherein the mutation region comprises a first region designed to correct a pathogenic mutation in the HBB gene and a second region designed to introduce a silent substitution.

14. The template RNA of claim 1, which comprises one or more chemically modified nucleotides.

15. The template RNA of claim 14, which comprises the RNA sequence and chemical modifications set out in SEQ ID NO: 20,942, SEQ ID NO: 20,477, or SEQ ID NO: 20,950.

16. A gene modifying system comprising:
a template RNA of claim 1, and
a gene modifying polypeptide, or a nucleic acid encoding the gene modifying polypeptide.

17. The gene modifying system of claim 16, which comprises the nucleic acid encoding the gene modifying polypeptide, wherein the nucleic acid comprises RNA.

18. The gene modifying system of claim 16, wherein the gene modifying polypeptide comprises:
a reverse transcriptase (RT) domain;
a Cas domain; and
a linker disposed between the RT domain and the Cas domain.

19. The gene modifying system of claim 18, wherein the Cas domain is a SpCas9 domain.

20. The gene modifying system of claim 18, wherein the RT domain is an RT domain from a murine leukemia virus (MMLV), a porcine endogenous retrovirus (PERV); Avian reticuloendotheliosis virus (AVIRE), a feline leukemia virus (FLV), simian foamy virus (SFV) (e.g., SFV3L), bovine leukemia virus (BLV), Mason-Pfizer monkey virus (MPMV), human foamy virus (HFV), or bovine foamy/syncytial virus (BFV/BSV).

21. The gene modifying system of claim 16, which further comprises a second strand-targeting gRNA spacer that directs a second nick to the second strand of the human HBB gene.

22. A pharmaceutical composition, comprising the gene modifying system of claim 16 and a pharmaceutically acceptable excipient or carrier.

23. The pharmaceutical composition of claim 22, wherein the pharmaceutically acceptable excipient or carrier is selected from the group consisting of a plasmid vector, a viral vector, a vesicle, and a lipid nanoparticle.

24. A method of making the template RNA of claim 1, the method comprising synthesizing the template RNA by in vitro transcription, solid-phase synthesis, or by introducing a DNA encoding the template RNA into a host cell under conditions that allow for production of the template RNA.

25. A method for modifying a target site in the human HBB gene in a cell, the method comprising contacting the cell with the gene modifying system of claim 16, or DNA encoding the same, thereby modifying the target site in the human HBB gene in a cell.

26. A method for treating a subject having a disease or condition associated with a mutation in the human HBB gene, the method comprising administering to the subject the gene modifying system of claim 16, or DNA encoding the same, thereby treating the subject having a disease or condition associated with a mutation in the human HBB gene.

27. A template RNA comprising, e.g., from 5′ to 3′:
(i) a gRNA spacer that is complementary to a first portion of the human HBB gene, wherein the gRNA spacer has a sequence comprising the core nucleotides of a gRNA spacer sequence of Table 1, or wherein the gRNA spacer has a sequence of a spacer chosen from Table A, Table AA, Table B, Table B1, Tables 5A-5D, Table X⁴, or Table X⁴A;
(ii) a gRNA scaffold that binds a gene modifying polypeptide,
(iii) a heterologous object sequence comprising a mutation region to introduce a mutation into a second portion of the human HBB gene, and
(iv) a primer binding site (PBS) sequence comprising at least 3, 4, 5, 6, 7, or 8 bases with 100% identity to a third portion of the human HBB gene,
wherein the gRNA spacer has a sequence other than SEQ ID NO: 20,027 and the PBS sequence comprises a nucleotide sequence other than GAGAAGUCUGC.

28. A gene modifying system comprising:
a template RNA of claim 27, and
a gene modifying polypeptide, or a nucleic acid encoding the gene modifying polypeptide.

29. A method for modifying a target site in the human HBB gene in a cell, the method comprising contacting the cell with the gene modifying system of claim 28, or DNA encoding the same, thereby modifying the target site in the human HBB gene in a cell.

30. A method for treating a subject having a disease or condition associated with a mutation in the human HBB gene, the method comprising administering to the subject the gene modifying system of claim 28, or DNA encoding the same, thereby treating the subject having a disease or condition associated with a mutation in the human HBB gene.
